United States Patent Application Publication US 2014/0057251 A1 - sequence listing, part 98

SEQ ID NO: 183414 - DNA, 740 bp, Cannabis indica
ttttttttttaatttataaaaatgatgttgaaactataaccaacaccatcataaaaaaattttaaaaaaatatttagacaggtagaaatcacttcaatttattaatcatatatccaatattaatgatacttatcataaaatatggtattatattattgttagttggaaaataaacaacttcaacaaaaatgaccaataagaatgaactcactagtagttaattaggtaataattattattaggcaaattaagatctttacttcttaaactttaacatgtaccaaatcatatttttgaatttttctggttgttaaaaattccccatgaagtattgagattgttagatttaaggacttttgtttaatttcattcaattttactatttcaatgattgtttatgtactaaacttgctccccaaattttgatatatatcaatttatgtctctcgaactttgacatatactaaatcatgctccttgaacttttatccatgctagatttttttttactaaaattagacaaaaattcttaaatctaacaatctcaatagttcatggggcatttttaacaaccttaaaagttcacgggatatgatttggtacatgtcaaagtttgggagtaaaaatcctaattagctttattattattattattattattattattatttattattattatctaatagttaaaagtatagctagcatagttagtgtacatgtgaaaaatgttaaagttg

SEQ ID NO: 183415 - DNA, 734 bp, Cannabis indica
  modified_base (720)..(720): a, c, t, g, unknown or other
acaaaaaatgaatgaaaggcgaagagggaaatttataattattttcaaaatgtgagtgaattcttttatttatttttcttagaaaaactgacaaaatcctataactatcatagtttgggacaataaaaattctaattaattcttaaaaattgatagtaagacggagctaacctaacaacaaaaagcttaactcttcgctctcttatatacttacatataaagttaaatcttatttagaactcaaatagctttaatttttgttgtttttttattgcatatctctttatatattaaaagtgtctatctaacggcaattcttggtttaacgattcttggtttaacgttttgttattttttattccgttaactttaacggagaccatcgtttcctttaattaatgtcattcaaaccatattgcgattcctctttcttctctaacaaaaccatgcgattttcaatcccaataattctccatccccgcaactgtatcttctttcttcatccctgaagctgattcagatcgtcctagaatgcagtttactctagcgaagccctcattcatgcggtcttgtccagcgaagccctcattcaaaatttttagggcttcattctctctgtcaggttggatgaacagaaaatttgtaagagtttggtgattatgcttttttttttcaatatataaccacattgaattgcggtacggctccgcaaacgcaaanccttttttttttag

SEQ ID NO: 183416 - DNA, 659 bp, Cannabis indica
atgtatattgttaataaagcccatttagatttaaggtccaaatactttactaataagtttgcatttgcggtacatgttagtcccaaatgccaggttctatttattttatatttttatcacaaatgtgaggttcttatacccttacaatacaacaaggtgaacattattttcctttttctattggtttccttccaagtaaacattggccacatcagtgaataagtggtctataatagatgcgtacttagtagcttaatggcacggtggagcaaacatggcatgaggggaagagttaattggcatataataaaaataaagcctatttaaattaaagaatgtgtctggcgatctcttcatccaacaaaaagctcatccattattccccatccgcaaattataattttataaagaaaaaaattaacttttaatttgcttaataaagcttgatgcctaattaatggtgctagatgtccagctcggatgaccttagaatatctaattttttcacaataacctcaacacctccataatacattttttaggaaggcccgacgcaggtccgatgtatccctgatgcaatgcatcgtgatgaaaaaaattagatatggttaaagacaaaggtctgatataggacccgatagggtccgatggccagtccg

SEQ ID NO: 183417 - DNA, 556 bp, Cannabis indica
attcaaaactcctaacataaatcaaaaatcaatcgtaatccctttctccatatccttctctcactgtctccttcactcggagcttttctatcaatcccagcctcgtggatgactccctagaaagaaattgcagagaagatgaaaatggtaaaactcagctcaaggaggctgagggcatttgtattcaatatatacttagggatacaagcattgagccactgtgatgaagacaagtggcagcaaacaataggaaaatgcataaccgaaaagatactctagtacaattcaatgattacacagaaattcaaataacagaaaggaatattcaaattccctaaatgcacgatgctgacagcaaggcaagactcctctgtgatgagtagcagggaaagctatggtgaacttcaattctcaacaccacccctcaaacgaaggggggaagcaatcacaccgagtttggaaatgagctgatgaaacctggagtgaggcaaggctttagttagacagtctgcaatttgatccgaggaaggaaatgtatctcacttcaagttctttc

SEQ ID NO: 183418 - DNA, 1026 bp, Cannabis indica
agatgttgggtaagtgtgtaagaacttccaagcgatgtattttacgatgcctaagtgatattttgatactacttagtatttatatattttagtgaagctagtatctagttctcagagatgttactagtttgcagaaatgagagactggaaactcttcatttttgtgtgtgctagaaaagagaaatgcaaaattgtaaatttgattactctgacttcatagatcattgtaattgtgaaaaactagatggacggtccaaacaacattagattcagataagcagaacctaacgcaccaggccttttgtcaacttgggcattgggccctttctcccgagctcttggattttgtttttgatacttccaaggtttctaaacttgaggaaaaggtctcttaccttgttcttcaccacttgggattaaatggtcgcatcagatttggcatttgagcaaattgaaggtagagtcccaagttgattgtcaacttgggtactaggctagcgctatgtcaacttgggtgcaaggccctatttccagggacttgggtttgtggttctccccccgaattttacttgaatctccattatttttaatgaggaaaaaaattccgtgaaaaactttttgttgaacttgatcaaaaacaaggaaggttgataatatgtcaacctaggcacagggcctagcctcgagtgtcaacgtgggaattgagtacccaaaaatagttgactctcaatattatttgaagacaaagaagttgatgaaaataatttctaaaattatttcattttaaatggccaaggttgacatcatggccagcccaaaatgtcaacctgggcctctgggccctattatttgtgcccaagaatttttatgtttactatggaaggacctatttccctattttttataaagacaaatacgatgcaaatgttggacctccgatcggacacttagaaggcacccagattgaaaaaattaacttcctctaattctaattctcatgcctcaaatatttatgtggcatgtcta

SEQ ID NO: 183419 - DNA, 620 bp, Cannabis indica
atagtaaaaatatttattcaaccattatattgataaaaaaaattaatttcgtaacaaataaaagttgagattaatagatttatataattatataacataacatacaaaatgattcctaaacaaaatatttattatcaaactttattcaaaaataagaaagtctcttacattaataaaaatggaaaaaaaaaaaaacctatttaaaataccacctaaattatttttttttattttttatatataaatatataaattttatgataaacaatttcttttacctttattattataacttttaatttaaatatagatatttttctttcacttctattctatataaaatgtggctatataacagaattttcagtttatgagaaattattgggtgatttttttttttaaataaaaaaaaataacaaattattagatgttgccacataaagggtggcatccatgtagttagttaaacctaatataattagggcccgtttggtacaacttttggaaaagctaaaagctgcttttcaaaaaaactgtgacaaaaaggtgtttggtaagcagttaaaaaacaacttattaaagaatttatagaaaagctacagctaaaagctaaagatggt

SEQ ID NO: 183420 - DNA, 261 bp, Cannabis indica
tgtctgttatgcaaagtttgttcaaatttaatctgatgccaatggattattttagtactgtgatatcatattgacattattctcctttattgctagtgattggcaatgccctcactagaaatccaagccccggggaggttgttgcacgagttaatattttagcatcagatgggtgagaaaagcagtgcatcttagacttgcttatttgttttatttgagttttgtttcatcaatttcatgattccttttctctcttctttt

SEQ ID NO: 183421 - DNA, 1013 bp, Cannabis indica
atttgagctattgtgcggattggattggatccaaaaaaaataaaatccgcacttagtgcggattgaatgttatttgaccaaaaaagtgcgaattggatcggatgaacaaccctacatatgatcgtttggctttgtttggattaatttgaattgttgtgaaaattctaaaaccgtgatcattgatcaaagaatcaagaagcggtcatgtggcagaataaaatcattttgaagtatataatcttttttttttctaatttttaattagaatttattataatatttgattaatttaattaattattaattattaatcagaattaaaatatctcttatccatacttttctcttaatataaataaaacaataataattaaacctaaacacatactggcatcttcagtcgctccctatctatttttctattttttttccttcaaattctcaatctttttctcacacactcacaaacataatttgattgtgtacaatgatataattacataaatgcatatttcttgatgatgattttatgtacacattatttatctatttattttgctccattttttttttttcatgtcaaattttctttttgaatttgaaatcatcaaattatatcccttcactcatactttctcttcatctcttatttcattattataattaatataggataaatttattgtgaatgtagtaacaactatgagatatagtgataacataataatgactttgaatgtaaactcaactataagtagaatacagtaacaataattctaaaattataaaagataaatttatattatattttttaaatctctatgtgaggatatattttttaatttctattaatattttcttcattgtaatatttgaaagtatctcttaaagttaatgaatataagaaattaaaaataattcaaacatatcattttatttaaatttgattagatatacttatctatttctttattattaatttgtatgaatttttttggttattattacttttt

SEQ ID NO: 183422 - DNA, 728 bp, Cannabis indica
agtctattgtagataaattctattcatgtactcagggttgtagtcttctggatgatttaattgtttgtatcaagaacttgttatcttttcgcccaaacctgaaaatggttcatgttaacagggagtataataccttagcgcatagtgttgtaaaatgggatcttagacttgatagtgagttcatttggaatggctctttacctttcatttaatcttgtgtttgtggtttggtctttgtaattcccaagacttttcatcaagaaaaagaaaaatgtatataaaatgttggggtgtacttaataatattaagaggtgtaaatataactatcctattttgttttttttactggtatgattgacacatgtaactaattaataaaaaaacagacaaactcatacgtatggtgtaaaatctactatttggcggccggagaataagaagaaagagttgagaaaaaaaaaaaacgtactgcgaactggccatggaaatctggcacaaagcccaaagctttgccgaagaagccacgaagcgctctcaagagctagccaaagacgccgctcaacgaacccaggggttgaccatcggcacttcaaagctctacgacgttgtttctgagactgccaagcgctccaaggagattgccgccgcggcctccaagcgagccgaccagtttctctctgagccctcaaacgagccgaagatatcaagcaattggcctctgtgatca

SEQ ID NO: 183423 - DNA, 698 bp, Cannabis indica
tattagaatttgggttaattttttcaaaaatattgtcatgcgattttttttttaaatatattgtattttaataaaacaatagtggaacacaaaataaagaacaactaaaaataacagtggaacaactaaaaaacaaccataaaacaacagtaaaaacttaacacagtacacaatataaaatttacacaatatttttgaaaaaaaacacagtatttttgaaaaaaattccgcccccacggtataaaaagttaaaaaagttaaaaatttcagtatgtggtgtaattaaccctttttaaaatagggtacaaaataaccaaaaaagtatctttaacattatgaatctatagtcacaacaacaacaataacaacagcagcaacaacaacagcaacaacaacaacaacaacaacaacaacaacaacaacaacaacaataataataataatatgtttctaaatattaacataataataagatacataatagtaacttgttaaattttagttaccttttttaaccaatttagaaaagttttttaaaactaaattgtttatgacactatatgttaacttttacatgtatgatcaacacactagtaactcattaattttctaaaatagatatgaatggaacaaaaatgtatcataaatagtaagataatttaattgtcatatctttaaaggtaaccaattattgtctt

SEQ ID NO: 183424 - DNA, 608 bp, Cannabis indica
  modified_base (546)..(546): a, c, t, g, unknown or other
tttagcataatatctaggctgatttataggctcttttgtactttgaatgttaaatttagtgaagtttcatttcatacaaaaaaaaaaaagatgttggacactactatatgtacctaatatcaatgttataccattgaaagcaagtcattgcgttacacaatgacttgagagatactgttttttctacattttattgaatttttctcataaaataattatttttgaaaaaaaaaaaaacataattttgctaacttttgctataaaacccataaaaatgaagattccagaaaaaaaaacattttggtaaacatttcacttgtctataaggcccatgggcctaatgggctacaatttgggcttgcttaacagagcttcagaagtggcgttgtacacgagagaagctgttgtattggtaaaaggcggtctctaacattcttcaaaaaaccaagaagaagaaagaagaagaatattgcgaattcccatggtttgaggcatgtacggctccatattcacgtcctctacttcattctcagtcgctgtcacacncacgatcgctgatcaacctagattccgttgcatcggtatttttcttcttctttaatttactc

SEQ ID NO: 183425 - DNA, 577 bp, Cannabis indica
atgtgccttacaacaaataatcatctagccagctgacgatcaggttcactatcaaactcctgctactgtggatattgatgagcaagtcaagggtttgagtaaagaacctgaaatggtcgttggaaccttcctgccccttgcctcgtgaagcaggaagtactggctcgcagttttgctcgcattatgccacttcaagttggcgccatttaaaatctttcttatctggcaactggaatttggtgaacaatggcaacttcgaggagttatttgaaaggagcctaaactttagtgtttcagttagttcctttcttcattctttattttattttatgttctcccgtatttttcttataaacttatttattctttttgcaaacatcttttctatctcatgtggcacaacactggggtcttcagaaaatccaacaattggaatctaatcttcgcaaatccattgaacaacgagagggtcttacgaagcagtggacaatgcccagaaggagaacatctacctgcaaaaagatgccgaggaactaaagaggaacgaccaggctgggctcgagagtgctcaaaagga

SEQ ID NO: 183426 - DNA, 457 bp, Cannabis indica
tttaaagtttattgcataatatttgttagcattattatgatattgttttatcattttattaagtattaatagtgttcgacactatacgcaaattttttataataattattaaattaaaatatatataatctaatacttaattatattaataataatcctatgtaacacatgcataataatgttggacactctttaatatttatttttggctaattaggattccccccttccctccccgaattttgacatgtacaaaatcatgccctttgaacttttttggtcgttaaaaatttctcctgaactattgagattgttagatttaaggacttttgcctaatttcaatcaattttgctgtttcaataattgtttatgtactaaaccatgctccccaaactttgaaatctaccaaatcatgccactcgaactttgatatgtactaaatcatgcctgaacttt

SEQ ID NO: 183427 - DNA, 922 bp, Cannabis indica
aaaaataccaatacacaaaagaaccaatacgaccttaaaatctaaacacataaatataataaatgaaatcaaatatctaatctgattttgcctaaatttagaagattagagcccaaggaaataatataattctggcaagttcctggttaaaactttagagacaacaatatagctgaaaaagtacacttagaaaggatcccaaaaatataattttatgacagactcactaaaatgtggcagctgcaggaattgtgcaattagaatgacaacatctaaacagtaaataaaattcaatgaacattgatgaataaccatacctaacaaaaaaggctgacaagaaatgatatataaatatatgatggagagttacaataaacaatcttaaagaaaatatggatttaataagtgactttgtagaaactgttttagaattaatcaagtagttacatttatgaagggcaagattaaaagcatgctagaacttatgaattagtaataagatactgttgaaaggcttaagtatacatatagaagaaaaagagctatggcaaatgccaattaattaaaggcaaaaaagacttcactcaatagataagataagatatcagaaagaagaatgcataacattatagagatcaccttcattagctcttcaagaagggaatgatgctctttgttgttgagtacgaagagaaagagagagtgaggtgtagacgacggtggagctttggccggaactccttttggggttggcggctagggttgagccgaacggaggaggagaagtatctaactagactttctttttgttatctatatttatatatatgggtgcactctgagaattacttataaacgagtaaaatagaaaaaattgagtttttatgcttaattttctattgaatttttttttttagcaata

SEQ ID NO: 183428 - DNA, 522 bp, Cannabis indica
gtactttcggtggctatatatatgtatcatcaattgattatgatcatgaagttccttgtgactgtcaatattgacaatcgtgaactaaaaatcgaaaagaaaactagaaagtgggaaagagaaagtgcgagattttccgaatcatcattctacctttccaattatgcgtgcttgtctacaccaacattccatgtggttccatgtatgtcatcccatattctaaagttttaatacacccacaattatacgagaatatgtatagagtatatatgatggaaaattacttcatatatttatatttatttttttttaaattaatagtttagatttttaaagtaattgcaccgctataattgcaatataggtttctatacgattttttgttacaatttaagttacagcgctagttgcaatagaattttttttatgtagaatttcgtaaaaatacaaaaaaaaactgttttaaaatgtaaaaataaaaaagatcctattatttaacacgagaatatatatatatatata

SEQ ID NO: 183429 - DNA, 550 bp, Cannabis indica
gtataaaaagtcggatggacgagatcacaaggcacattaatgatgtactaaagaatgacccgactcacataaaatttttcaaagaatctccgttcggccactttctcgatatttcttactactataaacattttagccaagtgatatggctattacttgcgtgaaatcgaagaaaaacttatttaatctaagctattacaactctaacctagttccgaaaatggtgaggtgttcggtaaaaaaaataacataaagtgttttaaacggtaaaaatgacaataacaaatatttttagtgatatttggggatattattaagggttcagaatccacttagtgtatataaaaatatttatgtttatattaattctcatagtctaatcagtaatctaactaattattttcttgtaaaaatagattttccttcactttaaaattataacttctaagcattaaatgtgaaacaatttaatgtaaatagaaaaaaatcaaaaaatatatttttttagttaaaatgtagaaccacacattaataatttctaaaatataaa

SEQ ID NO: 183430 - DNA, 798 bp, Cannabis indica
ctggtctactacaatttcagatctagctctcctctgccacctaccaaatcaggtaattaactctaaatccggtttatatatatatgtatgattctgtggtgtaaatttatttatatgtaagtttatatttgatgggtatatgccaaatagtttattgggcttcgaaaaagtgttcaatttgtaaagttgggttagaagaaagtaaatcagacacaagtttgcaatgttgaaattctttataataaattggggatcatgtcttttgtatttatgatattgattttaattctaagcttcatgatgatgatgatgctgaatccaacataacatattctaattctaaaccttctttgaaaaccagatcttcatcatcaatggcttccaacctatataccaatggagatttggcatctgtgcctaatcttgagaaaaatctccacctgctttctcctcaccaagttgagattgccaagacattgttggagttgggacagagtcatttgttcgagcattgggctgaaccaggggttgatgacgatgaaaaaagagctttatttgatcaggttactctgctcaatgaaaactaccctggtggtttggaatcatacattaaaactgctagagaactcttagcagattcaaaagctgggaaaaacccatttgatggattcacaccttcagttccagaaggtgatatcttgacttttggtgatgataacttcatcaaatttgaggaaatgggtattagagaagttgggagagctgcatttgtccttgtagctggtggacttggggaac

SEQ ID NO: 183431 - DNA, 590 bp, Cannabis indica
cttttattcgtacccaatttcacacgaaagatttaggggagctcaagtatttcttgggtattgaagttactcggagtaaacaaggtatttttctgtctcaaagaaagtatgtacttgatttgttaactgagacaggaaaattgggagcaaaaccttgtaatgctccaatgaatccagctgtgcatcttacacgtgatgggaaaccatttgaagatcctgagaaatatcgcagattagttggaaagttgaattatctaactgtgactcgtccagatattgcattcccggttagtgtcattagtcagttcatgtcttctccaacaattcatcattgggcagcattagagcaaattttatgttacttgaaaggagcaccaggacgaggtataatttacaaggatcatggacatacccagattgagtgtttctctgatgcagattgggcaggctccaaggtagatagacgatccacttcaggatattgtgtatttgttgggggcaatctggtctcttggaagagtaagaaacaaaatgttgtatctagatccagtgctgaatcagaatatagagctatggcacagtctgtgtgt

SEQ ID NO: 183432 - DNA, 659 bp, Cannabis indica
atgtctagaggtactaaacaccactctcatatctaataattaacaatgctcatattatataatatattgtagtacggctttgctgtgggcacaagtaatcactaattcatgaaaatgatggaataagcatggtatggacaatgacaaatccaattatccaaataactaatggtacaaacagatcttgattaattaagcaataagcatttggccccaataattacacttatatattaatctcctccaacgtacacttatatattaatcacctccattatgaacaaatccaatttagtcactgctcattatattatatcttcatcaaacatgaaaatttatctttgtaaaattgggatagccgatctgcgctgttgatcattatgtggaattattgcaaaaatctatgcataattggattttgtattattctaaagctgttcatttttattaatttatataatagtttaggtactagtctatatatgaatccattagtagcagtctagtagatatgtaaaggcagcaaagcatatcaaaacgtctttttcatatacagtcatttagcaacatgaagcatattaaataaaatctaaaaaaaactttgtagggagctccattaattcttccaatatatatattggaacacttcttaatgggta

SEQ ID NO: 183433 - DNA, 680 bp, Cannabis indica
aatttatgattcttttttgcaaactccaatcactgtcaatatagtgtgcagtgagacacatgtaagacatttgagtagaggatgtccaacaatctgtggttaaacatactctttgtccatccttagttagctccatctttagtttcattctttcctcacaaaacattttgtgtatgtccctagtaaccgtaaatctactagggagttgaaacttaggttgcaactcttgaataagttccttaaagccttcaccatctacaacactaaaggcttgctcatccttcaccacaaacttagctaaagctttccgacatctctccttgttgaaagtgaccgccaacaaatttgacccactactaccatcaccaccactttgaaagctaagtattttttgtttcttatccgagaccctatgtggatacttcttacattggttgttcaaatgagtccacaaactagttgtaccaactctcctactatcacaagcataattttttccacaatagttacaagtgcatctagggtcttttggatttccatttgggactttagtgaagtgatcccaaacggtagaagttctagaaggctttttcttatttgagagttgttcatcattgtcttcctttttaggtgacttaagttcaataggagtggtagtatttggggtaggattttgggtg

SEQ ID NO: 183434 - DNA, 505 bp, Cannabis indica
ataaataaaatatattttacgtgtttgagtgtaattttgcataaaaaagtatataaaaaagtagtattttatatgattcaaatttgtcatagtatttattatgtgtcaaatttacatcattttttaacacaatcttgaactacattttttgttaagtgctcttgcaacttgcaagtaatttagagcatgttttgtattgttttctgttttttgttttcaaaaaattatttttagaaatgagaacaaaaaatagtttttgaagtttttaaaaacaagtcatgtttggttagtgttttttaaaaacaacattgatcaaaagtgaattgatttttaaaacagaaaacaacattttgttgttttcaaaattcttgtttttgtaattttattttctgaaactgttttcaaaaaacaaggccaaacaagccaaattgttttcaaaaaaaatttctatttaaaaataaaaacagttttagttataatgcaacatgcatttaatcgttccttt

SEQ ID NO: 183435 - DNA, 651 bp, Cannabis indica
actcaagaaacttgatgtggtgattcattgaccatccatataaagttaagattatttttattaaatttttaataaaattaaagctgaattacgttttatagggagagatgatgatcaagagaaaactaaatagagagatatagaaaagacaatgagctaaggaacctatacggtatatttctattattcacacttataaaattatagtggatatatgatatgtccactgagagggaaaagaatcaataatatatcaactatgttttcataatgaaatagttcatgattccctttctttggtgtctctgtcttatatgattgtgattagtacataaaataatagcaagcagaacggcacctcgcaggaaaatatagaaatacattaatatatacaacaaaaatgggccattaaaaattacaaaatactactcattgtatcaaggacaaacatcccaaaaatacattttattcagaagatttatcgtaagaaatcaaagacagttcgcaatcaatgtgaaaatcaatacaaatacaacccaagtccaaaccttaaactccaaacctaattgctgtctaacataaattatatcgctgccttgttccaactgtaacaaagtctcatttgctttttgtttttgatagtactgatct

SEQ ID NO: 183436 - DNA, 799 bp, Cannabis indica
atagtaatgctcgtctttcacggccatgtttaatgcaaccaaattgattagattctatgttattatctactactctctctcctttgacattctttgcaaattaatatatatatttttttttgaaaagcaatcgatgatcttcttataaatcgtttaatatttttatacttgtttcatgtgcagcatgataccctaaatattcacttcaagcatatatatcattaattttgaatcattttatcacaaagagttattttttttcggatctcaaatttcttttgcattatgcatatcaaatctcacgcgataagtttttttcttacacattgaataggtatcaaacaagtacccgtaaagagtatgagcatgacttaccatgacaaaattatggggtctatttcaaaaccaagggcacaaataaactatcaaaaaaaaagaacaaataacctatctcttaaaaataggtacgtttaatatttatatgtttcttccatgcatatggggcactatacttaaggttggaagatccaatctaattcaatatttttttctaattcgattcagtctaattactaattagattggagtgatttttttacttaaaatgtttcttacacacttaatttttaataaatataaagaaaaatacataaaaactaaatatcaccctaaaacaataacattgctaagtaataaaattgagcaaaacatcataaaaataaatatgcaaaataatcaaaatgttacaaaattcaacaaaaaaaaaaacaaaaactaactaataatataaataatatat

SEQ ID NO: 183437 - DNA, 670 bp, Cannabis indica
tatgttgtaatatacttttttctaaaatgtaatatacttttctaaattccactcttattaatatttttttaaaaaaaattatcttgaatacattaattatttctttatttcttaaaagaggggattcgggaatgctctccaaacggtgttgaaaggtttcccatcacacgtaggactcaccaacttgaccttttgctgttcactcattcgtttttttttttttttttctagtctcgtttggttgtgagttgatgaacatgacaatatcgcaaatacatctccatcatcattattttctagactcattaagtaggttaaagaaaatatgaaccctggtgttataccaaaaattaaataaattagaacgaattaccgaataaaatttatggctaagtcacaaactatgttgcttttttaaagatgtttcgtgactctatcgaaagtgtacataacaatttatcaactatggcgttcctagaataaaacaatcaccatatacgaatcgtaaggaatatgagatttttttctcatgttgttctaatacgacttatatagataagtcgatcaaaaataaaacggtaagaaaacagtaaataagatcgtgggagacattggtttcatagtaaaaaaaaaaaacaaagatcattcactgatcgcttttattattttc

SEQ ID NO: 183438 - DNA, 554 bp, Cannabis indica
tgaaaagattaagctgattatttatctaagtaaaagatattgtgaattgagtggaaaaccttaatttggtattcatcagtgttgttgcattacatgagaacaatgtttctgcaatttccccaaatacagttgctgtaagccaggctgatgaatcagtaagttcaacatctattctgcatctgcaagacataagtgttagtaaaaatataatttaaaaaggaaaaaaacttaagaaaatgagtaagttatttaattacctagggactgctttgagttcattgtttttgcaatatagacagtgaaaagtttccccatattcagatccagtgattctgttacaaaggggacatgccatataccaaaatggttgggcataatttgtgactttagcaattgctttgacccagaaacttgtttgctgaaatggaagattgcattgtaatattatgtgattgagaaaataataaaagaacaaaatgaaaataataaaaaagaagaagttaaaaggagtttaccatgtttaacatatcatgtatcttccttatatcagtaat

SEQ ID NO: 183439 - DNA, 627 bp, Cannabis indica
atgaatcgcatccataatagcatattaaaaggctatatcaagtcctccttaaaggcacgtcagtcacacacaaagtgaatcaaaaatatatatatatatatatatacaaaatacataaagtcgcgtccagaatttaaacaataagtaaaataaaaagtaataatttatccgaaaattcataataaatagctaaagatactatatgtgaaatattagggcagtcaaactaagatgttacatatctcaggtcgttcagactgagatagtacatatctcggtatggccgagtaaagtccaaaggagaaaactgaaaaagggtgttgtaaaatcctaaatacctgtataaaaaaagggggggggggggacgaaacccttcgagtcaagaaagttagtcagactcagacattatgcaacctacattggttaaaccatttaaattaggccaagtaaggtataacaacatcctcatcacttgagtacactatcaccattttttaggcaataaactattcttaaaggagtttcttataaaatacttttataagaaactggaggagtagtgtttggaggaaatttcagtgggtcaacaagatgcccatggtgttagaaacataagaaaggcccaat

SEQ ID NO: 183440 - DNA, 761 bp, Cannabis indica
atactcaagaaaatatgcataaagcaacatccaaatatgttccattatagaaagcctccctgaaaaccttaagggggcaatttttagaaagatccaagaaagaggtgtgagtatcatggagaagtgtgacactcaccaatgactgtaagcacttgaaggatgaaattgagacgctagtcagagcaggccatctgggacaatgggtcaaaattccaatcatatatcccaattaaggggttattcacagatagctacttattcctggataagatactaccatcaatcattcgtaggggtaggccaccctcaagtgtcaggaatgtaacttttgacactccctgctctaccagctcaagtcgtggtaatttttgtggctcaaggatatcgaaacccatatggaccatctgcatcggtgaaaagcccccccccccccgacaaacccactttctctaggtatggagcgacacataccagatgcagttccacacttggatatttaaaagacaaaaatactaaagaataatttgagccagtctcaaaacaatgagaggaggaaagtgttcgggacagagtcaaagttccaaagaagccaagaaagagtatgaaccaaggtatactgagtactccagtttggtggatacttgagaaaatgtgcataaagcaacatgcaatatgttccattgtagaaagcctccacgaaaacctcaagggggaaattactagaaagatccaagaaagagatgtgagtatcatggagaagt

SEQ ID NO: 183441 - DNA, 592 bp, Cannabis indica
tgttcttacttcttagacttttagtttgaacacattaaaaacctaaagagacactttatatgttcttaattgtttttgattatttttttttttcataataccatcggtcaatctcttttgtttagcatccgtaatttccttttttctttttgataatgagcttccgtttttttttaaagcctaatatgagaaagctaaaagttacacatagtgtctagtaaccttttatgtgtcaatattgttatgggtctcgggtttcatataatttaatgtaataatttttaaagaatatcgctagccaatcacaaacgacatattaaagagtgctaagtaccactagtacccaataacaatgcttgcctaatttccatttctttcaaatttcaatttatattaccatcatttcatttgagttgcttatttctacaaaaataaataattataaaaataaaaaaggcctataaatagcgattaattattaaaaaattggaccaagtctacttaatttaaaacacgcaatgccttgtgtcttattaattttaaatattatatattagctaagtttagaaatcacaaaatcccttacccttct

SEQ ID NO: 183442 - DNA, 554 bp, Cannabis indica
tttatgggatagattcgcactaacaagaaataaaagaaaacttaccatttttttttatttgtttaaagaaagtaatcaagttttctattttaatttttattagtttttggaaacatacctgatgtaattttcttttataaatagtgaagtagttattccactacttagagatccaaaattaatttttcaagagagcacttaattaagctgctaaaaccattataagagttttcaataaagatcaagaatttcttgtttcttttcttacaacacaaataaaagaggagtagactattactactatcacgaggttgaaccttataataataacttttgtgttctatttgcttaatcattattatcaatcgtttctaatcgctttaatttgattcattgccgttaactaaaaataagatcaacaatattattaattaagaagtgaaggccacttatataacattttctattatatcactacaagaaactagttattttagttctagcgcagttcgctactgtgctggtatagttacctagcggagtctcgcaaactg

SEQ ID NO: 183443 - DNA, 475 bp, Cannabis indica
aatttaatttttattaaattatgccccaaaattttgaatttaacttttattaaattatgccccaaaattttgatatatattaaaggataatttagattttcctccacttaattttaatatgtactaaattatgtcctttgaatttttcaagtttttaaaaaaaatttctattgaaattgttaaatttaaaaatttttgttcaatattaaagaaagtttgaaattgattatctaaatcttttttagtgttatttatattgagtatatcattattattatttttgtttcaaagaaagttaaaagaaaaaaaaaaagaaaaaaataaataaaatgtatgtgaattaaatcatatatatgataatttatatataaaaaaaatgatatatgataattgaaataaaaaaaaaaatacatataataattaacatttaataatatttatattatataaataagcagattttttcgtacgctat

SEQ ID NO: 183444 - DNA, 651 bp, Cannabis indica
atttttctaatggatcaccttaaagggttgttttagtagacgctttatctgtttcggcattttaaaaaaaattagtctatttttttatgactgcgtacatacgttgtaattatttaagactatttataaatttttaaaaaattccgaataatttacagtgccgaaaaatagtttaaacagttacaattaccacatgtatatatgaaaaacttatttttattttttagtattgtaaattatttcaaattgtctaaaaatttatagatagtcttaaataagtataacatacataataataaaaaaaattaaactaaaaaaactctcctaaataccaaaacaaatagagaatttatctaaatatttcttaaaaaaaatgtactatacacttacccattaatatatattcaatgattaaatggggcaaaatctcacatggcagcaggtgaaattaaagcaaacatatatctcacaaaaaaattattaaacaaagaataaagcatgccaacttgatttcgatattgaaacacataaatatttgtcatgaatcgacaagacaaattgatacatcaaatttgtacagccattttggttttcgtgtagagtggaataaacacctctttcatcattattaatttcccatgcttatttatt

SEQ ID NO: 183445 - DNA, 497 bp, Cannabis indica
ttaaattataaaatattaagataattaaattaatactacctaaagtagagagcatgattggaataaatttttttaaaaaaaaaaaaaaaaaattagctctttattttataaattttttagctatattagttaaaatttagctgaaaattaatagaaagtataggtagttgaagatactcttagaatctttctctaattttttacatttaactattataaaccaagagtgctctaaaattgctttaaaaattattataaaatcgacttatatattcattactaataaattgctaaatataaaatgtatttataaaatgtaaataaaataaaatgtaaaatgtatttatataaatatatatatgtgtatatatgcttaaatatatagtacttgaatttttgtcatcatttgagatgagctcgatccaccattacaatatttatagagagagagaaaaaaaaaagacatatatggagatgagatatatatatatataggt

SEQ ID NO: 183446 - DNA, 678 bp, Cannabis indica
caataaattttatactattataacaaactttttaactacctatatatagagttaatattagaaatgcaacaacaaattttttacatctattctcatttggtcttttagtctcttatattttactatttttttattttttagttgcctatatatagttgacccaaaataaaaaatgtgtagacattataagctacatatgactataaaaaagaagagagatatgataaaataaagtttttaaagtaggcaataattctctttaaaatttttaattagaaaaaaaaaagcaaaaaagaaaaaaattgtaattagctaaatgagttaggtggagattaatggggcaactatttttgttgaccccgttagagatgccttaatgggatctcatcatcatgaaaacttaaatttatgggattatttcataaatatctaaaaggctaaaactaacaaaaattttatacacttataaaaaaaaacaaaaattttatacttttaatggatctatctttttctaatatatattttcacgaattttaactttctctttttacaaaaatacaaattattatttttcagttttcttcacattgtcattacgaaaaacaacatgataacgttttttcaaaaaaaaaaaaacaaaaaatctatgaaaagaaaccgtaagaatataaaagaaaa

SEQ ID NO: 183447 - DNA, 733 bp, Cannabis indica
ccatatgtaggaagacacttttttccatttttgcccattactcaactgacaaaagaattttaaaaatctttcttgagcaataaaggtccctatgcaattatgaacacagcccgctccacaaaagaggataatcgaacaaaagacaattgaaccttgacggcaatggtgaagaagatacaaaaatgaaaattttatggccctctaatacgagtagataatatgacttttagtaacacggagatagataaataagaatcaaacattgaacagcattaacagacagcatacttttcataaagaatgcttaaatacttcatgtcagacaatgtttatgagaatagaagtagaaaacagtgaaatcaaaaaaaaaaaaatcagcaaaacaattaaaagattttgaaaaacagaagggtactgaggcattttccctattcttgtatgcctccaggtgtacgcctcaacaataagaaggaaaacttcataaaatatcatagaactcataaaattcataacaaacagcacataattccataacaaagtaataaaactcatgaaaagtactacttcagtcttaaaatcataactaaattcataaagattcaaatttcaaacaaaaaaaggtaaaaatttctaaaacataaagaagacaatgtatgacgtgaggttaaatgagcattgaggaaaaagagggacttagctatgaaggagagatgagagatgacgaatgagaggc

SEQ ID NO: 183448 - DNA, 509 bp, Cannabis indica
ggtgatagcccttaagcaagagtaatgtctcaatacaatcaaattaccaactcccactatgtttaacctttttgacaaaaataaaccctttattaaacttcggtcatgtcacatccattaaattacataaatattactaatctttttcattcgattgacaaatgtactctaaagtcacattgtttgaaagaagcaatatttgtatataggattccctaacttatatttatatatatgtataggaattttgttaccattcttgccttcaaagaatcggtctgacttatttgagctccatcaactcccatattatggggtagtacaaaaaaatgaagaaggtaaaaaatgagaaaattaaacataaaattcaaaaaaaaaaaaaaaaaaaaaacggaaaaaagaaaagaaacaaaaataagagtacatacatttagttagaattaaatacacaaatagtagaggttataagttttaactcttctatggctagaagtggagagagtagcgga

SEQ ID NO: 183449 - DNA, 632 bp, Cannabis indica
cccaaagttaataaattgctggtggcttggatcgttctttgtagagctagctaataaggtggaagtcctatacccgtaagaaattatttacttttaccaagcaaagtcaaatcctatgtaaaataataagagaaaaattggtttctatcagcttgagaatgatcgagaaaaattgggttgcactatccgtcttatcttaattattcattgagaatgattgactacgagcagttgaagtctgttcttgttgtggggttgtgtacaggacatattagaaatactgaacttgcccattttaatcataaatggctataggatctcgaaacctttcatgaggttggttgggtgtttctacatgaggacggaagttctggctattttttccaaggtgtctccctagtaatatatggccatctaccgtggggcccacatttatatgtggcctaggaattgacggtccgggttgcagggggttttgggtgtaagtcgttgggggaacatccgcccatgctaattcccaagcagaacatgcatattttttccttctgttaggatccctaacgagggggagtatcctcttgcaattgatatctggttcattgattaaactgtcttatcaactatgtgatttt

SEQ ID NO: 183450 - DNA, 521 bp, Cannabis indica
gtggatgtaatattttttttttattattttgtataagataattaaaataaaataaaactatatattttttttttgtaaggaattataagaattaatttgactaaatatgaataaatattagttattaaaaataagaacaaaatttttaaatcaacctaatttaatgaaattacattttaatattaaaacaaatttatattattgtgtataaatacttaataataattattataaaaacaacattttatatttaactaaaattgtatttatttaaaaatagttttgttaaacataaccatttaaaaaaacttgtaatgatttttctgtttcacttaaattgaagaaaagaaaatgaaaaagagaagaaaaaaaaaagagtttatatttttagaaaaattagagctggtttgtaattatattttacaatatataggtaaaacttacaagtttagaaaaaagaaaaaaggaaaaaaaaagggaataaaaattaaaaacaaaagaaagaagtattatgtaatatt

SEQ ID NO: 183451 - DNA, 544 bp, Cannabis indica
aaaatattttcaaaaaatttaattagttaatatttatccaactatccgaacctataattatgtttctcaaaaaaaaaaaaaaaaaccctacaattatatctttcgaaagaaaaaaaaaacatataattatgaaaataaacttttaaattcatgtatatgcataagtaaacctaattaaatatctaagcctgcttttaaggaaataaataaataaatatctaagcctatttcttcgaaacttttaaattcaaacaatcaaaattagggctaaatttttgtagggaccggattttgtcccgttactgtacggacacggattgcaatccgtgatgtactgtaaccgtcggatgggcagttactttgatccaaaggttggggttcatgtaggggttgatgtaggggtatgtagggttaaataaatggataccggctacttttttgaaatttaaatttattaaaaaatggaaaagtgaacagttacatccatcaatcaagtcctatcaacctatcaaccgtcgtccctctccactataccatttcattg

SEQ ID NO: 183452 - DNA, 530 bp, Cannabis indica
ggtacctcaatcatagattggaagactgtgaaggatcacacacaaagagaaggacattcgggctcagatcttgataatactccgcgacagaaaggatacaagggctagagatctcagtggaaggagacattattccgctgcaaccaatgtaaggttttcttaactttatgtgtttatttatcgttttagaaagttcatatttagggtgttaaacaacatacttgtgagtagatctaagatcctggtaaaataaattccaacatacctaacaatagaaatgaagctagtaagctaatttgaaaagctctcggtatctgatcttagatgggtaatctatgggcgtaggttttccttacctcttttgagatgtgttaacaagatgaagcctcacgacttctctttgaaatccatacatgatttatgggaatcattctggggcaaagtttatccaaaatatctcaagcaaggatactttggctgaccatgatgaagactctcattcctatgtaaaaaatgtgacaatactatag

SEQ ID NO: 183453 - DNA, 372 bp, Cannabis indica
tatgtaactacgtacagtttctttttcccattcaattattattttctttttaagagtttttgtcttaattttgtttttttttttttttttttaaggctagcaaaatcccacaccgatcgaaacagttattgaaaatttgcatcttctgctattttgtttttgtttttgtttttttttttttaattttttttaacggttttatttaattaattcacgaggcataaagttgcactatatgtttaattatttgaaactagctaaaattgtatttaattattattaaacttacaaatattttaactctaatatatatagtgaatgcgtgcagaagggaaacttatataatagttaggataattggagggagttttt

SEQ ID NO: 183454 - DNA, 458 bp, Cannabis indica
ataattattatttggtaagctatctatatttctttgttttttattattcttttttttctatatgtccagttatatgcctcgctacccctattctttataattttattattaccagctcgagttaagtatccatagtaagtgtgtagcattattattttttaaatatatttcaagttaatctacattctcctcttctcttactgcaaattttaaatttaatctttcactactgatttccaaataaccccacacactaattaaaattagtttttaaactattttaaattatatgattatttattgaatctttctcaattaaattataaagcacctaacataaaactaagtatacgtgccttgcacgtaactttcttctagtatgtatataaatatctaaatatatgttaaagaaagaacatatatataaatatttctaataggaaagcaaataagtaaaa

SEQ ID NO: 183455 - DNA, 652 bp, Cannabis indica
actaatattgagctttgaaaagtcaataatttaagaatacgtggacccattttcctcacatcacccacactagcatctttcgatggagaaaccctaatatagaggacgcctaagaggcttcaaattggtagctcgagttgtcaccattgaagattgaagaagaatcaatttagaaatttttggaatttgtttttgcatgtttgacatcataactaaaaaactattttttgtttttaaaaacagtaaaattattttttgaaaactaatttaacttgtttgggctttttttttaaaaatagttttcagaaaacaaaataacaaaaaataagaattttaaaaacaatgttgttttactgttttaagaaccaatttacttttagtcaatattgttttaaaaacactaaccaaacctgacttgttatacaaacttcaaaactatttttgtcttcatttctaaaaataattttttgaaaataaaaacagaaagcaatgccaaatatgctctaagtctttttatataacaaaattggtgtcaagaataccaacctaaaaatgttaatatagttctctcttgtattagtactcttgaattaatataaatgtcaatttttctagtcaaaaatattatataggaaaacacttcttaatatgt

SEQ ID NO: 183456 - DNA, 1008 bp, Cannabis indica
gatgatgactttgactctctcttttcggagttggtttcggaggaggaaaaccttaacatctgtagaatgctgactgctgaagaaattaagcaggtggtttttgctcttcatcctttgaaatcgccggggcccgatggtttctcgggtcattttctataggaaatactggagaatagtgggggtcaaggtctgcgagatggtccaaggttttttttgaagaaggatcggattgtaacaaaaacgtaaatcatactttcttatggccttattcccaaggttacttctgcgtccaggtttgatcaattccgtccgataagtctttgcaatttctgttataaaatttatatcccgtattttagacggatcggttgaaagcggttattgatagacttgtctcccctttccaatccgccttttattccgggtagatggatagcggaatgttcaatcatggcgcaagaagttcttcatagtttcaaaagaaagaagggtaagaatggggtgatggctgtgaaaaacgagacatgagtaaagcgtacgatcggttagaatggaacttctttcttcgtgttttgaaagctaatggttttagtgaaaaagtgtgcaagattattatgagctgtgtaacttcggtttcgtactcgatgctccttaatggggctccgttggctcccttcaatcctaagtgttggcttgcgtcaaggagatcctttagtcgccgttttttgttcattagtgtgcagtgaggtcctctcgaaattaattccttagagcggaggccaatggagatttgagtggtgtcaagattctcgagggtaagctatgcctatttcacatcttttctatgcggtatgatgcaattttcttctgtcaggcggttgggaaagaatgcggcaacccttatggaatgtatttctcggtatgaacgttggccggggcaaaaggtcaataagcagaagagtggagtctctttctcgcctaacactcctttgaggtgtagggaagaag

SEQ ID NO: 183457 - DNA, 981 bp, Cannabis indica
ataattatgtgtaatttctcaaaaaaataattaatgtgtaaaaaagaaaaagtgagctaaaatgatgataatgcttgagctaattgcaagataatattacacatggcagccatgcagacttgtacagcctctcctataggctataaaattaattaaagctataataaaaaaggttaagatgatgatgaactaatttatgatgatgcatattttgtcatcatttgtttttattttgatgtgctaagaattatatatattatatatatatatatatgtatatatatatatctaaatgacttcctcgcctcctgagtttctttattgttccaattatttctaactttatttttttaaatcaaatgatttaagagagaacaagcaattaaattcccacattctcgctccgtttttggcagctctcttttcctagaattttattgaaataataataataatactaaattgttaatttaatctctttgtaactctcagaagtacaataaatcatccttattcatccatgcatgggattctgacggcgcacattctcccaaaattatattttttttactttaccacagtttatattaatttatctacctatataatatagcataatagatatatacatatatatggtatattgaagagactctttttcttcctcaaatatataagtactacatataattgttcatcatccaatttaccttcacttggtctaatatataaagagagtgctagagagtgctctaatatataatggggagtgtctactggtctaactatgaaatgctttccattgacgaaaatccatttccattttcaacggaatacctctactcttctgatgatcttcatatttattcgggtatgtactgttattattattgttactgtgcttaaaataaataaataattaattttatactgattagcttgtaaactttttggttgtaactatatgtatagtttaaaatt

SEQ ID NO: 183458 - DNA, 579 bp, Cannabis indica
atataattaatatttgatggaatacatttaattatttcacatttctcctcacaaaaaaaaagtttttaagttcgtattccttctcctaagtcaaaaaatataaaaataattgacggaataatttaattacaaataattaaattaataatttttgccaatttcaaaaaaaagaaaaaaaaaattaacaatttttgtcgaccaaacaaaattggattgataaactatactcaattattgtgaaccgaaggaaatttataattgagtgggcatgcatatatatatgtatattaattaataaacatgtgtgaattagaaaaacatgcatgaatgtgcacattataataatattggacattaagatttggttcaaagaatacatatgtttttaattttatatcacctgatacaaacatatatattaattcatgtgatctgtctgtctatacataaattatgtctcttccaccttaaagtagtttttctaaaataaataaataaaaagtgtgataggaaccttctaactacactcctttcttgcatgtgtatacttttacatttagtacaccataaggaaagaat

SEQ ID NO: 183459 - DNA, 606 bp, Cannabis indica
caacaataatatatcaatcaaaaacaaaaaataccaacaactataaaatcacaaaaccttatttcacaaattatgcaagagaagtaacttaaaacaaagaaaccataaaaggaggagctaggaagttttcctaggattgaaacctcaattattatgttaattaagctcttaattgctgaagaaaccctagcttcttgctggcttctagggtgttcgagagaaagagagagaaaggagaggaaatattgatttttttggtatttttcttaatttgaatgaaatgggatatactaagctttttctaactaaattattaaagaaataatcagattacaacgcacctaaaattccactaaaagacaaaagtaacattgggcaaaaagaccattttgcctttgcacataccaaccagcacacttgtcacttaggggtattttggtcaatttactacctcaaataattcctgacattctcaatgtctaactaagttgtcccgctactacaaaaatattaacatgtaattctattggccaaacgacacgttccaattttactgagctcaaaacatgcaaaaatataaaatttcatacatggcataaataatac

SEQ ID NO: 183460 - DNA, 565 bp, Cannabis indica
tctatcatgatgttcattaaataacgattaccatacaactactacagtattatcatgcagtacttcaccaataagcaaaggggtatcatgggtcttttcaaattccccatagtaaaatttttctatatatgtatattatttatttaaaaaggaaaaaactcataattagaattaaaatttattttattctttaaaataaattaccaagttccttttttattttattttactttacaaattagaataaaattaatgttcccacgaaatggaggcaaaaactctgtttcatggttttaattggttctcaactaagctgccaatcacgcatgtggagacagtgagacagacttttcctagtttctgcatcatctgttagatcttcttcttaagatttaacatgtaaggtggatgaccattatggctactcatagccttgcttagcatggtttagagttgtatagagattatcaatggttggagaatatctcctccttatattttctgttgtttctgttattgtaaatgaatgtgtatttgatttatataatagcataatctttataat

SEQ ID NO: 183461 - DNA, 533 bp, Cannabis indica
ataaagcatacaacagtataagtataaagagaaaaaataatacagtttaaaagtgattattattgtataaacggtaaaaaaaaaaatactgtatgggggtataaattttccttttatcaatactattatctatatttggtaacactcatgttgcattaatttatatatattatttttttaaacaaattagtttataagacaaattttcaagttgtcaaccattaaatgacatgtttaataataattaatggaaatcaatggtaaaggtaaagtaatcattcctttacatttgtttacttacattattaaaattagaaaagggagaacttaattaattaagagaaaaagaaaaggataactttcccaccaattttgtaaggaatgtcattaaagataatagattttaattatttttattttattttttaattattaaatatataatgacaattttattctttaaaatatatcttacaaaataactaccatataatatagtttaattcaaaaggacaatttaagtcaatttaaac

SEQ ID NO: 183462 - DNA, 551 bp, Cannabis indica
ttaaaaaacctttgcttgctggtgttagcattggatttcaccttttaatttttgtttctttcctaaatataaatttagtcattttgcaaaatcccctatttgttgggataatgagacattgttatgtacaacaagcatcttagtgcatttcagttgtgttgattgttaatctttttcatatgacaaaaactgagactttttgtaattcaaaagatgttactaaagcaatttaagctaaaattccatgttttatctgtttcatggctatctcaaaaattgtccaggaaagttttgctgataagtaccttttttcactatatttactagaggtgtttgatactagttttccatacatgtcttccttttggaagctaatcatgattttatgctgtcatgtgtttttgtccacagagcatttttgatacttgtaaaaagtaatgtctgaaccaaatcaagatacatgaagaaaatgactgaaaactagttctactaattataagcatgtcagattagttattatgttatagtttttgaagaacactgaaacgagt

SEQ ID NO: 183463 - DNA, 521 bp, Cannabis indica
cgtaagtctcgacaacgatccacgaacacaaattgccacccttaaagaaatcctgtcttaaagatgatcttactcaaaaaaaaaaaaaacttgggatgacattagaatacctgaagaagacgaaaccagtatggaataatagctacaacaagattgaaagctttatacacatcattgccaagacacttgtgttctctttttgtgaaatcaccccagaagtaatagcagacatagaatactaaacttctgaaggcttgaacctggcttgtaagctgatctgccaagaaaaaatccggaagactaacctacaaacgatacaaaaaagaacttttaatatgaattttctgcttcaagattacactaaatattatctgcttatgtgaagattttagtcccattattaccttgtagagtggagcaaagagacaatgaaaaccagatacaataggaaatagcgagtagaccggtataatatgttgaaaggcaagactaacatcacaagcagagcctgcaaagatttc

SEQ ID NO: 183464 - DNA, 598 bp, Cannabis indica
tggaaaccatatcgagctactatatgaaatattttgtaagtaagcgcctctagttttttgggaggcccgaatgttatgaaggtcgagtagtggctcacggtgattgaaagaatcttgaatttcatgggagttgtcaagaatgatcgagtaacttgtgccacttttcagttttaggaggatacgctcgtgtggttggagttagtgtctgtcgcctgaggcatcactatcatgatctgggaagaattttgggatctgtttaatgccatgtattataatgaggtggtctgtagtgtaaagcggaaagaatttactaatctggttcagagtaatggtatgtcagtaatggagtacacaatgaagttaaatcgtctagccaagttggctttgggtatagtgcccacaaacttcagtaagaaagagaagtagctggcaggtctaaatgcaaatattagacacgatttggtaattactacgagtgaaacaacaacttatgctaaaatggttgacaaggctctacgagccgaaggtgcagtgacatttcttcaggagtcccaagagactccaagtgtttgtggaaccaccgctcttcatactcctg

SEQ ID NO: 183465 - DNA, 955 bp, Cannabis indica
gagatgttgatttgagatttattataaattctattattgattatgagaatcaaaatatttttaaaatcattattaaattgtttttttttattttatattgtttgaacttatctagtacaatcaggcatagtgaatatgagtgtgacctcacttaacttttcttttttgacattttaacgaaatttcatttatcaccacacaaatatatttttatacaatgtacaaaacagtacaaatatctagaaaaaaaaaaaaaataaaaaaataaaaaaaaacatcaaatttcgtacaaaatttggatcaaattaatatgtaaaatctctttatctagtcatactccaatcaaccttagttttcacacgttcgcacgtgcaatgctagaactttccattttaatttaaattaatttattttttgaccttaattattactatcattaatggaacaaagggaaataatatgaactcaaattaagaaggtaagagtcaacgaattttatttatttaatttttttttttttgaagaaaaattgataagtgcattgttgaactaattaaatttataacatttattatctttgtacaacattgaaatctttatagtacacgaaaaaatgacagttaatttttttttaaatttttagttatttggataagcttaaagtgaaaaaaaacattaattattcaattacttagagacttcttttgatttttttttttaaaaaaaataataatttactgactaaaacactttttagttaattaaagttacttacacgagcgtggcgcgttgattttaatatttatttaatgaaaataaataatgtgtgacatgtcacctaatattgtatttgaaacgaaagacttaattacttttctttttatttttctatggaaaaaaagtttaatttattatatcacataacctatgttataatcttaaaataaaaaaaaaa

SEQ ID NO: 183466 - DNA, 690 bp, Cannabis indica
ttagcatgagataataactaatttaagcttcactaaggacaagaaaaattcaacttgacttttttctttttttgacaataaagatgtacatctagagcctcagtaaagtatcccattacataaatgtatggccaagtcacctcataatagcatatataccagcctggtagctaaggtgagatataatgtttttatctttgtcttgaaagagatataaggtcagaaaccaacctatagactttggccacggtttttgaatatctgataagtttaatgatcagaagaagaattgttatgaaacttgaatcaatgtatatcatatattttttcagaacttgtgagtctttctttttttcttttgaaaaagagacagctgaaatgtctaggactgactgcctcccaagtttattgagaatcaacacttatggtggagtggaggaaaaccatggtaacataaaatccagggagaacctgctattaacgaaacaaaacctctactgactcagaactaagcttagtctcctaattacacacaaccagaaaaaaccatatgaaacctagtaaccgtcagtcttcctaccatccttctaaacttctgtttccttcaggtaatgaggatttataggtttatgcactaaaggatcgagattcacatttatatcgagaagacactctcactactgatatatt

SEQ ID NO: 183467 - DNA, 680 bp, Cannabis indica
tatatttgttcttatatgaaaactgagaaaattagtaactctgtaatatataatgtggtgtagcttgaactgaaattattaaattcaaaactgtagattgctttgcatcgccaattggataaaattacaaaccataagcgcaccttaaaaaatttcaagccacgatttttatacaaagtggtatgcaagcagtggcggagctagcctaacattttagtgggggcaaaaaaaatttttgaagcaataatgaaaaatataatttttattaaaaaaaatacaaattctatgagaataaatataaatatatgtgagaataaaactgaaaaatataaattttatgaggataaatataaaaatatgtaatgacaaagatgaaaaaaatttatttttatacggtcaaaatataaaaatgctcaaaattttatatacaaaatttacataaataaaaaattaagagggggacatgtaaagaccacctatgaataatactttatattattaattatttaaggtttatgtatcaataattacggaatgcacattttagaaatatattttatatatcatatatatttttatgctgttttatatttaattacctaatttctgtgattgtgttcggaagctgtggaagcgacgttggggcctttagagagtcgcattttatatggtttagaata

SEQ ID NO: 183468 - DNA, 1045 bp, Cannabis indica
atggcgattgtgaccggagatcggtatctggagaagcttgtgaagtttgttgaggaacaagctggtccattgatcgaaggaacaatggttttgaagcttaatccggcgggtcttcactatgttcagtctcgtctcgaggctttgtacgagcttgagagtcttttggctggtgctccggttgattatcttcgtgcttatgtctctgaccttggcgatcaccgtgcgcttgagcagcttcgtaggattcttagacttcttacttcgcttaaggttgtttctgttctttcgcctccgactagggacccgactccgctttcgcttttgccgtttgggaggttgagggttttggagcttaggggatgtgatttgtccacttcggctgctaagggacttcttgagttgagacatactttggagaagatcgtttgtcataattctactgtgagtttttttgatttttgttgttttggtgatttgttgttgcttgtttggttgatgagaaaatgtgggaaaggaaaaaaaaattgttgtatgaattgaatgcaagaaatgttttttttttaattattctttaatgatcatacgttgttagaaatctgtcattcgaaagttaagcatttattattctactgtgagttttacttttttgttttggtgattgattactgtctttttggttgctgagaaaatgtgggaaaggaaaagaaaatgttgtatgaattgaattgaatgcgttgttgttgttgttgttttgtcttaatttagataaaatttcatagtttaattattctttaatgataatttgttgttgttggaaatctgtgattcgaaggttaagcatttataattgtactttgagttcttgtttggttgctgagaaaatgtaggaaaggaaaagaaaattgctgtatgtaggaaaggaaaagaataattttaaatattctttaatgatcatatgttgttggaaatctgtgattcgaagattaagcatttataattctactgtcagttttgcttttttgttttggtgattgattactgtctg

SEQ ID NO: 183469 - DNA, 715 bp, Cannabis indica
ggctggcaccattcctgcttggcatagagcacgaacaaagcagccaaatacttgatgcccttgggagtaaactgggtcggacaaatcttataataaatggtgatcttcttaacatatggatacgaaggcaagatcgtgacttgttcgacatgggacccagaccaggcacaaagcccttctccagagttagtagcaagctgccctgtggtaggcaagaaagcctcaaccccaccgaggaaacccttatcatagagattcttcaatctcttgtactcaagcgtggacaaaggagaaacccatcgagaacccttattcgatctagtaaggacgggcctcctcatactcttactcaacgtagacttggcctgcaaccaagacatctcccagcatcattgtatccaccaaagggaagagcctggatctcttcctcttcttctttttctccttaagccttaggacaaccagtagggtagaccttatcttgctcgtcaatttcctagacttcaacatccacgacggtaacttaggtatcctccctaggaggtctagcttagtctgccttggccatcacaaatagctgagcaaaatgaggattagcctctgaagctttcctcaatgtctttttggcttttcccaacactctatgcttaggcggtagtttggattctaaggtaagcctcgcgacagtaacaacaatctcctctaatgtggtatg

SEQ ID NO: 183470 - DNA, 689 bp, Cannabis indica
aatgaacgcactcataataattaactgaaaaaaaaaaattaaataaaatcataattattaatgtcttcaatgtcttttgaaatacattcttaattattctaccaataattattttcattaatactataaatgtacagtttttcatactatcaactatttaaggattgctaaattgtcctccaattgataccaactaaatattttacaaaaatagaaaaaaaaaatcttatttggattgcgtatagtatacttcatggagtactcttttcttagtgacttacacaatgaatcggagagttggatgataagggttagggtatgtcgaatgtgggaatctcttaacactaagaaaaatggagaattgattcacctcaacttgatttttattgatgagcaggtaatttcaatattaatttataaactttttattttttcatccaattacattatacttattgaataatgttattgttataggaaaatctaatccatgccaccatcacaaaaactttagttcctaggtttaagacctattgagtgaaggctccttgtatgtatcaagggtttcaaggttgtcaaaagcacaggggaatatagaccactttccaatgagtataggattatttttttggttggaacttctctcatgaagttagaagaagaaacgattcagattccaattaatggta

SEQ ID NO: 183471 - DNA, 524 bp, Cannabis indica
atatattttagtctaattattttaattaaatcattaatgaaagttactttatttaagttgatctaaaattaattaataaattaattttaaacttaaatctaattttcaaaattgaaaatttttgaaatatctacaattaaaaagaatgcattttgaaatctatgtgggaaataattattaaaataaaataaaatatatattgaaaattattcaaatttaagttgatctgaaattaacaaaattttcgacttaaatataattttccatttgattaaaatattaaaatagaaacaagtaattatgcatcttgaataaaaacaacttaattattaattctaatttaatatctaagaaaaataacttaatttaaagttggtccaaaaattaattaaaaaattaattttcaacttaaatatattttctaatttaattaaatttcatgaaatagaaataaataattaagtatacttgaataaaatcatcttaatattaattttatttaagttataagaaaaatattctaa

SEQ ID NO: 183472 - DNA, 1012 bp, Cannabis indica
ctcaataacaattaattctcaacaatattaattacattacaacataacatgctagtacaatatttaaaattgcaaccaaacaaaagaatagaacaaaaattattttatttccattgcattccattttatttcattaccactaaccaaacgccacttaaatgtctgaacacttgtactcaattattacaaggctgttgcacctttattccaattctcgtaaattaagaacattaactaaacatatatgcataagaagaagagagagtttacagctaagtccaaggcagaaactgatttgatttccccagtctcatcagctttttagatacaaattacatataacagtttcaacagtgactcttccacctccaaataaccacattgactaaagttgggccaaagacatgatatcttaggattgaagaataagatcagagtcaaatgtcaaaaattaccatgtcctgctatatcaggaaacaggtaaaaaaaaaaactaataagaacaactaaaagtactctaaaagaagaagagacaaacaattaatgtccctggtcactctattaattatactaaacaatactatttttttatttagaagagaagaagatcacattttcatgagtgatctcttcccaagtttattgaataacctcgcttatggcggaaaaataccgtggaaacaagtaagacaaagggaagaaagaagaaaactaacaaatcataaacacaacaaaaacaaaagaaataagtgcacaactttttacgggatataaagctaaatgaccttaaaaaaaatattagctagggaacgtttatttttaaaaatttagctacattaacattttcttttaataaaacttttgttaaaaagaaaaacaaagtcctccttcacattgggatccccttcacttcacatatatggttgataactctagaaattagagttattttttacatttttttaaactaaaattggtttagttcttaattttgaattaattagttaagttt

SEQ ID NO: 183473 - DNA, 581 bp, Cannabis indica
atgacctactagtcgttctcgtgtaaggtgaccacaaaaatgactcatcaaacgagaagacgaaatcacagctcatctaaaggtgtcgcatcttcctcgttcgttgctacagatcctcacgatgtcgactgtctctcgttcgtcaggtcttgatgttgcttgaagagggcagaaggtctgaacggtgatggcttcaatgggtcagattcatcatcaacggtttgggttcagatctggtttcagagaaagagagagcgtgagaggaaaagaaaaaaaaaaagagggttcagatctagtttttttttctgacggattgggataaacttccgacaaaaaaaatagtttttgtgatgatttattagatttggattattttttatattttatttttcgtgtgtttcttatttagatatcagggttatttttttagtgttgatttggatttgagaaataagttatggcataaaatcatatctggattagagagagagggacgagatagagagacaatcagtgatggtggctatggtggtagtgttttggggaagagagaaggcgtgaagataaaaaggcaaaaaaaa

SEQ ID NO: 183474 - DNA, 650 bp, Cannabis indica
catatgtattatatatatttaatatataaaaaaattctcttctgtacaaatctttagctcttgtttctcttgatcttttcacaaatttaagatatattatatgtatatacacacttaaatatcttcttccataatagctatagctataagctttcccctttctatttttctccctataaatatttgtttatatatatagtttaatttatcaaccaaaaacatattatttttttcctcaaaatattattttaaatgaaattaaattagctgtagtttttgagttttttttttgttagggaaaagtgatgaatataattcagcttttggtgtatattttcagaatatttatgagtaattctagaaaccctaaaaaaaaaccctaattattaaaattaataacatatatatataattacacttaattaatcaattaaattttcacaaaacattatatgatactaatcatatcagatagtactagactactagtatagtcctatttaatatattaaattaaattaattaatatattttaaaatatatttatataatatatatataatctgttaataaagcatctcacgcttatatcagaattagtcagatctaatctacctattaaccatgcttaggaattagtagctatataa

SEQ ID NO: 183475 - DNA, 631 bp, Cannabis indica
cttttttatttccaaaatcaaacaaaaaataattgaattgctcataataccaataaaaatttatttttatttaagttaacaacttaagtttatttttaaaatttaattcattggacgactaattagtttctaccataaaaatataatagtattttttataaactaaatttaatacaacaaatttaaagttactaaaaatatatcttaattggtaacttagatattaaaaatttagctaataaattatgtaagttgttttatttaattgtaacacattaattttttttcttaagaaaaattgtgacgcattagtttcttatataagtttaaaggtaataaaaatgttgctaaaaaaaaaaagaatgtaaaagtttcttaaacaacaaaacaacataacataatatgaaaatgaatatatataattttattgtaatgcattagtttcttaaatacctttgaaagtaacacagacaagggcagagccaggacttgaatgcaagggggccaaattttaacatttagtataaaataaaaaatttattatatatttatttcaatataaattaaaaacactttttttggtatgtaaaaattaatctataaaaataatcaaaatagaataaaaagtaac

SEQ ID NO: 183476 - DNA, 560 bp, Cannabis indica
acttccaaaaatcatgaaatcaattccaaatgaatctaaatgcaaaaattaagacattcatatagattttatgcatcgaaaatacataaaacaaagactttaaaaatcaccaaaatttactgaaaaataattttgaagtatttctttgttttttctaaagtagattgttcctacgtacgttttttccaatcctgaagggctgaacaaaggaataaaacgacacgttgtttttccacaaggggaaaaacgacacgtcgtttaacgtttgaaagggttgctaatgcatgtagaaacgacatgtcgttttccacaacggaaaaacgatacgtcgttttctcaatctaaagggctgcccacaacgacgaaaaatgacatgtcgttttccacaggggaaaaacgacagcagccatttaactaaaaacgacatgtcatttttccactttggaaaacgacacgtcgtttgggtcgtcttcctcagccaaactgggtcgttttgacccgtttttcagtcacgcaggtccgacggacccgacccaaacctgatcgaaaaaagcattttt

SEQ ID NO: 183477 - DNA, 670 bp, Cannabis indica
gttgcaatcaatgtgatattttctataattttacatgtttaatttattatttatgagtattcatatttaggatgttagattatagattaaaatcaaacatacatgacttgtaaatctagatcatggtaaaataagtcccaacaatgttaacctaggcgatgggcttagggttttcccctcctgggcatggtttgcaaaactcatctcatagcgtcgttccttgttggatttgaggaatcgcgatgcaaagaaattttcaaaaagccaagctctgggtgccctagcaccctagattggaagtgttccaacattggttctgggcttgtaactttcttgtggcatgtctctcatgtgtttgagtgcaaatgttgggcagctttcacagagataatggcttcggagaccaaaattgatgcattatagagcacataattgtcaacttgggcgttgggcaaggccccagacaccaaattgatctccaagatgtcaaggtgaaatccttagcttctaggtccattatttgttgtcttcttgacttgttagcttagaattttgaaagatggaacttttaaaacgacttcgtaggatccagtacctacttggatgctccttatgtcacatggcctggctaaggctcagctctcacgttgactgccctatcttgggatgc

SEQ ID NO: 183478 - DNA, 751 bp, Cannabis indica
ctataggatttgacgagcatcttcttagatttaggatgccccctactcggtggggtgatcatgccaaagccttttatttttccaacataggtcattttttaggccggtcccggataggttccggacctcctacacccattcctctggatcactcagcttatctgtcttccagctggcttttcccctcggacagctttcttggggatgatgaagccagtattgtagtgcaagactttgctaggactgagttagatatttagggtaggactagttttatcgctttgttttcatgtacatacgtttttatggccattctgacactcaatttatttgtccttttgaagcagctcatccaatggaggatcttttagcgactcttacccaaatatacagcccggactcttctcttcctccggcacccgcccagacggtgaccccggagaggtcttcttccagtgtcctcttaggcccaatcgtcttgatcgacgaagacggggaggtcgaggaggaggaggaaggtgaaatcgtggccccgctggaccggaagcgcaaaggcaagatggtggaggctgagtcttctaaaaaagtctaggagggtggccactccggctgttagctctaattcagggatccctcctgaagccgaggaatatactgtacccccctagcatcatccttactcctatcctcgctgatgaggaaagatagcaacttcggattgccaagcacaactatgtcatggccgaatcac

SEQ ID NO: 183479 - DNA, 730 bp, Cannabis indica
aaaacggtaataacaattgtgtgcagtgtgaccaaaacgcaagcacaattggcattgcaccttactgttcaggttcatagcagatctaccagattgattaaaggagatattacctttaccaccaccaaagttttcccctcgattgaaatttctgtttggagcttgattaaactgacctgagttgctgttaaattgtgcgtttcctctcccaaattgttgtcgaaaccttctccaagctagattaacctccatcagtgaatccatagcaggatcttgatcacttgaaacaagattcgcactcagatcaatctccttattcgacttttcgattctcgattctgaagccagaagtaatgcctcaatttcaccgacggtatactgctcagttcaagtattagtggatatgacgaaagtatcatattcactaggaagccccttgaaaatcgcagcaacgtgatctcgatcactcaagatttctccaacagaagcaagaagatcaacggtctgctttaccttcaagagatagtcgttgaggctgagattccatttctttaagttctgcaatttagtgcgaaactccagaattttcgaagatacttgcagagtgaaatgcttctccaaagtcgaccagatctgttgtgatgaattgcatcccaccattcgagtgagaagaccttcagtcattaatgacagcaaccaagagaccaagagttgatcttgaacttcccag

SEQ ID NO: 183480 - DNA, 787 bp, Cannabis indica
gaatatactaaacctaaaacatgcctaaaccctaaaattacccaaaaatcatgaaccgtcattgctaaaccgaagggagtgataaaatgcaaggtaatcataaccaagaaactacaaaaaaaaaaaaaagaaagggatgagacaattactatatgaagtcgaatagtcgggtggtgaaaaactctggcgcgatgagttttttgaacacctggagtcaaagagcaagtctcagcaaattcgcaggaagaacgtcaaagataaagagggcatgcacggtctcagggaattggaatgatttttatttttttcaaaaagcttgcttaaggtttttgaaaagatgaaaatggtggaaaaattgattctcaccgttttatactttgaacccagtaaccgttaagatcaaaatattgaagatctaatggctggggatggaggaaaagtggaaaagacgggtcattaatgctaattatgtccctagaaaccacaaaattgccaaaattaatggcatgcatattttcaaaacaaattatgacaaaaataccctccttaatcatttaaaaagcacaatttattaaaaagaactttttaaggggcaattgttatacccaaaattcggctagtactttagaaggagacacatgtcaatttaagggaatatgaactgacaaatataatggtaattatattaacaaatattaaatggaataactcttcaaatacaaaaagtcgatagagtatatttataactcgcaaactgcacagtccttagcgagacaggggatgtacg

SEQ ID NO: 183481 - DNA, 716 bp, Cannabis indica
gtctcattaatcaaatatgtacttaagtctctatgcactttggcttttctggttaaaattgtaaaaccaagcttttattagtgtgttctttaacagaccaacacgtgttctatcctattccaagctttgcacttaataagtttgcaatcatttgcagctcattcatggatggagcactgcactgaagctgcccaagaaatatacgatcaggagtacgaagtttgcaatgaattggaagtgaatggtggttctttttcgactccatttatttccaggacagaggaatgtgcagtcaacggtagaccatgcacagttggtgatggaaacctgaaacaatcacctgcattcatttgcagatcatcttttgtttctttcatagaggatagtgacactctttgctctgcatctggaggtttttctttcaacagctgccaggaatccagtgtagctgagttttcttccccaatttcaccaatgccaagctttaccttttcagtccaatgtctactctagttcaaggaaatatttcattaagatttgaagccgacatgccatcattggatttaccatttacaggtacatgcttcttatttattctgactattgatttcttgtcaaaaactctataaagttataccttgatgaataaaagctggtattgttatataaaatgcagaaatcaaaacttggagaaagtgccagctaatagcgcagcc

SEQ ID NO: 183482 - DNA, 816 bp, Cannabis indica
tttggagggaattgagtttaggcctacacctcccacataaatatctatgtctatatctatagactattacatgtggtatgtatatatatacaatttggatgtgatttttgatgtctttgttctctaactctttattttggtaaagaaagtgaagttgttgtgtatttgctaatgtcccacatagacatatttttatttataagaactaagtttcacctttctattgacattattttgtaaatgaatagttaagtataaatttataatgttattgaaaaaatggaagaaagtaagaaaatctacatataaaatttttattcagtttagaggatatattggcggaatgactttaataatattgataaaagagaaaggaaatttaatagcttgtggtttagaaagttaataatcaatttttttttaatatttttagtcaaatttaaactatagtttttaattttctattttatgtgtcttttctagttttattaatattaaataatcttagcaaaattttgtatattttcactttctcgttaagcacgtggtttttcttctcaaaaactaaaaatatatatgaaattttgttatctatagtataaacatcaatacaaaattgttttatatagtaaaaaaaaaagaaataaacaaataaataaatccaccctatatatttttgaaatttttacatgaaaaatcctttttactctctttattacattattaccctcacacgcctattactacatttatacttacaaacttatttttattacacatttaccacttactcatcataccatgcatacacgtgtt

SEQ ID NO: 183483 - DNA, 671 bp, Cannabis indica
ggtaaaatttgtaaaaagttaccttgaaaagtagaacctttaaattttttaattagtaggtcattttaataaaatttaatggaaaaacaatcttaatattgacgtcttagtagtatgaaatcattgtgactagagggaaaaaatattttgaggagggtccgagccacatttcacaaatgggtaccaatataagaaatgtgagatttttactatttcaattaaaatgattgttagtgcttgaaaactactttttctctcaatgtttccaatagaaaagtgatgcacaatgctcttagcttcatccctgtgaaatttcactatttttcaagatgtgtagggtgaggttttaagaaaacattaacgagtgaaagagtaaggagaaactagttaaaatctaccctgaaaagtaaaacgttttaagtttttaattagagggttaatttatccaaatttaacgcaaaaacaatcttcatactcacgccttagtaatatttaatcattgtgccttgaggaaaaaatattccgagatttgtccgagccacatttcacaaaggggtaccattatcagaaatgtgagattttcactatttcgattaaaatgattgttagtggttgaaaactactttttcactcaatatttccaactagaaaagtgattcacaacgctctgg

SEQ ID NO: 183484 - DNA, 561 bp, Cannabis indica
actgaggatggtttttttcaaacttggcttttttcacacattatcttcttacatttatttttattttcaaccaatcttattacttggataactataaacagttacaaattataattactagttgtttttttccaaaagactcaggacaggatacgaatcagctactctgattagtttttgtgggggctcaccagaagacgaaaacaccaccaacgattgactttgaccctgcttaaattgattcattaattgtcgtactggttcatagtacccactagttctccctgcctgggcaaacattgtgcttttcctccactcccttgtactgttgttgcaacttgataaccacctcatcgtcaccggactcattacttgcaatgatattactcatcaaatcctaagagaaaaaagctaaaatgaaagtaatcatgctagtttccacaaaaattcccaaaataacccttttgctgctttcgtcgttactaatcatatcgattgggcttagcgtaggagctattcgtcccaacttatctctaccacaattcgcaccaacgtcaccac

SEQ ID NO: 183485 - DNA, 549 bp, Cannabis indica
gatcctaccacacttcaagggagaggatagtggggtaggctccaaattcccatcctttcttactttggtcacaaataatggcataaattctatgttcgatattgacactcttatctctaagaacactcttagttggcattctttcataataacatttggtagaactatttgctcctccatgttcaaggaaaaactctccaatttcaaccaacaagtcaacctccaactcttcatataaaatctggcataattattttatagttgtgtcagttttcaccatcaaagttaaattttctttgcctttataagcccaattaaaaccctcaaaatcccaaacaccatcgtacaatataacaagaaacacaatcaatcctacaattttttacataaaatagattagttagggaaaaaccaaaaaaaaaaataccaaaaacactcaaaattggcaaacatatatatatcattgacaaaacatcgagaaacaatcgataaattacaagcagaaattaattggtgtattctacaaaatcatcgataaaatatcgacac

SEQ ID NO: 183486 - DNA, 793 bp, Cannabis indica
tttttttaatatataataaataaataaatatgattttagtaacaaaaaaaaaatttattatactcttttaatcaaaacagttttttctaaaagttgagttggaacagctttagctttttagctgtaaacttctccaaaaaaaatttcaaaaaagcaaccaatactttaaaatgcaaccaaataaaggaatgaaatgaaaattatttcttttctattccattttatttcattacctctaaccaaataccacttaaattcaacttttatatagtagctcttgtctttattgaagtttagcttcagtgatgtgcgttaaagacggtaatttgtcttgttagggtgataataaaaaaaaaaaaaaaaaaaaaaaacttatattcaacagacatgaattttttcaagtgattaaggttcgtttttttcaattaaatcttttgaccaaatgcaaattacgtaaagtatttccatattttgtttttttttaaaaaaaaatcactacaatttttatagctgaaattttaatatttattatttagctcatgaaacttgttttggttaaaagtcttttctccaattccgtcttgacaatcaaactaatcaaattgttgtatattctacatataaattatacgggacgttaggtattaatgatctaagcacttcaccgaattcatcattaataatattgtttattgtaaaattagggaatagatatgctcttcgcactattttaataattttttttaaaattttacattaataaaattaatttttagttaagtccaatactact

SEQ ID NO: 183487 - DNA, 613 bp, Cannabis indica
accaatccgaagaagaggaggtggaggaagctgaatctgaagagttagtgttttgaaacttatggtgatggtggtgttggtgttgattaggggtttgattggggaacgatagagaatctacggaggagaaacaacgaaagggagggaatcgataacgggaggtgccattgccggaagcagaagaagcgagaagtaatcgcttggctgccgtacgatacattaaaacgacgtcggttagagaagtggaatgagatgtgaagtgtgcagtagtgaggttttggaaagaaaaagatgattaataggatccttggtaattataaggcgtttcctccacgtagcctagtttctgtgcttccacttgtactctcatttggccgcaggccaagtctaatataccgtgatcaatttatgatgtcccccaaaaaaaatattaatgcacactatttttttaaaaaaaatttgctgcattaattttttctgtttttttttttttgagtagacattaatttttctgttagtttctatgtaaattgctataaaaatttaattacatttaaattactttatcagttgttatagagtttttttgtataaaattttgtaaaaaatatat

SEQ ID NO: 183488 - DNA, 740 bp, Cannabis indica
atcttttcaagaaaagaaaattatcaacaagtactctctcttgattatatatcttaatatattctttctgttaattcatttctgattttttttgtgtgtggatatgtatgtacacagctttgaaatctttgactcgtcatgtggtaactgtaaatgtgggtaaggtaataataataataataataataatatggtttatatataataatcatttcatcaaaatgtatgcattatgtaattaattttgttgtattaatttgtaggatattgtgactaaaatcaaaacattggcttctacttgtgaatcgttgaccattcttggtgctaatggcgtagtgtcttttgtagacattattagtaatgatatgtctcaatttaaggcccaggcatgttacaatctatcccctgttttttaattagtaattttgattatttattatcaaataagatgaattattgttacagggtttgtttcaaattgtatctctgacatgttcaaccaaagctggtgaagaagtaactgtgaatgttacattgtctgattatgagtctacttcaaagttttctcgagtttttaggggagttgcacaactgctaattactgctaaaactcctactcaactggtgattgatttttgattaattattgttcatttatttgaatcctctgtttactaatttatgatccaattaagtaaactatattatgatgttataaatgtgtcagatcattgctaata

SEQ ID NO: 183489 - DNA, 615 bp, Cannabis indica
aaatttttaaaaaaaattactaatataattataatacttaaaaataaattaataatatgtaatttagaaaaactacagcatagtagtgattgcgtctaatactttttaagtgataccacaaatagttagtaatatttttaaataattttatgtgatttatatttaattaaattaaatttagagaatatcacaaacgaatctgcttgggaagtacgcatccctttctgaccttactgtaattagggcataattaattttacagctttctcgtcttcccattcctatcatcttctttttttctacagtttgtagtgaaattacagatttaaccttgctctgattttcatacagtaaaaaagttgtaataattgtttttgtcagtgaataatgaagaggatatctcaacttggtatttcaatgtctaatatttttttggctactccaataataagtggtataaattataattttttttttttttagtaaaacctgtatccattgcagacaaattaaagttcaggatataaattacatataaaattttgatcttttcaaaaaatttgatgatctaagcctaatgcatactttgtaagacgatgagtatttttattatcc

SEQ ID NO: 183490 - DNA, 1349 bp, Cannabis indica
cgaattgccatccaatagtttatcaatcaacattgtacttttcagataaaaaaaacattgtattgtattttccaatgaaacaaattaagaaacaccctttcattgacaaccaaaaatatgatcacaaattttgtgtacctaggttatgtttttaatttttaattttaatttttttatgtgtattttaaaattttataaatgtaaaaaaattatttattattcttttaaaaaaataatatttaaagttttaaaattttaaggaaaataaatataaaatttaaaaatattaaaattaagcataatctcaacattaaaaataacaataaaaaataataatattataaataatatattaatatttataggatttttagatcaccacttttgctctcacttatgagagcattttcttttaattttgattggtttagtaatgaaggtgcataagattaagatgaattgtggaatatgttattagttttttaatgttttttatttttttaatattttttacaaaaaatgaacaactttttattaaaaatattaatgaacattaagattaataacctaaaactattttagctatctaatttaattatcattcctaaagagtattaatgtttttgttttttttgttttttggaagggaagagtattaatgttttcaaagaagatcttttcattcaccaaataaaaaaaaagaaccttcctataatcaatacattatatatgaattgaagaagaaaaatggaatagataattctatgaggaagagataatactttcaaagaaggaataattcaaaagaggtcccctttattttagctaaagtttagtttgcactctttcttttaagaaattataaaaatgatcatgtgtttattaaaatggtaaaaaattatcccatggccacaatttcagtcaaattttgtttaaacattttctttttaattcaacttaaattaagttttagatgatttgaaaaattaattgttaaaaatagacaatattgttagaacactcccagtgtctttataatagctaaaagttaaaaatttagctcaaaacttattttaactcttccaacaacatctttatagcttagctataataaattttcacaaactccaataaaatgcatctctacatgtagatatggagagagagtgagctaaattttttttatttattttattactactttatttaagtttactaactttttataattatatataatgtataacataatatttttattaatttatttactatgtattagaaatatattattttaattgatgtagataaaaaattgtaataaagaaagctgatctatggtgtaatgt

SEQ ID NO: 183491 - DNA, 539 bp, Cannabis indica
aattcggaaagtattgtccaagttaaaaacaaaaggaataaagaccttttacggaaggcaacaaaaaagaccttttatgaaaggcaacaaaaaaagaccttttacgaaaggcaatgcaaagacctttcacgaaaggcaacataaaagacctttttacaaaaggcaagggtaagaccattcgatacgataatataccaggcacaaaaaaattgtaaaaggacaatcaacaagtacaacataaaaaagagacacaacaacaaatccattcaaaattaaagcatatgaacaaacaagaacacgtcgagaaacaacagaatttaaaattatcattaataaagtacagcaagaacacgaaacagaaagtccactaccccacctctaaaaaaaaaacgaagagaaagtttaattgaaagaagagtgcttactctattttctaaaaactaaggggaggtagtggccgtacaaataagggtacgtgcataaccgccgacggcataaacttacaaaattaactgcataaccgccgacgacataaactt

SEQ ID NO: 183492 - DNA, 744 bp, Cannabis indica
ggaacaatttacaattagttattgaaatgaataactattatcctatgatctggatctttatcatattttaaccgagcaaatttaacttaacattttgctccttgaagaatacgctgactaactagcatatactgaatgcgaacatcctcatgaatcactggaataaattaattcttcttgttgatcgctaagagaatgaggtttggatgaatgattccttttctggtaagtaaactttctcaaattgtacatcttgtgctaactaagttgatcgagcttggctttcctctatgtgtaagtcatgccttatttctcgtgatatgcgagatgcactttgttgatgccacattcatctcgtccatcactttgacatacttgatgattgccgagaagacctttacatgttttctctttgtgaggagatcatttaatgtttttatttgtacaagtatcatacagatagatctgttcatttattgctcaaaataagagtataataaataatatagtatatagagtattaataatatatattgtaatatctattgcttttaaaggttaatacttgtaatctttgaagacaaatataaaaagctctaacctgttacttactaagcttaagagaattaaaaaaattaagaatcatacatataatattatttattataatatatttttatattatttaaatttgtaaaatttctaatatacaataaaaaaaataataatatatatagtaataat

SEQ ID NO: 183493 - DNA, 652 bp, Cannabis indica
aaaggattgaagctaggaaagaagaccctatagttcctgcttaggtgtttgccatgacctaagtagatgcagaggttggtccttcgactgttacagatgagatttctattaatggtattatgtttactattctgattaattctggtggtacactttcgtacatttcaaggaaagtcattaaaaatttgagtagaccaagtgatgttagtggattttgtacttaatttgtttcctactggagaaataataatctttaggaggtgggtagatctcttccagcattaatggaagggagagaattgttaatggatctgattgaactagacttacaagactttaatgtgattctgggaatgaactggttggccaagtataatgctaccgtagattgtaagagaaagatggtgatattttaaccaaagggtgaaaccccatttgtctttatggggaaggtttagggattttaaattcctatgatatcagcaatcaaggccaatgatttgttacgagggggatgtatgggatacttggccaatgtattggataccaagaaggatatactaaatgggactaaagaaagttcgagtggtgtatgattccttgatgtgtttttggaatagttactaggatttccatcgaagagagagagaga

SEQ ID NO: 183494 - DNA, 710 bp, Cannabis indica
attggcagttaacagtgcaagatgaatagtactttaaatttgctaccagttcaataatctaaaaggttttactattaaaatttcagcttagagggttaagtgcaagtagagtgattgttgagagaatttagccgcaaataattttactaataaaaaacaaaaaagaaactttcaagatttacttctagaatgagtgaatatacaaagttggtccagaggacaatagttaagaaagaggtgtgttacacaggctacagcattgtacagccagttgattagagctacttggttagctaccccctgcatcgaacatgtccagaagaaaaataggcaataagaacacaaacacaaggaaaatataaaatatatcaaatctacaagcttttttcaagaacaatacaatagtaggcagtgtccaatgcaagtgcaactttctactttggttagcgtgtatttctttgaccacaaaacccaaaacgggaagtagcaaatatccaacaatttgaattcatagttaattaccttgctggttttggctatctataaaccaatgttgatgtctgaaagtaagtcgaggtcgaaaagagcactaaaggaaaagaactgtgaactctgcatactgcatgcgctacaacagactcaacattgcgagaaaattctgctggtcttcatcttctttaaacaatctgtttcgactagagcatccaaga

SEQ ID NO: 183495 - DNA, 519 bp, Cannabis indica
atcatcaccatcaccatcatcactcccctccaccttcttctccttcttctccaacccaaccccatttctctcatttcccatatttccatctttacttctcctctcacaccatttttctctctaaccttaaagactcaaactttattcatcaaaagctctgttttttcttttttttttaatgaaaggaactcttggtcttctgggtagctcttctaatgaggagtcatcagtgggaaaagtagtagctgatactaaggttgaagaagagtatgtgggtatgtcatctgaagttgagtcggatcttgaactgggtttggggctaagccttggtagttgtgttggtgggaaatcatctaagccgtccacttggggtgagtgtggtcgtattttgatggctaaggacttcccttcttctcgtggaccaaactctcgtttgactaatattaagactggttctgttactgttgggactaaaagaactgctgctgctctgtttctcaagatggtggctcttctcct

SEQ ID NO: 183496 - DNA, 509 bp, Cannabis indica
gtgtagccttctcctcttctgttggcccggtggagaagtccaggcctgtaatgagtgcaaactcaagcactctgaatctgagctccttccgaccaatgaaaaaccgcatcttcaactcctcctgagcaccaaccctcatcttgtgcagcatcagctggtgaaataagaccgaggagaatgtcaggagaacgacattccaaaagttgccgaaacggctttccttcgccgtgttattcaagtttaactcttcaaatcgagccttgatttttgcaaaagtctcggtgcctctgtaactaacgcgaccagtaaaatgctcgaatgctggaattatgagtcttggagccatctgaaaaaaataaaaaccaaaaaaaatagttaatgtcaaaaaatttaaagaaaggtcgaacataacaatcgacatcatgtcgatattcagtcgacattatcaaacatttagtgaccacctaacttggttgacaaaacgtacgatatactatcgacatgatatc

SEQ ID NO: 183497 - DNA, 644 bp, Cannabis indica
atcattaagcacaatatcaaagttattataatgaacatctttgccattgacagtaagaaccatagtatacggagacaatcaatcaaacaaagctgtaacattcttgaaccccaaccgaaccgaaggcaaaattaaaatgtctaaaccccaattgaaccaaaggaaaagagaaaggccatgaaacagggccattgcctgctacatgaggctgaaattacataaggcaccattttttgtaaaatatttacatttttacgttcaaagaatgttttttttacatttttacggttttccaaaaaataacacgaaaacaacataaaatcaacaagaaaacaacataaaagtaacatgaaaataacaacaaaaaaacaacaaaaataacatacatataacaaaaaattaacaacaaatgaacaaaatttcaacataaaaagaccgtattttatgtaaataaaatcaaaaaaatcgtaaaaaatgtttaaaattccgtgaaaaccgtaatttttgttattttttaattgtttttgtgcatttgtaaaaattaaccctataattattcctagcttgtacacaaagtggggtaattatattataattttagatttaatacatgtttgtttgtgtttggtagcaattatatgtta

SEQ ID NO: 183498 - DNA, 919 bp, Cannabis indica
aaatattagatttattgagttaaattaggcaaagtgaagattagagtagttttggtagggtgcgcctgcctatgctgtagtgcaagacataggcgacactcgagagccccagcagcaagccactgtgatgggctctccccttacaaaaattaatttaatatcgtgtgagtcattgactcacatatcagatattaaactgataagaacagatactacacttgatcttagccaaaaggccgagaaaggtatgaattgttcactgttacttcttctctttttatgacaccttttgttttctttcattttgttacgccatccatgtgggtactacaaaaaaaaaagaaaaacaactgctgctaaagagtgagttgtgtatgtcagtgtatggtgtaatttgactaggaattatttctcaaaatccccaataaacacaatcacttcacttaaaattgtttaagtttctgaaaactaatgtgtatatgaaagattaaccaaatgaatacaaaaactaggaaagcttaagtctaattatatgatatcgagttgcctgacatgtttgtcataccaacatgttactcttggatcttgattcaaagtgaaccagagaaaatgatgatttactaagatttgaaaacaaattgtgtcttgttactccagaaaattcagtatcgccgggttggtggttctttagatcgagaagaggaagagagcgccgaaaagcttagcctagcctaaatatattggtatcatttggttctgttttgctgcttaattaaatcaccaattgaagtctcaataataatatttgggatggccaatcaatattattgtgtgaatcttttctagttaacaaggaaagtaaataaaaaattagcagtaacaaccagccatatatgcaaagaacaatttcattgttaca

SEQ ID NO: 183499 - DNA, 732 bp, Cannabis indica
agagcattgaaatagcttcgaaacataagttgaatctcgttaatcgaatcaatattgagtgaattatggtcattttactaaaggttgttctgctcccatcaccctagttaacatccaaagcccaggttgacatatgacatcaacttggatgctatttttttaggctaagtaatattttgatatcacttagctaattttttgttctggcgaagtcgatcaccagttctcgaagatgttgctattttgcgaaaatatgagactcaaaactacttgatttctaagtcactttgctgaaaagtgaaaatatgaagttgtaaatatgacttgtgtgacttcatagctctcagttactatgaaaaactagacgaatggtcgggatggaattagaatcgaataagtagaacccagtgcactaggtcatacgtcaacctaggcactgggtgctcttttcagagcttctaggatatctttttgatacttctaaggttcttgaaattgaagatgaggtctcctacctcgtttttgaccatttgagagagaatgctaagagcaaaatttgtatttagatgatcaaaaggttgattgttaacctgggcgatgggcccaacacttccatgtcaacctcggcgttgggctcagttttgatgcccctggaatgtcgcttaatccccgagttactgtatctttgtatttctgatgacgaaaaaactgcctgaaacactttttgtaaaa

SEQ ID NO: 183500 - DNA, 733 bp, Cannabis indica
ggaagactgtgaaggatcaaacttgaagaagaaggacattcgggctcagatcttgattatactctgctacagaaaggattcaagggttagagatctgagtggaaggagacattaattccgctgcatcaatgtaaggttttcttaactttatatgtgtttaatttatcgttttagaaagttcatatttagggtgtttaaacaacatacttgtgagtagatctaagatcctgattaaataaatatccaacaattcggtttgggcggtttacaattttttttatacaaccctaatgtttaaaccacaactaaaattaattacatattattatgtataaaaaaggaaatattatttaagtatatcaccattataattttactaaatttctttgactacaaatatattttagagatatttattttttttaatgatataatatatgtttaatacatttaataataatttaaaggagtagaattgttaaaaaaaaattaaagaagtaggaaaaaaaaaagatttaaggtagaaaatgattcaaaatataatggattaaataattaaaattattaaaatacatttacttatgtcaattacatttttaagaaataataataataataaaattatgtaatataaatttacttgtatattaatttgttattattactaacgaataatatatactatcattaaatatatataatgtatatataattatatttaatatatcgtatt

SEQ ID NO: 183501 - DNA, 1032 bp, Cannabis indica
tgtctctacgttttcttttctttaagtttttgtagagagtacaaacaaaagcatgagattgatagttttggtggttggggcagagtcagggtaggcttatggttccatgatacaaataacatacatatacatgatgtacaatatacaactactcctcctttcaattattagtcataattataaataataaaatgatatagcataggagggttggaatttggttttgttcatgtattggagtaaaacacaatccttatataaatcacattttgtttttttgtatgaaaagttcaaacatggtcatttaagaggggcaagcatttcagatgacttggaaatcaatgtctcttttgattctaagtaataaagtttgcaactttgttgttgttggtgttagcagaaccatacaatatatatagaatggaataacattaaatttaaattttgtttggttgcatgagaatgttataataatagaatggaataatattaaattttatttaatttcattcttactttcattctcattttcattcgaatatgtcaatatgaacgaactcatattccacaaatgcaccaaagagtaaaggtataaaacaattaatacttaatacttgggttcttaactacttgaaaattatatttatgactgtaggtgaatcggtattatttaaaaataatttgtatttttatttttttaaactttttacactattaaattatgcctcatatagtatagagctcgttaatagtactcattaaaatataacgcagtctttccatcacattctatttaattttatcgtaaaacgaatgacatgttgcaaattaaatgcccttcacctattttactttaacgaaataaatttttttttatatataataatttatatttttagttttagttttttaatcattagaaaaggggaaagcttcttgatttgcatccattaatgagtcgtatattatagagtacaatttggtagtataaaaaagtccagagagcaaaaatattaattattttgtttttac

SEQ ID NO: 183502 - DNA, 524 bp, Cannabis indica
gtcttttgtatctcttagacactttgatgaggatctcgtagattgcttctgttttctctaataaaagttaattacatagaattgattgtctgtaatctctattccagtcctagagagaagagaagatgggtaatttgttctgttgtgtacaagttgaccaatctacagtagctataaaggagagatttggcaagtttgatgatgtacttgagccaggatgccattgcctcccatggtttcttggaagtcagctagccggacatctcactcttcgtttgcagcaattggacgtgcgatgtgagaccaaaactaaggtttgcttcttgtaactgggaataattcggatgactgcatgtctttagttgctaccaaacaaaattttatggattttcaattggctgtcctaaacagtttctaacaaaaaattaccaccattctgttgtgtggtggtgctatagtcatgatgctctcattagtgttttttcttcttattttgtgacatgtaccttcttaaaaagtctcat

SEQ ID NO: 183503 - DNA, 642 bp, Cannabis indica
ataaaagtaactactatatccatctggacctggagccttgcctcctggaatgctaaaactgtctgcttaacatattctcttgtgactgagctaaaggatctctgtatgtgtattagtgatgatcggtccactctccattactttggttgaaacttttgatctcccatccatgcttgatcccaacaattgttgataataggcaagaaaggctgttgtaataccattagagtcttccagtcggataccatcaacattaatcactgataaaatcttgttttgattcgttctctctcggatactgaagtaaaaaagtgcaaaattttcatctccttccttatccatgccattctagacttctgattcaaaaaagagcaatagttcttatgaattttcagcatatacctttcttgtgttagctttcctgttcctgcagctctttgttcagggggtctctttgaagctgagtttagcaatcaactagttcctgcctagctttgaaatctgctgcttggatatctgaaaaatggcacctgttaagctctttaagggtaggtttaagagcttttaatttagcaactgttgggttttgtgccctaaataaaacccattacaatctgattagttatcaatttaagagatttg

SEQ ID NO: 183504 - DNA, 772 bp, Cannabis indica
tttttttgttagttatttttttagcatttcatgagcttagtaagtccttgttttatgttttttttttagtaaatatttttattctagtgaaaggttttagactaattattacttatgactttttgttattatatatttatttggattagaatttcactctttcacactctttttgatgtaatatttagtttaggcaggttacccaataattttctttttacctttttctaaaaccaacccaatttcaaaatctcaaggccggctttatattaacattttctttctatttttttataacgacttaattagcttattttagatgattatacttgtaaaaaattacgtggatgtgtcaattaatgaatatttctatttacttttttaaaaattaatataataatctcataactgataaataataaattaatgatagtgagcgttaattactcttcttaatttctaatcacgtttcaggagagtttaaggctacaaacattccacatggttattctgatctggaagagaacaaacacaacaaagcataatgtgggccgtaatgtgggccccacggcccacactaaacaaaaccacacaatcaggacggtgcaccgcatatccctggacaaatccccatccgtcaatacactttaccgtttccacgtgtcatcatcgggacctacacatgtcactcgtggagtggctggtcaattaagtgtgatttggagtgaaaatggtgggcccaatcaggaaggcccgatctggtggcaatccg

SEQ ID NO: 183505 - DNA, 747 bp, Cannabis indica
aagaaagggaacacaatttctcatagcaaatggtaaaaatctgatttcattactattactgagttagaatgaccaaggaatcctatgttagaatgaacaattcactcttaaaacctacctatcattgtataacacttctcaaaatgaaaaagaaactaagacacccattcattagaacggaattaggtgcaaaagattacacggtctatagtttaatgctagtgcccatcattgtaacaatgcatcttcgttgagtagtaaaatttaactatattctactttcgttcattcatctgtgtttctttccctcaaatacgaagataaggtgaactaaggtaaggcataattattcaagtgataactatcttatcctattatttgcttttaatttggtgaaccaatgtatagcgtgggcacaaaacatgagcataagatgaaaagcaaaaagtcaagagtaattgcgcaaaccacagaatgttttctcttctttcccatcttggtggacagagcaatgagtttctattggtttcattgattcaaaacatcaatagtggaatattcatgaatgtgaaataaagtttttatgacttgaatatcacacaagatactgaaaaaagtgtaccctttaattagttaatgacacaacttttatcttttcaagtctacttttgggagttatatgtaacctcaaagccgcgcgcttaggcccatcagccaacctggatctatattgcacgtcatcatcac

SEQ ID NO: 183506 - DNA, 762 bp, Cannabis indica
atccgatactggtaaactttgccaatgccctggaaaggacataacacttatccaaggtgtaagaatacctatcgctgattatcatgccagtctaaatccagtgaactgacaaatcagggaataaactttcgaacatataatcaagattatattccactgtgctgacaacactataatcattaacaaatacatatgttctggacttaatagaatttatacattatatataatcatgaaataaatcatgtgaaccatgcaacataaaatgttatttctgatctttattagtaaatctgattatattgaaatgggttttatttagggcacaaaacccaaaacaatttagggccaggccttagcagactttgtagtagaatgcacgggcaaggaagaaagcgtatcagaaaaaaaccctaagccaaaacaaatacctcagccaagtaacagtgaagacaagccgacttggaaactacatgtggacgggtcagctacagatcaagtatccggtgcaagaatcgtcgttgtcacacctgggggacaacacctgcacgctgctgtcaagtttggatttatggcatccaataatgaggccgaatatgaagctttgatcgccggtctaaaactagcctgagaaatgaaggccgaacatattgagatctgcaatgattcataactggtggtaaatcatgaatctggagaatacgaggctcggggggaaagatgatagcgtaactaagcaaaatacactactcgagtgtcctc

SEQ ID NO: 183507 - DNA, 626 bp, Cannabis indica
aatcaattgataaaatggagagtgaggtggcagcctaggttagtgacaccttgcaacttatttttcagcaaaggattagtgattatcattgattcttttttcttagagaaaatcgaaaaaagagacaaaaagctaagagaaactctttctctttctctctttctcttcgagcagcaccaaaccaaggaggcaccaactgattagttgatgtttttttttctggaaattcaatagcgattcaagggttcttcaagccaaggtaagccctagtaacacgcttcattagttcttgaattttatggttagttgagtaactgattttgtttatttggggctattagggttagtagtatttgatgttcaacttttaggttcattttaggttaatattgagttctggttattaattttgagctatggtgatagaagggagtaagcttgagcgttaaaactcaagtttaggtatttaatggcatgttaaatttcagtttgggtttttgtgtaattttggttggtattatgttgtttatactattgtttaggtactctagaaggtcttggtggctatttggatgtagtttgtagcaagtaatttgatgggttaggggaaaccgtggtgacaaatc

SEQ ID NO: 183508 - DNA, 544 bp, Cannabis indica
attagaataatgaaagctggcgtagggagtgtaatagtcctataatgacaagaagtagaagccatggaaaattcttgtcccgagaacgagaacaagaacgagaagaaacaataagtcgaaaatctcccccaacttcttatagtaatattggatatcaacgacctgttccctacacaagggcaagtttgggaaaggtttgcaatattataacgatcaattcttataaaatcaacatacatatatagatatatatatgaactgaaattaataatataaatgtatgtatgtacagatgacagagagagtaaagaatctggtgctatgtaaaggcaatggaaatcagcctttaatcagccaattactcaggcattctcattcgctgctccgctgatcagcaattaaatctacacagtaacagaaaagagacagagagaaatgaatcgcccgaccacgtcgatttttgctgcctcatcacaactcctataatttaatgtatctattaatgattattctttattcagttaatgtatagtacagatatgtt

SEQ ID NO: 183509 - DNA, 700 bp, Cannabis indica
atatatttatatagagtaagtttataatataccttttcttaagtgaaattttaaaaaataaaaattattagactctttatttaaaaatatatagtattttcaaaaattattggaaaatatgtatattttttaagagaaaatatttttttgggccttttaagttgggtgggccctaaccgccatagtcgtggccctagtctgtcttagcccaagttcggtcgtgaccccgacctatctttttcatcatacataagagtttttttttttttttggtcgaagtaattagaatcactcatgaatttacgatgctcatgtccgccaccggcgctggaacctcctcgaaccaggatagctcatcgtctaaccgcagagcatgctttgccaaccatggaccactaaaatcttagagcgagccccatgggacaaaactgcccccaaaattttagacaataaagctataacatcttcaaataatgcctccaccttaaaaaacataaaaaagcagaataaaactttaatttttttttttatgatcgtgtatgcatgtattaagatttaaatattttattacagactgttttttatacatgtagtaagtaattgtttgaattttagtttcgtatctaaaaaattactattcgaaatattctgaaaatttgataaataatcttataaatctataatgtacgctatcataaaa

SEQ ID NO: 183510 - DNA, 823 bp, Cannabis indica
acacatgcgatccgaatcaaaatcacacacactagagtatagtgtatagtaaactgtacttagtaattctatattaaaaatctcttactttaatacactaccgacttgttttattcatattgtataatcttaattctcttatacgaccttacaaaattataccatcttcatatgtaaggaattttcaaatatttattaattatacttttataattaatatattcatttatcttatacttgtatttcatatactccgtaatatactatccattgaatacttacttttaggatataaattccaacaaatctgtatgtagagctctagaaatttatctcatgtagggagatgtgtccttattaattctgtgttgattgatgtccactcttactgggcacaattgatggtgttgcctaaatacattttggagcaaatcaataaaatttgtagagcttttttgtggaaaagcaactatgatgctaatgctccaggtcttgtggcttggaatcagatttatcttcctaaaaatgttggaagattgggttttggaaacattgaaaactgaaattttggagcttttgggagatatatttggaatattgctagagacaaacagtctttaagaccagatggtggaatgacattgctccacagagtacgtactgttgttagaattggagaaagattgtggaagttaaaaatgtaatgaagaaaaaaaaaaagaatatggaagaatttagagatgtgaaattcaatatctcaagtctttgtaataagttgtggtcgattcacatgcaaaaagcttggtatgctttcacttggaac

SEQ ID NO: 183511 - DNA, 519 bp, Cannabis indica
attgaaggcttcgctcgctcgctctaacgctcgtttagtaaacagcgagtgcataagcccctttagagataggggcgagtactacacgagctcgtcagtgctttggaagaagcaatttgttaccgagctatattattgggaataacgaaagcatctctaaatactcaaagtttcatatccgaagatcgaaccagatttgtcataaaattgagattatttcgtttgcttccttatcagagaggggcccggcccttagggagcgggggattcgcgatgccatctgtatggtcttgctgttgatggtacctcacaatgggggtgctgcccaagcggagctaactacaggtccgaatatactgcgatcacccaaacctttctaatactgaatctaatactgaaatcctgtatacgaaatttcttcagttgcttactcgacctaagcaagccagaccgaacactcgaaaaagaagttctttctccgtcgaacggaaatggacgactaaaaaactagggcgctat

SEQ ID NO: 183512 - DNA, 673 bp, Cannabis indica
gccaccgaaccccttttgatgggggtctaaggtaagtccttatctctttggttttaagaacttgtatcttaattgtatacaaaaataaggaaaattattgggagacttctctaaaaagtgtaccaaagtactcccgattgacatatgtcaacctgggcactaattgatggcctgagagcctacattgtgcaccatggtggtgggaaaattttctagaagctaatcttatttttggttaaatgtgctcatttaatttttcttttaaatttccatgggcgttactcagtggagcaaaatcagtgtctaagccactatgtcaacttaggcgcccatgatttaggatgtcgtcaatagaaaatgatgtccaggcattgttccttgtcaaatttcaagaattttgggccaaagaaattcccaaaaacctaaaccctagtcattgtgtttcccaggttgactgaatgttaacatgaactcctagtctacacatggtgtctctaggtggggttttgtctagacttatctccaagatctaaaacttggttagggcatgtctttcatgtattccagtgtaatggctaatcagattccatataattaagaagttattaggaacaaaaattgatgcgagctagggcacatattgtcaacctacggtgcccagtcttgtactggg

SEQ ID NO: 183513 - DNA, 466 bp, Cannabis indica
atattataataataacaaataactgctaaaaaaaataaaaaaaaaaatattcgatagataattttaagcgtggaggttgactaagaggttgtaataggaggttgtaattagcattactcttggaatgctaccgccaacctcctattgcaatctcttagtcaacctccgtgcttgaaaacagatgccgaaatatttttttttcttgacggtgttcgttatagttacaacattgtccttataaaattttaaatttttataaatagtttacaatttcgaaaataggtttgaggtttttctgaacacacgtggtaaaatggattatgagaaactctattttcgatactataaactattcagaattttttaaaaatttacagagatgatattgtaactataacgaacaccactataaaaaaaattaaaaaaaaatctagcatatgattttgagtgtggaggtaattgatta

SEQ ID NO: 183514 - DNA, 560 bp, Cannabis indica
tatttttcaaggaatcctcagatcagcttttataatgctgcaactcaagagaggggagacgtacattgaaccagctattgatagaactcgatgggttcgagtactggaaaaggtgttagtattttttgggtgctacaaatcgtagggatttgttagaccctgctcttctccgaccaggtcgatttgatcgcaaggtttgcttctattattgaatgaaaactttcttacatatctgtaaagctttgcaagaaacagaaaggggtaagacacccctgtttaactagatttggactctaccgatgactggatatccttatttataatctagaataaataggtattttgcctcctgaactaactttagctgaaaaaaatcatgccccctaaattattatcgatgttaaatatattaccccaaactatgaccaatatcatactttgtctcttaaatttgtatcattgccaaaccgagcgcggtttggcaatggcaaaagttcgggggcaaaatatgatagtggtcactggtcatactttgaagggtaaaattgttaattatttaa

SEQ ID NO: 183515 - DNA, 707 bp, Cannabis indica
tttgaatatcggctccattgtttttccgtttctgatctcatcttctcggattcggtttccatgtttactctgaaaggagggaactttcgaattggtaaatgaggaatcaataatctaatcaaaattaactgacaatagtttttgttaacacttttattttttaattttttaatcacaaacttaaaagtaaatttttttaaaaaaaaaaattgattttgaaaaacaaaaatgcgttctataaccacttttgttttttaattttaaaaacaaaaaatatgaattttgaattttttttttagctttttctaaatacaaaggatcaaataaaaaaacacattaacatcttataataataaagtaatttgaaatatcagaattcattatctatctataagataacacaaaactgacaaaaccatacataataaaataaaataaacatatgaactatttccaattttgaataaaatattaaaaaagtcctaacaatagtcgattttgtatatagtattttaacttcaagaatctcttcatctccatcgataaatatgtcttttttctccatgtttttgagtctaaatagaagcttcgccattgtcgataataagcacttcactatctattcttaccatctatttaatctacatgtaaatataaaactattcataaaattcctaaaaacaaataacattacaagactattagaa

SEQ ID NO: 183516 - DNA, 672 bp, Cannabis indica
tagctacaatatacaccgaaaaaaaactaactaaatcttttttcgggatatcgaagtacatagaatgtaccaaaacaactttttaagaagtttaatacagaaatttttaatttttttctaaaaattacaaaaaaagaagtttattgaacaatcaagtggccagatttcacatttggaaaaaatccttcctcttcttaactactctacgtaagcatgtactagggttaattatttttttcttaaaaaaaattaaaaaaattctagagtgcacaccgatattaactcttatcgatttcagcatttggtagagttttttagtcattttttttataatcgtgtacgctgtagctatttaagacatcatgcaaaatattaaaaaattaaaatatatatatataatacactaaaaatatggttcatacagtttattacacgcgtgacttttttattttataaatacattagaacttttatctaagaatacacttgggaccaagtaaattatattataattaagagattataactaaatagagttatactaaaaaaaatgtaaaacacaaaaaaatattaatggaacaacaataacaataaacgatatattgatgtgcctttttataactggttagagtttttttatcatttgttaaactaaaatatgtgggacttaat

SEQ ID NO: 183517 - DNA, 605 bp, Cannabis indica
atattaggagtcagcatagggtctttgattggtaaaaggtcgaatttgacctgggcttttgattaatctattgctgtgtgtaggggcaatataggaataaaaattcctacagttagagaagaagaaagaaccatcaccggacacaggaaatggggtggacgcccaccgatatcctatcggacgaaagaaccggacgaaactggacgtagacatcatgttaacaagtgtattatatattaattaaaaacatacttaaaaaacgtttgagaggaaaaagtactgttatattaatcattcaaataaaatgtaatacaatagacaaagttaaaggtggacaatccttcaattagaaaaatctctatccaccgatagagtaaattaggccaaaatattaaagaccttactctaaatataaaattagaggtaaatttaattaattgattaataaagttatatttttcaacataccctaattttctatatcaaaaggaatgaaaaactaaataaaaactctctaaatattgaaaaacactctctctctaggttttcttcgctcgaccctctctctctcaaatctctcaaatctctgcagctgcaggcgtcag

SEQ ID NO: 183518 - DNA, 539 bp, Cannabis indica
tatattatactccatcttaacatttatataaatatatagtcttacataaatataatactaatatatgtagtctgaattaaagtagactagctaggtctgcgcgcgactgtgtctaaggctcactaagccaaaaaaatatataaaaaaaaattaattaaaagtgtaatacatatataataatgtagttactatttataatctactttttttaaaaaaaaaaaaataaaataaaatactatttataatttcaaaattacgttttattattattattgcatattcgacgtatttttaatctttgttgttttaatttattataataattaattatgctgcgtaattatatacacattatttgttgtttatgagaagaagttttttctataatgataattagttgaaagaagaataacaaaaggccgatgatattaagaaaaaagtaataaattttctatgaaatttggtgatataggacaaaaattaatcttcgatctcttgttcctatatatatctttgtgtaattgtgtcatctacatata

SEQ ID NO: 183519 - DNA, 678 bp, Cannabis indica
gtcgttgtaggtatataaaaaatctaaggacaggtactactgtaggtatctaataaataatatatagtaatatttgtagtcaagagctagataatcagttcccaaaattaagataacctagtaagactttatattattaggtaacaattaggaatgtcaaatatgtatacattttctctttatcattttctaattgtcttaaaaaatttgttggtaataagacaggttactagtggtatcaattttattactccaaataaatgtaactatataatagtcacgatcgaaaaacattaaccgaaggaggaattggatacgctagcttgctctatatagcaccttcaataatattctttattttttggttaactaaaatagctagaaaattaaaataaagtcacttttcttattattgatccaatcatgctttttattttatttagtatttaattattttaatagtattttataatttgaattttttaaatataaattaattttgtaaaataataaaaaaagtaataataatttggaataaaatactattaaaaaaattagcaaaaaagtaagaaaactctctacatttagagagctccctatccttttgtctattatagagcatcatttttaggtatggtttgtgttgattttgaatgcatgaaaagttgagtttcttgt

SEQ ID NO: 183520 - DNA, 625 bp, Cannabis indica
aatgttcacttctgttagtatttgttagtacccaattcaattctgtcagtttttgtacacgtgtacaactcatattaattcacccatttactaatatgacttttgtttttatctcatcattttacatcttagtaaataagtgaattaatctgagttgtacgcgtgtacacaaattgacagaattaaattgggtactaacaaatactaacagaagtgaacattgtgcacttttgccactaaaaaaaaaagtttgggtacttaagtcatataaatatgaaactttgggtacttatgccgctattttcccaattatccttatatataaaagttaaagaacaatataaatagtataatttgtttaaaaagagctttaaaatgatgaagaaataatttagatcaagctagcatatgacgtattgcgtgttttcatttttatgtaatttatttttttttaaaaaaaaaatcaattataaagcatctatttgtaagtgcttaattaaattagttaattatcatgaataaataaatatttcttttaatatatattttcctttttacattctaaaaaagtacaaatataaataagatatattctcatcaaatatatttttaatattaaaacaaa

SEQ ID NO: 183521 - DNA, 542 bp, Cannabis indica
aaaacttcaaaggcaatacaataataattcaattggtatttaacggtgatatctagctaatactttaaatttacaaaaaaaaaataaatataaaaggattttaccacaaaaaaaaaaataaaagggttaagtgtaaaatatcaaaacagagattttactgcaaataaccctacaaaatatggtcttatgtcaatcaaatttttatgtaattaaaataaatttattttagtaatatatcttgaaaataaataagattaaaattgtgtttaaaatttaaattttaatccaatttattatcttattaattacattaattaaaagaatatatattattttattttcatctatatataatcctatatatacaatcttattatatattctttcatttcattctaccccttattgattttaaaacactctatttattttcaaaacatagataattataaagaaaaaaatttgacaaatatttttgtatgacaaaacaaatagaaggtatacttaaactttttttttggggtgcattataaaattttcta

SEQ ID NO: 183522 - DNA, 679 bp, Cannabis indica
taattaatttcttttaatgttgaagagattggattttaaaattggtatcgtttgtacattatacttttgtgtattgtattttttttattatgttgttaatgaaactactttttattctgtatcttttaataaaatatttagtttatgtaaatgttgatactagttttaaaagtttgtattatttttgttggaaattattttaccaggatcttagatctactcacaagtatgttgattaacaccctaaatatgaacttctaaaacgattataaattaaacacatataaagtatgagaaaccttacattgggtgcagcggaataaaatgtctccttccgttcagatctctaacccttgtatcctttctgtcgcagagtattatcaagatctgaacctggatctctttctctcctttctttagtgttgaatctccttcttgttgaatgtctttcttcacgatcttcctcactatgattgaggtatcacttgctgtgtgtgggcactactctatcactaagaggttcgaaatttacaagagagaagaagagagtgaaggtggcggctaggtttagagagagaaggctcaggtttttctctgaaggaaacaagatgtgaaagtgtttatttcctgaagccttcactatctatttatagcattccacatagggttaggtttgaaa

SEQ ID NO: 183523 - DNA, 623 bp, Cannabis indica
atagaataagatgctcttatttcttaaactgacaacttaacctatttctgataacttttgtgagacaaatagaaaatagaaaagagccaccatccttatttaaaaccttcttattctcttgaaattttgaagcctgaagtgaattgaggagttgcccacataattcaagataatactcaagatagtgtgaaagattgtgtagaattccaacaacagaaggagtctccaggttcagatcttgatcatactctacgacagaaaggatcaagggttacagatttgaacggaaggaatcatttaatcatgatgtcacaaatgtaaggctttgtttgaacgaaaggaatcatttaattctgctataacaaatgtaaggctttgtaaggctttctataaatttttatgtgtttatttcattgttttaaggaattcatatttaagatgttagattatagtgatataatcaaacatacatgttagtaaatctagatcctagtaaaataagttccaacagttataacaacaaattccatgaagaaaaaataaatgtaatagtataaaaaagaatacatcaaagttgtcaaaaattaagtaaaaaaaaaagaaattttagaaatacgaaaaac

SEQ ID NO: 183524 - DNA, 1143 bp, Cannabis indica
ttagatagagataataaaaatagggttaatttcacaaatgcacaaaaacaacaaaaatacggttttacggaattttaaatatttttacgatttttttgattttatttacataaaatacggtctttttatgttgaaattttgttcatttgttgttaattttttgttatatgtatgttattttttgttgttattttcatgttacttttatgttgttttcttgttgattttatgttgttttcgtgttattttttggaaaactgtaaaaatgtaaaaaaaaattctttgaacgtaaaaatgtaaatattttacaaaaaatagtgccttatgtaattattcctataaaaatattaataatagtaaatacatggacttgtgttgaattgtaactttattaaaaatgcttaagaaggtgtgtggtgtgtgcactcgcgtcacctgtccttgtttaacacaaatgagtggtttttctttacacaaatgatttaatgtgtaaaatttattttttttttttgaaaagcttcaatccattaaactgccaaatcggcaagaataagagtttgaagagcagcaggcgctgtcccttctacaaaattacaacctgaccaaaaacaagagttgcgggcaatacaatgtgcaactctgttagcagatcgcttaacgaaacaaattttaacattgacaagagaaagtaaaagagtttgacactcaacaaccattaaaccaaacaccgaaggcattcgaatagaactttccaacgcttggatcgaaagtaggctatccgattcaatgacaacattttgaatacctttcctcttgacccaacttagtgcttccttgattcccataatctcggccaattccggttgagtacccccaatcacgaagctagcagtagcctcaatcaaccgtccaccatcatcacgaacaaccatccctgaaccataagcattttcagcagcaaacacagccccgtcgacgttaatcttagtcatatttgcatccggtttcgaccaacgctcgcttccttcaaaagtaccagccggcacatgaaggggatcaaacttccttgattgagcgtacttccattgagcaagaattaacttcgcggtacatactacatcagctgcagaacaatttttttgg

SEQ ID NO: 183525 - DNA, 578 bp, Cannabis indica
ctatggctgcgttaggttggaggtaatgaaatgaaatagaaataatttctattttattttttgttttggttgtatattaaaatattggaatgacattttaatagtaatgtttttttctactattttggtggaatgactattccatttttaaaaaaaaaaggaaaaaaccaattataatttaacaagagaaaaatttttaaattgatttttttattgcattttaaattttatttctattcctattcatattttcatttctatttttatattttcattccttccaatcaaaagccacctatatgaataaatattatcgctacctttaggaagaaaaaagaaatatatgaataaatatctatttgttttttctcctttggaagaaaaaggaaaatagatgcagtttttagagaattagacggatgaagagttgtaaaaatgtggagaaactgatggtagttgataataataactatgttaggatgttatgtgttagagattataatattaatcaaaaaaattacagttggtctccatatgtaattttgactttccaatagtccgaacgaaggttcatcact

SEQ ID NO: 183526 - DNA, 944 bp, Cannabis indica
tttttggggttctgcaacttatctagagaagattgaatatttactttcataattccaacaacacaatgaattgtatacaagaaatcaacatcccacaaccacttgaggctagctcaagtggccataggtgggtgtgtgtgtgctggaggtcctgggttcgagtcccaggtaaaacatggttgtaatatataaacgcttaaatcaaaaaaaaaaaaaactcaacatcccactttcttattaatcgaaaagggaagattgaagatccaatattttttttttcaaaacaaaaccccccaaaaaaaaaaacctaatcctgaaattaaacgatttggtacccactatccagccccaattacttcatccctcttcttggtgcggtggacgtcgacgatggtgtgggagtgggctttagagagtggtttatgttggttacaaagagctcatcactttcgttcatccatggcgctctctgtcagaagatctgaccaaaaaaagtgaactacctctgctcgccgtcgacaacgatctgaacaaatctaccacttctatctccctgtgatgtttgttgtcgaagtctcacccgccactgactttgacctgggcgatttcaaagtccgataagccaacctttattggtggtggaaggcaataaagaaagaagacatggaatagagtttgacaaaaaaaaaatttgttggttgaacaaatttgggtttgtgaatgcttgaggatgatgaagaagactgagtcaaagagaaaataaatgaaaaagaaaaaataaataaaaaaaaattaaagttttttatttatttattttttaataatttatttatttttcaaatcatttcaaattatttttaattaaaattatgagttggcctaataatttttaaacatgtggcattattgtcagtatttaataggattgttaaattaggtatcaa

SEQ ID NO: 183527 - DNA, 740 bp, Cannabis indica
atatcttaatttctacatttaatcgaagatttatacttttttagattctgtgttttatatttttttttaatttcgtgttttaagaaatttttttgaatattttgttttgtaaaattttttagtcaaatatgagtagtgtgaagaagtctttatgcttaaaaaaagaagtttgaggagtccaaaacaagtaatggtacaaaaatctaaaaaataagtataaatcattcaatcaaatatatgtgttttgattataaattcatcttgaatattttttcataaatcagtatacatttatttgggtgaaaaatctaacaaaattattttaggtagggttcaattcaagggcaaatagatagtgttatttcaaatactaatttgaaccttatgttttgtaaaactaattaattaaactatctattttgttaaatgataatttttttttttaaatgtcttatggtaattaagattttatattttctaaaatagtataaaataatattttaaactcaatttttatcaaaataaaattaataataacctaatcgaaatgtgctgtaacattttttttttaatactacatctgttttcttagaaattaatttagaatggttatattaaaataaattggtaaaaatgagtttaatatatgttttttaggtaaatttaccaaatatgcgttaatttattattattttttaaaatttatgttatatttttctattttatatctcttctaccaa

SEQ ID NO: 183528 - DNA, 820 bp, Cannabis indica
gaaaccatcatgtgtcatagcatgatatgaccccccatactatctatatgaataagactcaaaacatgttttggctatattatggttagaaataaagggaagcttcttttgtttagcataatgacatgttgagcaatgaatattaagagaaaaaggttcagtaaaatttaacactttattcaaaggaaattctttgatacaaaaagggtgaacaagtctataatcccacaaagtatcaaaatttactgttgaatcgaaaaaataaaaacagtgggattgccatatgttttcaagaagaaaaggtctccatgtctttcacccttcccaatcaccttcttcttctgggtgtcctgaataatacaagaattatcatgaaacacaaaggagcaattagctgaagacatcaaggctgtagcagacagcaagctatacttgaaatttggtacatatagaacattaacaagaacaatttgaaaggaaatcttaatagagccactgcaagaaatcttgctctttgtaccatcaggaagagtaacagtagacaatataagtttatgacagatgtttgtgaataaatcaagataaggagaaacatgatgagttgcacctgtatcaataattcatttgtttttatgactaaaatcagtcttaccagaaaaatttgatactaaaggtcaagttgaaggtcctgtgttttcagtgtggaactttttgggcaatttatggccataatttcctgacattgactgagtgaaagcaagccaaggatcttgattagctccatatcctttcattattatcattatgtgtctaaaaaact

SEQ ID NO: 183529 - DNA, 545 bp, Cannabis indica
tggtgggtggttggtggtcttggtgcctgagtttgagtgtctcagtggtacgagaaagaggaagagagagtgaggaagagaaagagacagagagaaggaaaatgaaagggagggtatttgagtagaaattgaaaacatagcattaaattgtataaattaattagaagtctaaattttgttagagagtatttttttaagcatttaaaataaaatttccctaaaaaaaactcccaactaattataactcggtatcatcacttttgaacaccttaaggtgccaaactatacaaaattgaggacaacatagctccgtcccaccacagtcgtgctgtaaattttatcaaacaacacttaaaaagcataaactatttaataaatacaattttggacagttaaaccagcactaaacattaatcacaacaagatccaacatataaaaaccagatagaaagctcacgtatatacttgtactataatgtttgccataaaatgcaaaatttcccttgtaactaacaagaccagttttaggtaatttcatagcttta

SEQ ID NO: 183530 - DNA, 819 bp, Cannabis indica
  modified_base (768)..(768): a, c, t, g, unknown or other
gtgcatcttaaaggaaatgtgatgcaaagaatgtgcagcaaaaaaagacaagttcatgattttgtattatggcaaaccacactacagaaaccaaaagagaaactggaacgaagagaggccactagtattccaaatctgacaatgccataacaatcccactaaaacactcaatcataacaaacctaaatcacttaaataagtacggaacctacggacagtgaaaacctctaaatcaaggaaaacggctacaaatccatttacttctgaataatgtaaggtcaacctcataatttgattttcacacttgataaattaaagactaaaggtcaatggaacttaccttcgatttcagagatagaaacaagccttccatgaccatgcagtagttgtctcagtgtgtttgagtgacatttttcaatacatcgggcccacacactgtccaatttttcggagtttatgcatcgaatgatcatatttccaactgtggcgtcatcacatgaagctgttgagataccaacatccatatgtgagaatttggaattgaaacttaatcatcattttgtgaagagaaatttcaattggaattggaattaccatttgctttttttatgacgtaacaggagaagttgatttatgaggcagatattgaacatctgacttgtgtctgtacagattagcttctctggtaaagcacttgatggatcatcatcagttgtttttatagtctctgtctccctactcgctaccctgaatgattaggggtcaggngaaggccatgaaccaagttgtaataagtagcagtgaaccacgttgagtcgt

SEQ ID NO: 183531 - DNA, 710 bp, Cannabis indica
aggtgcaggtggatgagttggttgagtggctcggacagatggagttgtaggcactagagagtccattgaaaatagcctcaatgtgatcctgtgcagacattggatgaccgatcgaagcaagtaaatcaacaagactcttgatctttaacaagaaatcgcttaaagaaccttgcattctggagtttcttaactgagtcttgtattttccaatgtttgcacgattcaatgctgtgtaatactcacgaagagttccccagatctgagctgctgtgtcacatcccaccattctggtgagaatcttttcagacatagaggacaagagccaagatacaagaatgctatcttactgatcccagtgttcatactcaggtgaagtttgattgagcaatcgatcctcattggtaagaaacatgggaggagtgagattcggatcgaggtgatgctgaagcctacttcctttgattgctgcaaagacctggtggtgccagggaaggtaattgaattcatctaaacgcactgaaagtgaatgagaaaatgttgcaggagcagacttgggaagattaagagaaccattattcggagtagctgcttgagcgaaccatgatttgcagccatgaacgaaaagctctgagtaacagagaaaagatcaagaaaagaaagagacaagctctgaatccaatgtaaagattagtagaagaagacaggagaag

SEQ ID NO: 183532 - DNA, 1069 bp, Cannabis indica
tatacgaactccaaatgagttgattcaagatgcgttggaaagaagaaaaaaaaatctaaaactcttatgttttaactttttccaaaatctgatcagaacatagtcaaatttaagcttgaagtttcagctttattttcttgcagaattttttctattctatagattgttgttttccgaaatttgatcaatttatacattccaagtgtgaaacctgaaaccaaagaaaacaagcataattccattccaaaaagaataataaagaaggaaaacaactataaaaagtgactcaaaacgtaagctaaaaatagcctaacattacctcagcaagttaactttttaaagttattagaaacttggtatagcaagttacccgttttgtcaatgctcaaaataataattttttattggctccaacaatggcgtgggatccatttataactaatccatatatatatatgaaaaacggtccaagatccaaatccctttcataatttttttttttaaaaaaaactaaatttctaattaataaggtttattaatgtgtatagctgacttggaccccggactccagcccccaactctaaactcagcttttgattcggatcttggattcgaactcaattttgaatctataccctgtctaggatattggggcctaaagatggggtccgaatccgagtttatgctggagtttgtggcccaaggttggagatcgaatccaagtccagggttttggttgggtcgaatttatagtaaagaattttacataaatttttaatacaagttaataccaaatatagtattgtattaaaaatagtaataaaatattgatacaatcctagacaatattatacaatataatataatataatataatataatatatcaacctgaatgactattaagtttattaatcaagtatttataaattaataaataattgaataattttgactcacatgcatgcatacaaaaaaataaagtagggatttccaacgatgatccctaacaaaagcatgaaaaataattttatttgcaacatgatgcagtaaatctcgtataatgatct

SEQ ID NO: 183533 - DNA, 641 bp, Cannabis indica
ggaattgggaaatggtggatttgtagaggtgtgaaaatggagggagggagggagttttttgaaagtgaaactcaaagaaagcgccattttttttgttttgtgtttggtttttgggttcggaaagtggtttttggacaaaacccaaatctagtttttgcgcgcttagacagaagagagagaaaaatgatttttttaattaatattctttggaattgggcatcctatttagatttttggttccaaatatttgaaaatatttgacccttttgggaaaattatttggtgcttttatatttctattttcaagtttttatattacgagggaaatgtaatgggcaatagagagtagagagttcacttttaacaccaaaaatataaaaagaaaattataaaatagattaaaaattttaaaaagattataaaaatactttaacaacaaaaaaaaaaaaaaaattattttactctttgaaatttttttatttatagaaatatctcttcagtaaaaataataaattatttttggttgttttatagttatattatagttggcataaagttatttttttagttgtttcacattttatttgtggttaatttatagttgtcgtgaggttaatttctagttatttttagttggtttc

SEQ ID NO: 183534 - DNA, 811 bp, Cannabis indica
tgtggaactgacaaaactttgtcatgtcccttttgctagagcctttcttcatggaccttggtttcttgtacgcgatcagcgactgagttgccatatatacactttctatatcttcggtctgaatagcgaatgtagtgtacttggcatgattctcctgggaagtctgtttggatttgccggtgaactttcctttcttcccattcccttgcttgtgattgctgctggaacgcttgccacttgagcttgaattgtttgagttgttgggaagttgagcggatgttccagtggaaggagcctttgacttgccctgcttttgttcaccttccgctcgttgaatggcttcttcgagcttgatgaagccttcggctcggtcaagaaaatcactcattgagtctaccgacccgttcttccttatatccttccaaagttcaccgaggaagtgtatctctaatggcgatgcatcaacagtatttttaaaattgtgtcaaaattgatacattacaaaaattatactaaatttagcacattatataccataatctaatatttttatcactataaatacactattttttatttatttttatattttttaatattttattataaatatagctatatgccataacattatattataaactatttatactcttttttattattttcgtatataatataataatagaattatatttttaatttttaggtatttttatagtaagtattaattgtaacataaatttagcatgaatccaattttataattctgcattggagtgcaatgctaaaattaatacaaatatatcac

SEQ ID NO: 183535 - DNA, 753 bp, Cannabis indica
agtttttaaaataatttttttttacacattttttataattatcttatttttgttatacatttattaaaaaaacccttaaatttacttatatgtaaataaatcatatataatctaatttcttctattattccctctccacttcattgtagtgcactagcattgccgaattacttggactacataaatcctatttttcaggaacaagttgtcttttttttttttttttgaaaagagaagggacgagtgcttgaaactaaaacaaaatgtacttcttagcaaaatatatatagtagatttttttctccattttagatggtcttttataacttgttatgtaattagtttggtcctaattgatattttttctatagaaatttactttatagtatactaaaattaaattttgctaaaaaactatgtgaaacttgttgtactttaatttttatgaaagattatgttttatgaaaaaataactaatgggtatttttatcagcattattataagtaacctatttacttttaaaaaaataaaaaaaatcttgtaaaactcctcagtttgggtattattatttttaaaaacccgtacattttgataaaatgttttagtaaaaatactcatcaaaaatttttattagtcaaaataattcttttaaaaaaattattaacaaaataagcatatttggtcacacaaacaattaaatagtactatatattacggaaaattctacaatgcactccctttaaatagatgca

SEQ ID NO: 183536 - DNA, 602 bp, Cannabis indica
atagaaaaagcttaaaccttccatcattataaaaaaaggttagcagtagccagaaattataggtaaaggctcatttgtcataagctacttagttacaataaattaaaaaaaaaaaaaaaagaagtaaatagtaacataagtacccaaagttttatgtttttaagcggcataaactcaatgtttatttttaacggcataagtacccaatgtttgcaaaactgtaatttacttcttttaataaattcagaagaaagtctgtactgacaaaactggaaaaaagaattattccataaaagtacaatacaaaatcatattcctattttttatattgtaaattatttcgaatttcttaaaattttatagaataccttgttataacgtaaaaattagactaaaaattctttttgataccgaaacaaatagaagatgcatcagtacatatattttaaagggtcttttgtaaaatcactcgataatatttgataaacttgtttatcacaatcctgcatgcatcttgaaagaaaaattgttcttttttttttcattaacaaattttacggtataatcagggcttagggaaagaaatatataactgattaaat

SEQ ID NO: 183537 - DNA, 517 bp, Cannabis indica
aatagaagacaacacactaacatccgctactaaagggtcaaggtcaaagcaatgagcatccttgctatccaccatgttaattgcttgtctacaatctgattccaagagacagttagagaaacccgactccaaggccagcttgatcccagtcttcatcgctagaagttcagcccctagaggagaagaggagttcgaaaaaaattggcgagccgccacaacaatgctgccattggagtcgcgaatagcaatcccaactcctactccaggatccttgccgattacactagcatctacattgatcttaagaaagtttggagggggaggggtccatttaacacttctgtcttggctcgggcatgtatggagggttgtctcaatcttaagctcatgagtaaagtctaggcaccattcaacaagagctgacggagaagggatggcatgaccatgactaaaggcccccaccacttcgacaaaactatattttttcaaaaaactaaattctgattctctaactaaa

SEQ ID NO: 183538 - DNA, 742 bp, Cannabis indica
ggaagactagtcaattatttatatattaatttaatctaatgtaatttgttgtactaatcaatagaattaatagaatccaataataatatgaattgaatattcaaacaaatctggaccgttgatttgaaatagatgagacccgacaaactatttagttgaaagaaagaaagaaagaaaggggatttggggaaaggtgggggtagtgatggggttagtggacaataataataaggaaagacccacttttccctgaacctgatcacgcctaataagcctgctactgcttccaattatggtttggctaccggcggcgcctatttttgccacttgcaatttcgaaaaatctaaatcttaattgctattttttaaggtaaccattgacttgtcacttgtgtttgtggtatttttttttttaaaaaaaaataataaatgaaaatatttaacgcatgcccaactaatatattgtttttctggagtaccgacttctaatataattttgctataaataagctaagtgaagactttggtttgttgatttggacttcacatttttatgtaggtaaaattacaaagaatatagactagtgccgttctttcattaatttaaatagtattattaatggttcaattttcaattttcaatttttttatgtttatttatttattttttttatatatatataagtatgtttattagagttgctatgtatatatcattgaatgaaaaaatattactttttag

SEQ ID NO: 183539 - DNA, 435 bp, Cannabis indica
ggtgatgaaactcataataattaaattagaagcgaattaattgcatgcccaccaacttgaaaggaattaatattatagtatagtttattcaaaaaaaaaaaaaatattatagtatagccagagcatatattctatatagactatagcacatatatatggaatcagatttcattccgccaggtgatatgactctcttagtaaaaaaaataagttagctaggctaacattttttttcttcggtataaatagataaaggaccgacagggtcagtgttggagttataggaaaggagaggtgaatagtgacagatattagagagaatttttgtttttttagaaaaatattatgttatgatcataaattaaattaaagaggtaaagtaaaattcatttagctttagagtatatctaattaaaatatgagtatcatattaat

SEQ ID NO: 183540 - DNA, 655 bp, Cannabis indica
gttattgttatgaacctctgcttcaatgaccatttgttggaatgtataggaagagagaaatcaaagatttttgtgtagatttgacatgttcgaagaggaattctgggattatcaataacatcattgtgtcttgtcaaataaataacttacactggaagacagtccggtggtatattagaaagcccatcattcatgatcacacgtaagctctgcaagaaacatttaatttgagctgaagataaggaagtaacaaatctataaaagaagtggtttcatatacgtatatgataaatataaatccccaaagctggatatctgaagtctttttctaacctggaagcccagagtgacaagttccttctctgaagcatcagctaccgaccttggaaatgaaaggaagtggagaggatcaacttttgcaaataagactcgcaaagaggaaaaaaatgaaaaaatgacacgaaatatggtttttctctataagtttattaaatatgggattaacattgtccattttttatggggtttttcctatattttgtttagaatcactgatgaggtactaacagcttaccattaaaataaaaaaaaaaaaaaaaaaactaaatttgtggctaccactctgtttttagtaaactttactaaaaaacagtgg

SEQ ID NO: 183541 - DNA, 878 bp, Cannabis indica
gaaaagaaaacagaaaaagagacaaagaatgaaaataacaaacacaaactagaacgagactgaacacaagaccaaaacgaaagagaaaaagactcacagacacgaagcacagcgagagagaagaaacaatcaccagacaccagatgaagagagaaaacgcaagagagaatcaaacaggcaagagattggttaaagaccaagctctaagaagagagaactggtttaggaccattctctacaacctgtccaacataaaataattaattttcaaataagggttattccaccaatattaaatagttaaaattttgattatttaatagtttaaattttaaccaacataaagtgaaattttccatttctatccctcctaaatttcctttccttcctatttcttgttaagctatatgtgtgatatatttgggaagaagaagattcaagctcaatcctgcatcactgcactcaagctcaatcctctcctgctttcttcttcttcttgcttcgttctacattaggtatctctctctaagatccccaactttcttttcaatgatttcttacctctttgtactttcatatttagatttgaaaccaggccaataatgatggttttgttatatttatctaagctttgtaattactttggtgatacataattttcaatttgtgggttttgatagtgttaacttaacggttctcatttggcttaaagctcatcagtaacaatggcggtgaccctacgccgccttctcacaataactccaaaaaccccaaacattttccactttctctcatcatcttcccaacccactttttcttcctcacccactcaaaacccagaaaacctaaacccaccattaccagagccccacatccct

SEQ ID NO: 183542 - DNA, 589 bp, Cannabis indica
atttggtgtaaatttttcaaataaaaagataccctaaaatgtaagtgtaaaataaattaaaaaaataaataaaactaattaagctaaaaacaaaaacataaaatatgggattggataataagtttataaaaatatggcatatcaaataccataaaaaacttaaatgtgaaaaaatgccatagaaaagtggcaaacctaaaaatgccatatttttctaactttgttatgaaatcccatatttcatgtaattttcactaagaggaaattacactctataccttttttatattatcctcttttatttttaccttcttttttaaagtctatcatttttacctctttttttaaacattgtaccaatttcgcctcaatcacttcaagatactttctatgcgactctcttatgttagggtattttgggtacaattaaatataaaattagaggtaaatttaattaattgattaataaaagtggtatttttcaacttaccccaaataataatgtggtgttgtaattgtaaataactcctctagggtttttgacactttacgaaactgagttaggagaaaaaaatataaatttgggcat

SEQ ID NO: 183543 - DNA, 693 bp, Cannabis indica
gaggacatgaagaacacatttatagaaccgaggagagaaataatgcaggcatgcgagtcattcagcgagaacatgtggtgaccgcgcgaacatgcgtgctttatataaccttgacaccatggtgtaaccctcgaggagaattgaaaggtcatccaataacaaatcccaacttacaatattacaaactgaaatttggggagtaatattgtccgtaatttttaccaagatatgtgactatttgagaggtagccacatcttcaatcgaacttcaaaacactaaatatagtgtagtttcacatatatttacttccagggccgtctcaaatatttttgagacctaacaaaaaaattataatttgtaaataatattttcaaatattatcatattaggaaaatatattttacataattaagcacccaaaatttaaataattttattaaaattgttgttatttccaatgcaacttcaagctaatatcaaatattatggggaaaaaaaattaaaagacattaaataaggaaaagaaattaaggaaaaaccttttttttttatttggaataacaaattagtggaagattgagttaaaaaattcctaaaaagtcatattgggcctttttaatttgtgggccctgtgcattagcactccttgcacgggttaatggccggccctgttttcttcaataggacactaa

SEQ ID NO: 183544 - DNA, 622 bp, Cannabis indica
agtgaatatgtcactatcaaattggttaccattgtccaaaactatcttgtgcacgtacacactcaattggggccatgggaggacctgttaattgggcttatacttacaagagtcaacctcacctaatacaagacacgtttgctttaatcacttgagtgcactcaacaggatagagatccctatcactagtttattttatcgtggctctttgtcctaatcggtgtttgcccttataacttacttttataaccctccttaaaggaagttgttgaagttaagatgcaccaatacatctttggtgggtcttcaagatcctttcaattacctatgctatgttgaagggatattgatatgatctgatatgattcgatcgattgcgtaaagcccacggtagcaacagaaccacataaagtatacagagaattgtactggctgtacaggctgggcctcggacttgtgtcactctagggtcattctagtttgactttccctttctcctaactgttggattatctagcttagtacacgagaacatgcatgccttgcacgataacgtgtcgtgggggaaaacctctgacattgtacatgaaacagcctagtctctaggtgtgtagcatgacac

SEQ ID NO: 183545 - DNA, 615 bp, Cannabis indica
acccccttaaaaaaagccatgcacccctaaaagaaatccatcgatgactccttattgtttcggcatttggacgaattttttattctatttatttcatagtcatctacgttggagtttatttactggaccttgcaaaaatttttgaaaaatttagaagaacttattacacagtaaatatgattgaaatggtatgttacacatgagattttttttattttatacgtgtgtgaaatagactgtttgaacattatttttgacgtgttaagtttttctcaatttttgaaaattttgtaggatgtctaaaataactataatgaagacgaccatgaaaaaaattaaactattttttttttttcagatgccaaaacagataaggaatacataagtagctcccttttaagggggtgtataataatttttttttaattatatatcttacttttattaattatgtttaaacaaaaatatagtatgatataggttggcttcatgatactaaaaccatctagcatcttatttaaatgtaagtctacttaaaaatacaataactaacaaaaattcataaaaatgcaataataagacaaaagagataacaagtcaaataattatatctta

SEQ ID NO: 183546 - DNA, 1074 bp, Cannabis indica
tccactatgctgacaacactataatcatgaacaaatacatatgttctagacttaatagaatttatacattaaatataatcatgaaataaatcatgtgaaccatgcaacatagaatgcagtttctgatctttattaattagtaaatctgattatattaaaataaattttatttagggcacaaaacccaacaagatcatcccagcctccgtgctagtccatcttcgtctagtgacgatctttcaatttctagtttcaaagattagaaagtaagtagcgagcatacaccttccccggaacctgaggtgcaacactatttctatcccgaccaaattcatggcgaaggatacgaccatttcatctgggaacttaaaaaaggttggagatgctatctatttgctagctggacgtatagggtccatccgagcgtagttgacactttacccaagggctgcccaatttcagctactagagtaaattctatttccaaatttattgttactattgtaaggcacacttctaataaaacttcgtccaaacgtaaaatgatggcacaaccaagtagactgtaaaaaaaaccttcaatctgtcgaccctcatatcgcccatctagctactctagtccgagcaaaacaggccccctgcggtcgaggacgaggagactattggagatgttgaagtccaagaggtggaagaccaaggtgaggttcgtcccacaactccttctaaggccaaaggcgatgaggaagagggggtagctcgggtgctgccttttggtggcttcaatgaaaaaggagaacctgtttcttagacaggggatgtcttggaggctggctgggactacatcgaggaggagtacaccgaggctcatcccataaacaagagaggtccaagggaagttcgatgcatctctccaccatccgtcctgtaccatgaagagattgactaatcttttcgatgatggtctcttggggaatgttgaatgcttccttccctctcccagtctgctggctaccgaccctagagaggtttattgtgcttggttggggcctcacgccaaacagggtgtaatgctac

SEQ ID NO: 183547 - DNA, 743 bp, Cannabis indica
aattaagatatttatcttaattaaaatttatatttttgctaaaaataacatggaatttttgaatagtttggttaattttttgtttgaatagatattttaggtttttctaaccataaaattttcaaatttaggatattttattttatttatttttaaaataaaaattgataatatcctaacttataaaagtatcatattttcattttttttattattttagttaaattataagatttgaaatatctgaatttttaaattaagatattatgttatattatcttattagttatttaattaattaaaattatttaaataaactagatatttgaaaattagtttgatttttgaatttaaatgaatttaagatattttaagaatttattagattttaaatatttttataatatttttttaacaacttaattttaattcaagttaagatatttttttaaatattttattttgaaattgaaatatcttaaccaactttccaaatattgatacattgtttgtttgtttatttaattgtttattcaataaaaaaaacttaacaaacctattatttatttgatttaaattgctatgattaacttgttgatagatccaatatttaattttaattatagtttaattgtcatagatcgataataattcgtagcataccacaagccactaggtttagattaaactcaaaacctcgtaatactaggaacatgaagtttgttaagtccattgatagacta

SEQ ID NO: 183548 - DNA, 749 bp, Cannabis indica
aatggctttaaagcaattcgaactaaaattgggcacgttttccttatttataataacaagagactagaaactgttctatcaactaattaaaaaaaagtgacatttggaaataaataaaatctgaccagaaataaataattattttattgtgtgaaacatatatgagaagcaataagttataaagagaggaataaagaattaagaacagtattggttttattattctgttcaaatacttggattttattagttttgaacgtggaatgtgatcgaatatatatatatatatatgtaattacttttcattgaaaaaaaaaacgttatattcaattgaggaaatgaactataaatagtttatttaatgtacaaaatataactacttcaaaaaaaaatatatattatattgttaatgatttgttattttcatggcacacaaatattttacgtgttaattaataaaataatatcaataatatatcaatcaagtagtgttatatatatatactaaaaaaaaattagttttaacatgttaagaaaatatttataattagtcataattttttatatttaattacaaattttattgtaactaaaataaattttttgttaatattttaatttatatatattaaaataattttatattattaacgtgtgaaaaattaaaccatatatatataacacgaataactccttttattatcaattgataattttgtagacgagaagcaggaaccacatacactttc

SEQ ID NO: 183549 - DNA, 774 bp, Cannabis indica
acagttacatagcaaaagggcatattcgatggtctatttacttgatatatagtacaggggaccggcgtaggaggggagggcggccggggcgtaggcctcaggcaccaggactcccaaaaaaattaaaatgatattatatataagaaaaatatatgtatatataatatatatatatatataaattttagttcagtaaattacattatatagatatagcacaattgattcagaggattggatgttattgatgaggcgatgggttccatctttctccttgttaacttttttttttttgttttttttttaatttaaaggcgttttgttttttaaaaaagatataggcatattatattataattagtcattagtttaaaattgtagagataattaaggcttaaatattttatttatttaaaataagaatgtaatattttaaaatattttagtgcattactcaaaacaaatataaaataatatttagatcttttttattttttgctctataaggaagtaataaagttttcttcttgatacaaataaaaataaaaatgtattacctaaaaaaaataagataaatattatgttttatatatttttgataaggagcaaatattatatttagtacaatgtttttagaaattactctaatgtatagtgtatagtagtatttttaagtactaactgaataaaaaaaaataatcacgataataataaataaatcatatatttcaaaaaaaataattattgagaatattataacttaaaaatttaatg

SEQ ID NO: 183550 - DNA, 619 bp, Cannabis indica
agaataaatgatatatacttttaaaaggtaattcacagtaatttttttttatattttaatttttatatacgtgacatatttttattggtttcgagtatttttttttttttttgaataaaagatgcatactttattagatatccaaacgaattacatccatcaatgtagtaggggcattagattccctgtacacagtggcggacccagaatttaaagtgagggggggcgtaaataaatttaaaaagataatataaaatgtagttagtgggatttgaacctttaccctctaacctatttaccaactaccttaaccattacatcaaggttactattatgtctataaatatcatcttttaatacaaatatatgttgtaactaattaaaatacatatacatttttttctcgatttttttttcagggggcgactgccccccctcgctacaatgtgggtccggcccgtcgcctgtacatacaatcagcataagaaacggaaaccgtactagcaacgatggtggagctacacgattcgcagatcgttttattaaacaataatacacaatctcagtttagtaagcaacgattgacattcagtaacacaaaaaccaaaactgttgaatg

SEQ ID NO: 183551 - DNA, 696 bp, Cannabis indica
atttattgtcacaaataaatttaaatctacaaccttataatttacagcaacagaatatatcattagaaatatattatcattaagacaacataatttgagaaaataaaataaatattttataatttttgctgagaaactaaaagtaaaaggaaaacacaaagataacataattgtaaaatatcatgattcaccttatatgtattgttcctttatatttggatttgattcataaaattacacggctaaaaagttcacattctaacaattaattcacacaaaaaactttttgagtcattgagtgatgataataaataatattcactattaatcaaaaaaatgagaaatatacaatatgatgtataaaacatcatggacataaaacttataaacacaaatattacttttaccattatttttcactactattagtaattatcagtatggatggtttttattgttaattttttatgtttaggcaaaaagttcgaatttcaccattttattgggaaattattgggagagattatatatttttggctctttaagttgaagttagcttgttgtggcagtatcatttttaatgagatagaaattcaatcttaagatatataacaataactcaattaaggtaagatgaaatataagatcgctaactgacctgtaatttctgaaattgtcaaagttacggaaagaatc

SEQ ID NO: 183552 - DNA, 649 bp, Cannabis indica
gtgtcttttaacatttctctttatgatttgggttattcttgtaatttctatgtgaaatttgattacgatttaggttgttatgtagatttacgtaaaaatgtaaaaaaaaaaaaatctatatattaacccacatagaaattaccgaagtaacttaaattataaatttaaaaaaaaattaaaaaatagtatatgaagtaattttttttttcaatttttaaataataaataaataaaaaaaaatcataaattgtatattgtttcctttttgtgtgagtagggggtatgaatgtgtaataaattatataaattattattgttgttgttgttttgtagagattatgggaaaatttttatggtatgagtttaaatcacaaccttcttaaaaaaaaattgattttttttttaaaaaaaaggtttagagattttgttaatgtctaatatttatgctatgtaaatgtgtaataaattataaagatttttattactattattgttattgtgtggatattatgtgcaaatttttataggtatgagtttttaaaccacaatctccttaaaaaagaattgtttttttttaaaaaaaattaaaggttgaaatttgttaaatgccaacattgtgctatgtaaatgtgtaataaattaatataaa

SEQ ID NO: 183553 - DNA, 646 bp, Cannabis indica
tatcgtaaacagagcacaaataagagtcagattttagattattgggtttagatagaaacatgtagtatcagttactttcaagtgttcttttaataaattcaaaatagagtttgtactcacgaaactggagaaaaattatagttttacaaatattaggtatttatatcagtaaaaataaatattgagtttatactacttataaacttaaaatttcaagtaattataccgatatttactcttttaaataaagcaaacttttattttgacaactaggaagaatggatacaagtagtagtaccaagtaccaagactagcctataattcttctttctttttctttttcttaaatggactaatctatagttctggctaacatttttttttgttcttcaacaaaatggaaaatgaaatatatttataagctgttattaagctaatcaaaactaagtatattaatttatcattagactattatataagtaaaatatttcaaaaataatcaaaatgcaactgaggcacatctgtaattatttctattattcaagagaacttctcttaaaaaaaaaaaggtaaagtttaactcccccaaattttaccaaaatcataattgggggttaattctttattttttattttttctaacaaa

SEQ ID NO: 183554 - DNA, 650 bp, Cannabis indica
atggggaattttttatcaggaggtaatgtttgaaggaaacaacttcttaggggtgaaaataatttcattgtcaaacttttttgtttgaaggtagtttgcaaggcctcttcttgtttaagggatttatttggtgctatttggaaattctataacaagattacatatttattatttgaaccaaagatctgattaatttgtactttttgtatgcttctacgagattattagtggatagctttgtgttgtgaatggtgtatttaaaatgtttcctttgaaaataatataagtactacaattgcattttgaaaagagaattaataggttttgcaattgcaagcattggataaatatttctatctattctcataagctcctagaagtcatgtattgtagaaattttgtgttcatggtattgttgtattttcattttcctgcttggttttgtttgatccattgcaaggaaaatgaaaagatttttatgggcttataacctttcaggcaggaagacacagacgtagatcatagctcatctcattcagacatatcagaaaaagttgtcacgattatcaactgaggatacatctctaaacagattggcacctgggtttttcatatttttttttggttagcctgattggcctttcctgtgc

SEQ ID NO: 183555 - DNA, 726 bp, Cannabis indica
caaagcatcttcactcatttgttcaatccaataagagaagtgttacaacaatgaaacattggagaatatgataaaataagaaatttagatcaatcaatgctaccaatgccatgagcgatgagtgatttaatggccaatgttctccttttcatctgatgtcctgttttgcctaataggacttctgggaggagccagagccccagctgtctctttgtagacacttaattcatctgttttctcagcattcctctctttgaataaattcccaccattagacgtggtgacagaccgcattgccctcggtaattttataggaatgtcagccccatttgcaatgttatctaacttctgagattgcagttgtggttgtggttgcggtggttgttcaccactttctggctgagatgaaggtagtggaggattggtaacaagttgtatcgaagatgtcctccatttctttctcttgttaggctttggtacatttggttttgcctgtaatattagtcaggaaaccatactcaaaacttagtgtttgtctaattaagagaaaatcaaactttatatttggtttaaagagaagcatacagttgtgtttccaatgtcagaagagcttttcttcttggtaccgaccatcttcatttgcctctgtaggtttgtcaaccaacgcattctgtagaagcatggccccgctgagaagcaagaaagtcatcctctctggttcatcag

SEQ ID NO: 183556 - DNA, 910 bp, Cannabis indica
gactcaaaacatgaactctggatgcgaacctagacccgtacgcaattcggcactcgaacccgaaccgaatcgaacctagaccctagaccataaacctcgaacttggacctacattctctcacctcagtttattatccctcatttaaatgaaaacaaaaaataaaaatagaatgaacagattacatttttattttttatttttaaaatttaaaaataaaaataattgtagaacattttttttttttaggttttgcaaaaatgaaaaaagaaaatttactttcacttttaagaattaaaaaaattaaaaaataaacatgttattaaatgccaccataatttttaaagttaattttttcaataaaagaaacgaacctaataaaatggacatgtttatgtaaaagttatataatttaaggggtattagtatattttgaagaaaagtttaaaagaaaaaaatattaattattttttttttttagtatcagatattagtgagtgattttttttttttaagaatatatacaatttatttgtgtatctaacttgtaaaaaaaaaaaggaataaataaaagggaaaaaaacaaaaaaatacaaaaaaggaaaaaaaattacaaaaatactttgggccggcccattaaacatttatacagtccacatacaaatatttacaaaaataccacatgcactaagccttcagctgtacagagcgaaccatgaagatgaaaatacgcgctcgtttcaaaaccgcaaaacaaccaaaatgaaaccaaaacgagaaaaatacaactattaattctggcaaaatcaactggaaaagaatacctgcaatgatctaaactgaaaatgacgaaaaaaaaatcagaaaaactgtgaagaaactgaaattacacatttgttttctgttttattc

SEQ ID NO: 183557 - DNA, 716 bp, Cannabis indica
aacatgttactcaaggccaacgcaaggcaaaatgagagctatatttcctcgttgatatggttgtcatcgccccaataatcacgagcatacatctgtaaagacaaataggggaggtttagaaaatctacatgagtaagaggagtgtgttatgccaaggtgttcacttcaacccaaatataggaagaagatccccgcggcccaaatagatcaggggtgtctcgagaggtatgacaccctaaaatttatttttttaagttatatgggagtccatatttaattacaccaataatagtatgacatcaaagaaagtactaagcagcaatggtaccttttagcaattctcattcacacaccatcgtatatatatataagaaaaactaatattataatgtataacatttattattgggagtggacagtaaaagcactcaaacttttattattaaatagagaaaattcgtatttattgttagagtaaaatttgaattgaaattataattaataaattgtgtcgaagctttatatatctctttggattgtatagctgagttgtaattgttttatgattcatacaattgtagagtgtaaaagaaatgtttggattggatcagtactttaataaatagaattaataatggtgaatatttgaattaataaatcacattgtaaaattgagaaaaagaaaaaccaaacaattagtcccattaaaaaggctg

SEQ ID NO: 183558 - DNA, 1177 bp, Cannabis indica
atatatataaagtaaaacacaacataagtcatatgacattctttatacattgtattttatgttctttattattttattattttgaatttatttaattttctctattttttcatgttatttgctaatgaaagataattaattatttgttacattttaattcttaaaatttaatatttgtgttagttatttttttaattaatcattcattatcaatagtgactttttatttttataattctcagtattattattattattattattgttgttgttgttgttgttgttgttgttgttgttgttgttgttgttgttgttgttgtaatatatatatatatatatatatatttttgaaagagataaattttattaagcaacactaggcttatctgctagtaaattagcagcagcacaaataggtaaacaatcagtccaaatagcagattctgagctaaacggctctacttaactagactattagccacattattacaatctctagcaacaaataaaaaatctaaacactaaaatgaatctcacatgtgaatagctttctgcaccaattgtccccaatccgtatggttattagcattctgtcgaaaagcttggataatggtgtgactatcaaagcccactttagctttgaagatagaccaacggagagctaattgaaggccaagcaaaatggcagccgcttttgccagcaggaccgagatgcaacaaggagtgaattcaacttccaccaccactaacgatccctccgaatatcttatcacagcacttagactgtacccaggctgaccccccaccagagaagcatcattatttataagaaaaaaaatcctttggaggaggttgccaatgcagaaccggctttggtgtattaatcttgggagttttctagtttgatcccagatgcagcgcaagtaaatcggaagcccagttgctgtaacatatttacttaataactaatctcatacatataaatatatatacatatatgagagattttattgtttttgtatatttgtacgatatattttattgtttaaactatttctcttaaatttattttacttattagattttttggattttttatttttttcaattactcctttatatgtaaaaatgctaaaatattaaaagataaatgaagttgtactctctaaaaactttg

SEQ ID NO: 183559 - DNA, 624 bp, Cannabis indica
atattgtgtgcttctagaatgcaccttgttaaaagagatgcattaatgtaccctctatctatttcactatccagaaaaaattttagtccaattttttttcatattcgtttacgttatagttatttaagatattttacaaaattttgagaaatttggagtaatttatatatagaaagcagtgtttaaatagtctatttcacacgctataaaataaaatagtcacgtgtgcgacacaatgtttgaattttgttagtagcatgtgttaaattcttttgaatttttttaaaattttataatatatcttaaataattacatcgtacatgactataagaaaaaatttgattaaaaaattattttagatattaaaaatggataaaagtacatattttatagagttttttgcggataaaccctctcaactatcatcccacttgtacttaccctccttcaagctcaaattttggtgtaaaactttccaaattactgaattgttaacaaatttaagatatcgtactatttttcacactcttttacacttgacacgtttatattagtacattaatattattatttaataactataaaaaaataataatattttatttttataatttatttaattt

SEQ ID NO: 183560 - DNA, 541 bp, Cannabis indica
atagagagaaaaagacagttggttcatatgaaggagacaataaaatggtacctgaagagtagccagaggtaatagcaagtgagagtggagtagataacaatggcgtctctgaagagagcacaaaaattggctcaggagtggagagtagagaagaaaagaacagaaaagaaaagtgtttaaaaaaatcttagacaaaagtcttaaatctaacaaaatttttaacagctaaaaaaattcaggcattatttagtacatgttaaaggttgagagaaaaattgctaattaatcttttttttttttgaataaaaatctggaaaattattaattaataaattcgttcaaaataatagaatacacttcaaaggaacaatcctccaaccgaagcacacaacttgtagggtaataagagtttcctgctaagctatgagcgaacttgtttgcagatcgtttaacaaaacacaacacaactcaacgtaagataataataaaagcaaatttcaaatatcttgaacaaggaaaccaaactgggaagacataaaag

SEQ ID NO: 183561 - DNA, 661 bp, Cannabis indica
ttatttatatataataaaaaaaaccgaagcaaaaacatgtgatatctttttttttttactctgtatttttctttctttttttttaattaaaattttgaattttttctaatttttggtgagttatgcttttaatctctatatcataattaatagataaaaaacttctcttaaaaattgataacttataaacatcttcatctacaatacataatattaacactaataaaaaataaaatcaataatataaatataacttataaaaatattaatcatcaacaaaatctttatgtaatatagataggttgattttttaatcttcacatattctatactttctattaactcataatatacaattcaatatataataacaaattcataattttaactatcataaagttatgtataatagctttaaaatataaaaattataattaatttatttagtaagatataatacatgtatacacatttttctttagctctaactatatatacacttaaaaataaatttgagtttttattgtatctgattatttaataaattttaaagttaataaatttagtagagtacaatttcatttttttttttttaaattagtagtacggcaaaaatacttatttatttttatactatattgtcattgtatattactaaaaa

SEQ ID NO: 183562 - DNA, 701 bp, Cannabis indica
agggtgtttcttaattttgattggcttatgagttaaagacacaatagtactaactatgctcaagaaaatttatggcattatctacttttgcttgaatatattgagttcaaagttagagagtattactcaaaaccattgcattaaagaaaatgaacaaagaaagtttgatttgtgctacaaatagtaaaagtttcttacaagtatgtaaaaataaaccactaagaaaagagagacaaactattactaaacaaaaagagcattatcatctttaccatgattatgtgtgagtgagtgtgtgtttgtgtgtatgtatcaatctccacgatccttccaacatagcagcatgaaaatacaacgtttgataatgtacaaccttgctctcttctccttaagaactcttttagtgtttgagctttgatttccttctctgaagaattggagttggagttagatatctccataacttggtcttctttctggtttattagcctttcttcttcttcttcttcttcttcttctgcatttggtattttatttgtatctgtggttaaaaggagaaggaatttaccttatgtagaggaatctttaggagttactagaggttgtttgagtaccccttttggaagtaagtcagtaaattatgttgaatgtagtaaaggcctgatggaagaggaggaggaggatagaggaggagggggggg

SEQ ID NO: 183563 - DNA, 1034 bp, Cannabis indica
ctattctattctataatattaatatatgttacctaattaaccccaaagtaaactaatacataaaaatgttttcagtttttttttttgtgtggggttggttgatgtttataatcatgagttcgatgacattcactaggttcgaagcaacatgttatatatgttaatattatccaaataattgaaattggaataggcacatgaactgaacttccttgtttatatagtactctttacattttaataataaagtagattagtctgtaaaggttaattggaagaaagaaaaggaaacctttgtttatcataaatatatatatgtgtttaattaaggtcaatgtttcctacataccttgaactccgaagcctccttccttccttcacactatgctaaactaaaagataatattgttataaaattcttataaataatataaaatagataaaaaaaaaatatagaagaagatgaagagagaaaaaaaaaaactagagaatttctcaacagtttattgtaatagaataaacctctcatttatacaataatatgactagaataataaaaaatcaaatcaataaaataaaatatataatcactgattaatacattaatttaaacatccactatataatattttatttaatgatgatagtatttttttttttgtgtgtgtgttttgagagtctctatataaactccatttttgtaaattgtacgcaaataaatgtaacagtgcatcccccctaccttacctttgcttttttcttttctctatctatgtttatgttgtcattattactcaatatttaatttactatatagtcttctccataatttcttaattattatactcctctttattctatcccacccacatgccaagcaagactgacagtatgcagtgacaaattattatatattattatacactacccatcgttcataccatagaatattattattatttattgttttgtataacaaagaaattaggttaattcatcatttcctacatgtcagagagagagagagagagaga

SEQ ID NO: 183564 - DNA, 531 bp, Cannabis indica
aactacatccattcaattatattataagtatataaaaatctgtttttattattttctgaaattttattatttgtaaaaaataaaactattataaaaatattattaaatcaaaaatgatatttttaaatatattaattttattaaagataagaaattaaaatatatatatatatttatatcatttcaatttacttcgagtgtcttttaaaaaatattacttcgagtgttcaatcaattttaataatttgaatgtttaaagataaaatttattttattttaggaagctataactttaaatacatttggtagtctacttaaactaaaaaattaaaatagtattcttgtttcttctacatgaagtcaggaactaaatcctcttatgataaatattaggtttttaactattattatatataaattatactggaagagtttctaacaactaatttacttactttttataatatatcactaacattattttttttaaagttagtataaacattttatattactacaggcttttttttt

SEQ ID NO: 183565 - DNA, 1058 bp, Cannabis indica
  modified_base (244)..(244): a, c, t, g, unknown or other
gtactaccgttactaacgtttatacccctcgtaacttacggtactaccctaaaactactacgttaaccgaccttactttagtacgtaccaacggtaccgtactacggacgtactttctaaactaggtttacccgggttggtacggtaggtaagtacgatacctacgacttaagctttttctaactttagagtttactaatagatagaatagtataaacaaaagttaaaaagaaaaatacgaaanacttaacaaacaaccagacgtacaagtacgaatgatagaaaatggtaacagtcgaaacttacaaagtatagtaaagagataaaaacaggtagtagaaaacttttaaacaaaaccttacaagaaattaataaaatcggagctcaatatagatagaaaaatacaaaaagaaggacacaaacaaagtacaagactttactttctttaacaaaccatatcaagtaaacacgattcaaatgacaacgttatgtaacctcttaagcaatggaaaaggaaaaaaccaaaaaccctacaaaaaaagttatagaaaactggtttgattgtattaacgatatttagcccatactcactgttaattattcacccaatttcattgacaatatatgtgtaacaaggcaattgaaaatatcaaacgacatcccaaattagaagtaaaacatcaatggagggggaaaaaatactataatacaaagctgattaaccatacacatgaatacagctggccagtctggtcatcttcaccccaaaattcaaatacaacgctttctaaataataatataaatcctaactacgcagaaatcccagtatatacaattccgaactttcttactggttttgcactgatcataactgaaagatcctaactttcaccctcaacgaacaaaacaataatagaaatttcccacatgtaatctaatttcataatttccaaaaaaataataaaaaattaagaagaaaaaaacaaacaaacaaacaaagaagataaaattgaaccgaacagatcaagatttgataagaaataaaattgaataaagg

SEQ ID NO: 183566 - DNA, 559 bp, Cannabis indica
atttaattaaagggtgtgcgtaaatttttttcatatataaaaatattctaaaaaaataagtaaatgtaaagaaaaacacaattcaatatttcaattcccaactaaaaagatattaaatatgaagcactaaaaatcttctaacagaaaaaaaaaaaaaacaatttaaaataatgttcaaaatatataacatactcaatatcctaaaattttagtaaatatatcaatttttgagctcatatctttagagctgtcctcgacgagttttcatgttgtcaaaacgatgaataataagctcgttgtcaatagcattgaatacattcttttgagatatactatcaaactatcattcaactattaatcttctattttgttacgcatttattgtggataattaaaatattaaaaaatatttatttagttaaaagtaaaagaaatatttttttttttttttattttttttaagtaatgggcttaagcccacactggtcattgatgatcatatataataacggacactgtcatttattttatatcattatatatgatcaaatcttcttag

SEQ ID NO: 183567 - DNA, 879 bp, Cannabis indica
aaagatgttgagaaaacagagtagagtagatacgaacttgttggctgtattaattttgagatccaattgaacttgtgacctgtattttttagagatccaattgaacttgtgagctatactctgataaaaataagtttatttatacaaagacgcactaggtataaacttgaggaggtgtaattttgattttttttttttttttagtttaaaataatatggtaggtaaaagttttttttttttggttgggatttgaactaaacataataaataagttaagttatcaatatttgtcagcttcacttatgtatccactagagtttattattagcagagttttaatctttataagaaattttctctatcaaataaaacagatcgaaacgtatacgaaatataccgacctcgttatacttttaatcaaatccatgcattaatattgaaagaataagacgcgactatatatatgcagacagacttatataatcactcttatcacacgtacataaaatcattcatagaacaaacaaacaaaaagtgaaacaacaaatctctctcaaaaagaaaaaaaagtgaaaagagaacacacgaaaactcacctcgatgataaataacaaaatgaaaagagacagtccataaaaaacaatttatttaatttgtagcattaaacagtaatagcgccatgcattgctactcaaaacgtgctttaaaatcccatattgcaaatataagacagcactagtactagtagtactacactatatatatcctcacatgataatcaataagtgatatggagctgaatatgatagaatgaagaaggggtagtagcaatataagtatatagtagtatataatattcaaaatcatacactacgtat

SEQ ID NO: 183568 - DNA, 722 bp, Cannabis indica
aataacattaaaggataatgagacacctttaactatgagatcattcctctccacatcatagtagtccacaagaaggaacaaaaactcaagaagagtgtgtgtcatatcaacgtattttggtatagagtttaccattaacagagctgcaggctcaatattcatgattttgtctactttatcatcaaaaaagagccaatcatagaacagagcaagcttcacattggcttcaacataattttttgtgcaacatttgagcaaccaacctacaaccgcccaccttggaataatttccgactgaataatttccttagtcgggtgatgtgcacaacatataaaccgaacaatgtcacttatcacagtctccctctctgggccacataaaaacttcttggtaaaccatgtttggtggcgcttttggctccccaacttcacgtttgtcaacaagaacctcaactgaatctccatttctggagtaatcctaagtaaaaaatatctactagatgtcctcgtgcaataaagctgtgaaatatctgaaaattctggagtcttaaactcacctggattgaatatcaaatccttccagatagttctaatctctggcacgtgaatcaaatcttgtaaaaagtacgaatgagatctctccccaattctcaggcacaaaatgaaaactgttgcttcaaacactctaaacacaaaaactcaaacctccaaatcgctttaat

SEQ ID NO: 183569 - DNA, 590 bp, Cannabis indica
cattgcacgtgtaacatatataattaaagattacttattttggtttttcttttttcaatttttttgactaaatgtaaacatgaaaaattaaatttttcttatttaaaattagtaatacgttcaaataattttattaatgcaatgcacatacaatatggcaacgaaatgatcgaagtctttagcttgaattatacagtatataaatgatgagaatgcgcttttacaaaaaaaaaaaaattacacatttattactcacaataatatgcattaaatattattcatatatatatttaagtattatatcaccttttattgtagttgagattaattatacagataatgtgtaaactatgtgtaacttgaatgtttctcaatatttataaccaaactaattttaatgtgttaacaaataagtttgcaaaaaaaaaatataaaataataaaaaattatgtcaatttaattttagatttgtttgtgaaataaaaatgctatagtaaaaatagctttaaaggttaaaaaaagaataatataaaaaggaagaaaaaagggtctcccgttatgttaaattctatttcagaccttatatttta

SEQ ID NO: 183570 - DNA, 697 bp, Cannabis indica
agtttttaagttatgataaaaaattattaaaaaaagaatactttttagtaaaaataaacacaactgttaaacaatctattttaagcgcacgttatgctagttttgaatattagtaggccatatgaaaaaataagaatttgaactcttatttaaaaataaaatgtaatattttcaaaatcaataatatatatatttttcaaaaaaaatttatttttaacttttttttttttttgtaatgaaagtgattttataaataaactaaaaaatcagacctcgtggtcattacaaaagattatgctcaaacacataaaaaaaaaccttacaaatataaaaatcaaggaaacaaataacattacctatatatgtatgttaacaaagtagtaatttaaacaaaataagtgagtttctaaaaaaaacatttaggtggcgtttggttggaggtaatgaaatggaatggaatggaaaggaaacaattttcattccattcctttgtttggttgcattttaaagtattggaatggcattccaatggaatgctctttccaccattttggtggaatggctattccattttaaaaaggaaggaatgaccattccaatgtaacagaaaaaaattaatattttttatcaattttttatgcatttaatttattccattccattcctattcctattcccattcccattcctattccta

SEQ ID NO: 183571 - DNA, 750 bp, Cannabis indica
cagcttttttgaaaagcagcttttaacttttccaaaaactgtgccaaacgggccctaatactcaaaaacttatctcaaactttcactgtacccactaacttatgttagtttaatttacacatggacaatttagataattactgttttttttttttcactttatcattcatttaaaataaatcttatttgttaaaaaaaaacctaaatcctcaaaaccaccgattcttcttccttatcgcaccacccaagaaactcttccctgccaaacgaagctgatcatttagacttttaagcaattagcctgttatttatgactaaaattaccacattttgtaagaaatttaattatatttatacctatatctaaaattgcaggtcagtgagaaagttttctctttttctaatttacatataaaatcttgtagtggggaagaaaaattataagatcagtgagatggttttgcagttcgtatgtttcttgcatcaccctctctcagaaccttgctttggatcttggatgaggttaacatcattattggcaaagaaacacaaataattgttggcagcaggagatttgatttatggctttggggcttaatttcaagtgtgtgattgggggaagggtttcttcggtggtgcaatgaagttgtggtttttagatttcagatttagttttatttttaacaaatcatatttattttaaattaattattaggtaaaaaaaaatggaataatctagactgtccacgt

SEQ ID NO: 183572 - DNA, 533 bp, Cannabis indica
ttatactcttagtttctcttaaagaagaagacttagagcaatattgggagagctacaactatttaagttatgatcccccttcatatggaaatagaagggtattcattggctaaaaagacgagtatggacatgtccatgacccacctcggatttttgctaaaagcccactaatgagataaattatatacaaaagagagttgactattgggtcccatagaaagaattatgctcgtgtgtactgcagctcaataattgtacgtcatggacacgtgtctcccaaatgtttaatctttaaaagtaaagggcatgtgtcacgtaaaggtttcaccttgaaaattagaggtctgatataactgtctggcaaaataggtggaagaggtgcgtgcattaccatgcctagacacaggggacaagacctaatcttgtaatttgaaaaagtataattgtcaccgggcaatctaaattactctgaaggtagacgtttgtgacactgtttggcagttgatatctgtaataggccctttgaataccca

SEQ ID NO: 183573 - DNA, 791 bp, Cannabis indica
tgaagaaaaaaaataaaaaatttaaaaattgaaaaaatcggaataaaaattgaagaaaaaactcaccagttcaagcgaagtcttttggggaaaagaaaaaaagagaatagattagattagattagattatgggaaaattgaaaaggagagacgtagatgaatctgtctagggttagggttctgaatttgggagaagaaaggcggctgagctgagctctccagaaaattactaatttcttctaaaaataaatgaataagggaattttatttatttaaatggaatttatttattgaagaaaatgatttttttttttttttttagagtaattgaatagtattttcaactttgattaaaaaaaaataataactaatagtatactatcattaaattatattaaaaactcaaaaataatagtaatactatctatttttttttattgttgacaataatactatctaaaattataaaaaggcaaagagattgttttttttttttttaactaggcaaaatatatttatattgtaaaatatggatttttaatccaaaaaagatgaaatattgatttgtagaattttaaatattttaacatatttaaattttgtaaactacttcatatattatttttttattttgttttaaatttaatgtttggatttttaaagttgatttcttcggtaatttctatgtgggtttggctatacgattttttaatttgtcgattttaaatttagctccgctaattagtcagtaggaatttatatgtagaatttcgtaaaaataacaaaaaaaa

SEQ ID NO: 183574 - DNA, 634 bp, Cannabis indica
tatatatataatcttatatttgttatatatatatatatatacatatatattatatagtgaatgtgtagatccaggatgtcaaattgagaatgagatgtcttctgtaaaacattgattggttttagaatttttgtctacctactatttactagaaccttctttacaagaaaattagggtttaataagcaccggtcctgagttgaaatggattataggcaaaaaaattttttttgagcctttactataagaaaataaacggtatttataaaaattatttaaaaaacatttttttttaatttgagcccctaaaatgagtaagccttaagtgcagatctagcccgcctatatctaagaccggccttgatgaacactacaaatgtcatcagtaaagagttttttttttctataagcaatgactattaataataacacgtcgtcgctataaagtcgtcaagagataactcgttaataaaagtatttataataattaattataaataaacaatatatacatgtatgtctatatatataaataaaaaatgagtttaattattttgtgtggttaatatgttatatatatatatatatatatatcaagactacagaccacctactcttattcttaaatttgttt

SEQ ID NO: 183575 - DNA, 733 bp, Cannabis indica
agaaaatctagtcttaatcctttaataattattaattggtgccataaattcattgaagagtactatacagacaatagaactcgtaattataagcctagcatcataaatgtgaagtggcagcgccagtgttggactgtataaagttgaatgtggatacgagtgtaaaaaatgaagttcaaggttgtggtgtgggcgtggtggctggcaattccatgggcaaagtcattttgttgttgacggtaagaactcattatctaaactttagttagaaaatcaaatgcaaagagttgatgatgaaaagcttaagaaaaattaagatcactcagtcatgaatggagtaaaatattgttgtgaatatttgagctctcttacaagtaatggttttccaacccctttacaagtattcaaatgaatcttttatagttaagctctaatggctctgaaatacaagtggtcctaaaaattgggggataaaattccttttgtactatgaagatcaacgcatcagaggggtagtgaagaaatggtggtcgggtactcagtttgtaccctgagtgagacaaaagggggtgtctccactactgtaccttgtacccgtcatacatttgtatccttttttagtagacgtgcttgctatgatgaacttttcctttattgcgtatcccttcgggtactctctccgctatggctaagactcataatgtggaactacactacgagacttagttaagtg

SEQ ID NO: 183576 - DNA, 517 bp, Cannabis indica
attgctaaccaatcgtgaggcgccgtctataaaaagtgataggcatcgccggtgtccaataacaatactcaatgaaaaaattatccctcatatgtgttaatatcactattggtctaattaaattttgaatcttgtataatttattgcaataatttgtaaattgttcaaaaaaaaattaaaatttataaagataatattataactataataaataccgttataaaaaaattaaaataaaactttcattatatattttcaggcaaaaaaaaattgtaatagaaaattaatatcagtatactctttttcttttcattcatttaattgattatttcttattaccttttttagttgtcaaatattgtagttctaattttataaggactctttgttagagttttacattatcattacagaaatatagtatagttttcatatagtgtttttttttttttttagattgacagttttcatatagtgttgattgttctctatgctttatttttctcattattttgta

SEQ ID NO: 183577 - DNA, 668 bp, Cannabis indica
aacaagtagtatcgccacacttctgatgggatatttgtatcttttgcatcgttaccgaaaactcctactcctttactcttggagaacttacctgcaccaagaaaatataaaactactatatagtaacaaagtaattatgaaacaaaacaataaagcttaacttgtacctgtttcatagtttagatattcagtcacactaatgttcttcatcagtgtccagttttctcctgttccaataagtgtagatggaaacataacctgaaaaaagtgtaacaggtaaaccaaacatgaataattgtaaattatcacagctgcagaccccatatgtactagaaggatttatgaggcatatggtgttggtttcttagttgagagcctatatatttagtctcttagttccacttgctcattaaaacggctcactttttagccgttttaactaacttgggttttgtaatgagctgcacaactgtttgaaagtgcaggctcgggttagagagtttgagaggaaaaacgacttgagagttatactagagtaacgacaacaatgattgagttcagtagtctccagataaattatcgactctagacatatgtaatatggagaagacaaaatatttatctatattatatcaaatagatggtacaatcaaatctatatctcaatt

SEQ ID NO: 183578 - DNA, 615 bp, Cannabis indica
atctatatgcagcctcattgaccattcaacatacatgaattagggacactccagaaaaactgaacatcaaacttactaaatcctctaacaaagaaccaagttcaatgaagaaagaatggtgttaaaaaaaatgacataaaaaaactgctaaacaatctgctaagactaactgtttcagccacatagagtgaatcaatccaaaaagtaacctaacaaaagaaaatcaatgaaacatcatcaacattagtgaatgactaataactaaataaaaataattttgtatatgactaatagtgtagaaccaatttaactatactttaaataatcaaacaatcagtaatgatataagatgatcaaaatgagtacaacaattggataaaaaataggggtaaacagatcgtacaaatcaaaaataataaatgcaaaaaataaagaaaatcaacaccaaaatatatactggttcaagtctgattcattgatgtgatctatgactctactccagttctgaaacaccattgaaatccttctttattgattgagcgagaatagatacaatatagtggagacgcgattctctgttgagttctcactgagtgttttaactctcacacttca

SEQ ID NO: 183579 - DNA, 611 bp, Cannabis indica
aaagtaaaaatatgactgaaaaaattttattatacttatgttcacttaaaaatttgtgtgacaaaatattagtcaaaaaattataatttattgtgattgaatatatgttaatatataatacaacacttatgtcattaaaactccataaattaaaaacaacttaaatcgaaaatactattcttttaatattagtcaaaaaattataatttattgattgaatatatacaagttatttgaatgtcaaataattattatatataatattttaaaccatttgaagaaatgtagtaacaatattaatgtttgtggagtgttgcacaattaaaattaatgaaatatatatagtaaagtttaaccaaaaaaaaatgaagagtacaatttaaatggatgtaatgtacttagttataagataagaggcacatgcacctgcgttctcgtcgccatgtgtgattcggatttcttatatatattttttataaagtagtgttaattatattttcttatttataattttttttatcaatttctaaacctaaaatcaaatattagaatatttttttttaaataataatatccgttatagttactatattatttttgtaaatttttat

SEQ ID NO: 183580 - DNA, 741 bp, Cannabis indica
gtatatatatatatgacacatatacacaatctatatatatatatgatgatatatatcatggttggtacatagaaagtcaacgagggcgtccggccccggcgacggtactatcatgctaaaggtcgttgactcttgtcagcaattatattaaataattattacattatattcacaaaaatactacattttttctttcctatagtgtgtattatttttttatattaaattttatatagtttaatgtaataatttttaaaagtatcgtaagccaattataagatgatatatttaaaatattaaacatcattagtgcctaataacaatgctcgtcatataactattagtattattaagtataaatattctgatcatatataatttaataataacttttataaaatattattaattaattgtaagtcgccacctttaagcatgaccgatccaaatgttcggtaattttggctattatacaatgcctactgctcctattttatttatcatctctttataataagtttttttataatgtatatataataagaatattgttattgggtaccagtggtgcttaatacctctaaatatattgtctagagattgattaacgatactccttaaagttattatattaaactatacaagactcaatactttttgtaactaataacagtactaatatatagaaaatagttagacacacttttaagtatttttctatataataattagttctataac

SEQ ID NO: 183581 - DNA, 1171 bp, Cannabis indica
aatatgcctgctgctttcaaaatatgccccacatttaatttatatataatttaattggcaattagtaaaaaaaaaactgaatatattattgtggctattcttttctgagtggatattataatcctaaccaaagaaagtttagagatatcgttgaatcacctggatagtgaccttagtggctcaattatcaacatcatcaatatttctctttcttttacattaatcccaaaaacacacacaaaagttttgcgtgaaccaacaacattttccaggctgcagtaactagctaatattgtatattttcatacattattttaagacgacgtacgctgcataattaatgttactaattaatgcatgttacaacaatctaagcatatatgcgtatatatatctactcatattgatattgtacctaaagctgaccggtatgaggtacgtaattaattataaacactcctagtgtttatttaatccaatctccattattttgatcacaatgagtaagaattttacattttggatttaatttaatctgcacaatagtttaatctaatttgcaaaaatactaattggattggttattttaaattagttattttttatattaaattatttaatatttatgaaaaaaaaatatgtattatttatgtctccaacaataaattaaaataaataaaataacaaatttaaaagaagaaaaaaaatactatcaaaagacagtctacttttagtaacaaatttttagtcacaacataattttttgggtgactaaatgtgacgtttcgtcacaataaaaaattacttgtaactaaaacatagtttttagatacgttgtcactaatttacttttaatctcaataagtattgtgactaaaagtacatttagtcacaacaaattataatttttgcgactaattacctttagccacaggctttttagttacaacataaaattgataatttataattagtcacaattttttactttagtacacaagttttgttgtgactaaaagtaagatttgttgtagtgaaattatatgtataaagaaatgtttaatttatttttaaattgtatgtagaaaaaaaaatatatataagaatagaatagacatttgatctattataagttttgaaaatataattgtaatatatgtactagactttt

SEQ ID NO: 183582 - DNA, 583 bp, Cannabis indica
acttttgtagggtttttccctctgatattttcattattttaatgccaaataattcaaacctaaccctagtggaatgctataaatagatagtgaaggcttcaggaaaattacacttttttctgacactttctgaatcagaaaaacctgagccttctctctccctatctttggccgaacccactctctctctcttcctcttgaatttcgaaatccttagtgtatgagtagtgcccacacacagcaagtgatacctcaatcatagtgaggaagatcgtgaagaaagactttcagcaagaaggagtttcagcatcaaagattcagagaaagagatccaggttcagatattgataatgctctgctacagaaaggaatcaagggctagatatctgaacggaaggagtcattatattccgctgcacccaatgtaaggtttcctaaactttatatgtgtttatttcatcgttttagaaagttcatatttagggtgttaataaacatacttgtgagtagatctaagatcctggtaaaataatttccaaacaggccatacgtcaaccttggcgtagggcccagcaccccatgt

SEQ ID NO: 183583 - DNA, 603 bp, Cannabis indica
ttaatgaataattccataacaatgaatttagcaaagtaaactaaccaatttgatgtccaccacatgattagtattgatgcttgaagttgtaggcaggcaatatgcttcagagttcggtgcaactttgaatgcactactggagtccaaccaagctatcttcctcaggaatcgtgccatgctctctctcaagaacaacctatctgttgactgtcaatgttatccgcaggaatcgtgccaggtatgaaggtctttttcttttttctccattgttattggtaatctgaaaaattcagggtacatcagttctagaaaagattatatatcttttggatcttggccatgaactttatattttatttggtttctagcccaatgcatttactgaaattttctatatttattggcatcaggaatcaaaatggtggtatgggatggaaatcactacttgctgaagcttgccaatttgtgggcaaatctaatcagttctgatcctccagctttgcctgtcaactaattggcaagccacaacagaagttggaaaaacttttagactggatgttggtctgaatcgcaactatgtcctccaatttcctcttaggaggg

SEQ ID NO: 183584 - DNA, 634 bp, Cannabis indica
aagtagtgttcaaacaatctatttcacacgcgtataaaataaaataatcacgcgtacaacacgctttttgcatcctatttttggactgttaaattttttcaaatttcttaaaattttgcaagatgtcttaattagttataacatacatgactatgagaaaaaatttgactaaaaaattatttcagatgctaaaacagataggggtacatcaatacatccatttaaatggggagcattgtagaattttccattattatatgttatttgaatagtaagctttatcattaatttttagcgggttataattaattttttattattcatgtaaaattttaaaaagtttaaaataatttaagagcactcgttggctctgaattaaaatgggtcataggcaaaaaaaaattttaggcctttattataaaagtaaatagtatttttaaaaattattaaaaaagatatttttttatttgggcccctaaaatgagtgagttctaagcgcgggcctaacccgcctatgtctaggaccaaccctaaatactctcagtagctcatttacactaaagattcattaaaatttttaaaaagaatgaagcaaaacatctgtaacaaatgatgtaaactcattttttattta

SEQ ID NO: 183585 - DNA, 600 bp, Cannabis indica
tgttaagctttttacttagtttgtacttgtgattttgagaaattatggctgctaggtttaggtatgcttagggttcgaattctaagttcattttgagttgattttgagctctggttattagttttgagttgtggttattagggttttgagcaagcttgaattttgaagctcaaggtttgggctttaatggcatcctttgatttagtgactttttttgggaattattgattggaaaatgttggttatgcattgtacaggtatactggaaagtttggttggattttgaggtcatggggggaatttttcgggttcccagcacagaaccggaattccagttttgggggacctgtagcaaccggtcgaccggttggtgacccagaactggacttctggttgggaaccggtctgccggttgggggagtttttggaaccctagtttttcccatttttgagatatttagggtattgccatgttatttatcgatagggaaacttttagtctcaagtttaagtccccgaaaagtgatttagcgagtcactcatctatgttataattcatgcgattagggcatccgtctagcacgagaatttccgttcagg

SEQ ID NO: 183586 - DNA, 702 bp, Cannabis indica
agtgggggatgtagctagtttttccttcggtttcgtatcctgtataatcagagtgtctgccactgattttttgccaattgttttggaggctttgcctaatcagcacgacaacatacttggaatggttatcaaatgcctcttgctgaggtctcatgatttttatctgttgatccatccactcttggaaattggcatctttgttacctcaaaatgaaaatttgcagctactcaggtagcttgctaatcataagtgttggtatgctcttacatctgccccagtgttgctataaattctacagctcagtgtcgtcaccaattgtcctttgaggatctccaatagatagattttcagtactaggagtcgtctgcttgacatgagtattggtggttctagttgttgggttttatgccctaaataaaactcatttcaatataatcagatttacttattaatatagatcagaaataacatttaatgttgcatggttcacatgatttatttcatgattatatgtacataatgtatgaattcatctgaaacccttttcacatactttgatcctgtttattgtgttgtcaacactttggaaagtaaacatgactatgtgaataaagattcctagatttatcagacatagggttttactgatatgataatctacaacaagagtttacttgcatttggagaaatgctatgttctt

SEQ ID NO: 183587 - DNA, 601 bp, Cannabis indica
acgaatatataattaagattatattccactgtgctgacaacactataatcattaacaaattcatatgttctggacttaaatagaattcatacattatatgcatataatcatgaaataaatcatgtgaaccatgcaacatgaaatttatttctgatctttattaataagtaaatctgattatattgaaatgggttttatttagggcacaaaacccaactatcttgctgcctgctgctgcaactccatcaaatccaaaagattcatcgcttcctcagcgtgaatctcagcctgtgaagcccaagccgaaacgtattcccaagcaagttgttaggaaatctgtgcgtcctcagaaattttgtacctcatcgtcttcatcattgaaaggttctccacctcgtgctactaaatcgcccattgctacattagggaagggtgttgcttcatctacaccaacaggtccatcctcacgcacccgtgcccagcaagcttctcttgagaaggaactttgcactaaacgaagccatgacagacccagccctgctgccaagaagctgataatgaatcccccttcggtttcgtcgagttctgaagaagaagaacc

SEQ ID NO: 183588 - DNA, 661 bp, Cannabis indica
atcttgatccagtcttcaggaggaggaacccaaacaggagacccagctaccttcaaatgagtaagtaaactataggcataatctgtcatatgagagataacagacccaaaaatgtttcacgcaggcccaatagcccaacaaaaggtaagcaagtatggcttcaataatatctaaaaaaataaataaataaataaataaataaataatatctcaaataataataataaaaagtacaatttcaataatgtctcaaaaaatggaaatagttcaaaaaaaaaaaacaagagagagagaagtaaagttataataaacccttccttacgaacaaataaaaaagttaaacttgtaattgtgataaagacttgtgttgaaatggcaagagccaacgtggtggattaaagccttcaaacatggaagatatattatatttaagaagaatacaatataaaatatcaatgtaaaccaattgtatattagcagaaagaaaggttagaaactttttacataagaaaaatagtgagaatgagtcatcacactaggcccaccacactagctccttcatctttggaaacacaccaccccactcccacacatctgttgtgagcccaaactctaatactaaggggtaaggtcctgtaatttacttctatgttcaaatttt

SEQ ID NO: 183589 - DNA, 696 bp, Cannabis indica
aagatgaaatataaatttttaagtgaatttttgctatagtctatattaaaaaataaatttttgaaagaatttgtaaaagattcatttatagatgatgttcttgatatgaaaaagagacgcttatattttaattttaagtattaattaacaatactttttaaaaagttgttacttaaattttaatatagttttggctgaccctaataattgatcctggctccgcccttgtgtatgtatagttttgtaatgttcaaaatatatcttgatttgatttaaaaaaaaacacatataaataaagatttacatttctttttattttgatatatttagaaaaatatatcttgattttttttttaatttggcatatttgaaaaaaatacatataaataaaaaaatatatattttactaatttgataacgaatattaaatataaaaaatatttaaaattaatatagaactaaataaataaaataccatcatttaagagtgagaactttatgttttcaaaaaaataaaaattggggaccaatttattaaaaaaatataatttgaggattagcttgccaaaatttatataatttaaaggattaatttatcaaaaaaataaaatttaaaagactaatttattcaaaacttatataatttaaaaggcttataaatacaaataaatggtaactcataattatgtgggatgt

SEQ ID NO: 183590 - DNA, 613 bp, Cannabis indica
tttttaggagattgtcttatctcatggaagataaagaagcagcctaccatttcgaaaagttcagctgaagctgaatatagagccttggcaaccaccacaagcgaaatcacttggctccaatatcttctcaatgacttgcacataccacaaagactcctactttcatttattgtgacaatcagtcggctatacacatcgccaacaatccaacttttcatgaacgcacagaacatatcgagctcgactgtcacttcatccgcgacaagattgccaactccaccattcgcctcattcctgtttccagtcaactccaacttgctgacacattcactaaaccattgccctcaacattactcaactcccatatatacaagatgtctgtatatgatctatacaatccaccttggagggggggggggggttaataaggttataactctgttttcctactgtatctttactgttacactgtgttgttagttataatcggtattttggttggttagtgtcagtagtttgttatattgttagtcttgattcttgtctaatctaactaactttagttagtctgttatttcctttaggtttgagtcggtgcttatgtatatatata

SEQ ID NO: 183591 - DNA, 536 bp, Cannabis indica
tgaattgagaatgtgattaactctcgaattaatatacgcaatatgggggtgatgctttccctatcttgggtgcaccttagggtgattgtaggtgcggtctccatttcttccttggccttaaccttagaagtctttgtcgtcccttctattatattcccaacagaagagaccttctttttccccttggctatctcgacagcgaaggaggtcttctacctcccctcagttgttagcacagtagaggaggtcttcctcgtcccctcagctattagcacaatggaggagatcttctgggcaaatgtcaatgatgtgttgtaacatttgcatgctactctttcgttgccaaggagatggtagataccaactgttattgagaacttgacaaacaggtggtagataggtgagatggcttggagatcactgggtgtggaccttccaaggagacttggtgtcaatcactatgaaggtagtcatagtgatgttttccatggggcagtttcgactgtgagtagtaatttgattttaccacagggagt

SEQ ID NO: 183592 - DNA, 804 bp, Cannabis indica
tatgactatcagaaaactttcatattaccaaaggctaagaatgattagttgcacctgagcttgcaagattttaaatcagtaagtgattataactctacaatgtttaatatcacttctaaattaatattgtgtggagaaaaagttactgattatgaaatgttagaaaaaatatatactacttttcatgtctctaatatgctcctgcagcagcaatatagaaagcgaaaaaatattcagaattgatttcatgtcttctaataactgaacagaataatgaacttttgatttcatgtaaattattagtttattaaataaacttaaaagtaatataaatattgttacaaaagaaaaataacaaagtagggtaaaactattcaaaacaataaaatattgtaatataatctaaaaataaacacatagatttttaaagttatttaaaataattgatatatgaaaatgatttttttattatattattacatgacaacttattagttttgaaaattaattttatgactactcaaaatgtattttaaataatgtgatatcacaatataattttaaaataactattttattttaagatgtttacaaataaatttttgacgtaactaaattgtatctcaaattatctcatatgaaatgattttttctttaatatgtaaagtaactcattagtttcttatcaacatcataagaaatcaaaatgttacttttaaaaacgtaaaaaaaaaaaagggcaaaattcgagattaatttttcagtcataatagtttggaattgatgtattttttgatgacgtag

SEQ ID NO: 183593 - DNA, 585 bp, Cannabis indica
ccttttcagctaaatgccaaaatttgtcagtggttgaaaaaaaaaattataataatattaataatgatactaatattaaagatttagtcttcacgtataccaacttggaccttttagttaagaaataagaacattctctttattattgacatctggttgttacacttcatttattgaattaagtttcaatattctttttctttttccattcccagttggcagcctcttgaaaaggaacatttataattaatttaaaatttaataattatgttcagaatacatttatactaaagtgctaaaaatatttatctcaaaaaaaaaaaaaaatgctaaatatatttaaattgagtcgtatttctactttttaaaatacattaaaatgtataaaatattttctaatttttttaacaagaaaaattttattcaattagaccaactctctcaacaatgatcaaaacatcatttgaaacattagagcctgaaaataatgcaataaccatttgaacaagaagctcttgcaaacactcaattttgattctattatattaaatatattgattattgttgatttctcttctagagtat

SEQ ID NO: 183594 - DNA, 542 bp, Cannabis indica
tctaacctcggcaatctttcaaaacagtggtgcttgcagattccgaaatcctgcgttctatggttatggtactaccatatgtctctggcttaaacgcatcatccccttcgttatttatttcaacaataacaacactggaactgtaaaaacataacaaacaaacaaaaataagaaacttgataggcaaagatacgaaagtaatatattcaactagacacccttttctactactagtaaacaaactaaaaaaaaatactatatagaaatatacaggctagtttctaaaacaataaataaacttccaggaagtgaatgcctacagtctcacctcaactaacgttcttagtccgtagttacaggaaaaatgtagcgattaaaatatgaaggctaaaggaaaactgaacacaaacctacaaccagttttgatgaaatcttttagcgttgaagccctttgagtccctttcgctcgacacccaaatgcaatacacagagcagtgaggacagcactttttcacctgaatatccaaacaatcaaattaatc

SEQ ID NO: 183595 - DNA, 563 bp, Cannabis indica
gaagaagtgatacacctgctgcagcaagtgaaattcccactgctgtgcaacaagaagtgatacccctgctgcatcaagtgatgttcccactgctgaacaaactgatatttccacaccagcagacaacattgtcaattccaataatgacaatcctaccgttccaagaaagagtaacagaattcacaagactccaagctaccttcgtgactacgaatgccattctttaattcaagaccaatcttccacaccatatcctttacataaattcatgtcttatactaatctgtccccagctcacaaagcttttatttgtgcagtacaagcccatttcgaaccacaacactacaaacaagatgtccaacataatgtctggaatcaagccatggccaccgaactgttagctctccttaacaacaaaacgtggacctatgtcaaactccctccaaataagcgtgccatcagatgtcgttgggtctataagatcaaactcaacagtgacggatctgttgaacgacataaagcacgccttgttgcacaaggatacacacaacaagagggacttg

SEQ ID NO: 183596 - DNA, 753 bp, Cannabis indica
agtactggacctcagcctattttctctcacctcaatttcttatctctcaattaaataaaataaaataaaaaataaaaaataaaatttacaaaaaatatttttattttaaaattaaaaaataaaattagttaccaaacacatttttatttttttaaaaataaaatacaaaattattataaattgatttagcactttaaattacctacatttttcaaaaattgtaaaatattaaccgcacaattcatattagtaccgtacaacaaagctccaattttatgtagtgttaacataagtgcctcaattattttattttattttctttgaaatggtacaagtgccccatactactttttatggaatttttcttgttggtagtcctttttgtgtataaagttgtgttgagagaaggataacaatcacctaccacccctcaaatggagtaaatgttctgaaacacccaaacaaataattagaagaagaaagataattaagttgatcttaaagacaaccatatctacacataaacacaatcaattaatatacttaaatgatcaatacttctcagcagacacgtctaagaaaaattgctttgtcaccaatactggttttttttttttttttttttgataaatgatactgtttttctttttagtctaaaaactttgcattaatttgtaagaaaaaaaaaaatactactttgtcaccaataatttgtttgagtttgttgatttttattggcttacgcccaagtag

SEQ ID NO: 183597 - DNA, 748 bp, Cannabis indica
agaagtacttcccaagataagagtttgcaacttatcgacccacatactcgtgagtatgttgaaagactaagagatatattcacaatgtaattcatcttgaaattatcacattatgacagcatctcacatttgtctccctcaacatcacagaagaatgcgagaagtacttcccaagattatacttagacacaaaaagctatcttcaaagtaaagcatcataagatggtcatatgtgttgcgaggagaagaggcgtagtcagcataactgctcttatagataaagacaagagcagttatggagtagtcagcataactcctcgtttgggaagagaaaatggtgaagaaggatttgaacaaactgagggtgaaaatcccacaaagatgtagtgcaaacgtgtacgatcccacaagatattgagtttattatgggacggttagctaacattactctacagtccactctcttaagaaagaaattaaagaaagcacagtaaacaagacctggacttagtaaagtactcgagacaagattgtaagctgggaagatcaacaattttacagtggatagtaatggtatgttacagtttatggactgtgtttgcgttcctatggatgatgatattaagagaaatttttaatgagtctcatatgaatccttattctgttcacctaggcacaacgaaaatgtatcaagaccttaaattcatgtattggtggcctaaaatgaagaacgatatattagagtgcg

SEQ ID NO: 183598 - DNA, 644 bp, Cannabis indica
aatacttatcattcaagagtctacgacattaaattgttaataaatgaacatctattagagatgaatctcttaaacagttttttatcaatattttggacgcccactccaatctaaaccttgtaacttagaccggaaccccaacccagaccctaacatagtcacgaacccggacccggaccatgccccaacccgacttaaataaaatcaacaaatgaaaataaaaataaaaataagatttatagaacacacttttattttttatttgcaaaattaaaaacaaaagttgttatagaatacaattttttttttcaaaaacaaaattttaaaaataaaaattttacttttacttttgcgattaaacatttaaaataaaagtattaccaaacgttactatagcatttgtttaatttttttaaatttgtaacatatatactaattctgtaatgtatatacaaaatataattcctatttttgttggtgaagctgaagctgttataaagttaaggtgaaacttttttttcttgttaaaccaaaaactttgttaagaaaaaaccaagaacaaattaaggtgacacctttttttggtgttaactggtagaacttttgacattgaaagatgtagtgtttatttttttttatttaga

SEQ ID NO: 183599 - DNA, 501 bp, Cannabis indica
atatgtgtttatttcatatcattttagaagttcatatttaggatgttaaacaacatacttgttagtagatctaagatcctggtaaaatatttccaacaattgtcactattagcctcatatttggttaacgaaatctgagttaatagtttggtgcttcattgagagccttcgtgaaaaagctcagaaaaaatcctccttacataaaaaataatattcctcttatggctggcaacaaagaaaataatccttatgaaggagccactcatcgtattggaaaagagtcaatgagtccccaaggatcatttgacgtatcattttaacaggccataagctccgggaaaactcaagatttgggaaacagacttgaaggtcctaagataagcaactgttggtcccctccttatctagttgacgaggatggaacttataatctaacaaggtacataccaattgttgaattagaaaaccgcaacctcaggcattgattggaggaagcaaact

SEQ ID NO: 183600 - DNA, 691 bp, Cannabis indica
ttaaaaaattaatataatatacatatatatatatacatagttgttcgtatatatatatataaaaaaaaaacaaaataaaaaacatattgtaaaaaattactaactttgtaatttttaaactgtatttttaaacatgacaaagccacaaataattttaaactgtatttttcgtatagtgtagtgtggtgaaagttttatgccgtctgagcgtgagtaacggtcccaaaatttttattttgtgggacctatttatatatcattaaaaatatatttatacttatattataattattttttctaaatttatttaattttgtgaaaaaaattttactacttaatttataattattgaattgaaaaaattatatttaattttttaaaagattaatatttgtattagtgggtactgtattatctcttaaaaaaatattttaataaacacccctacagtctctattactctctttcacatttttgttttctaattatatgacatttaaatattatacaaaaattattttatcatcaattattattttatcatttctactacgattatatagtagtaaggggtaaaaaaagcacatttaatatagatttttatgttattcttctatttttggagagattgaaaatggcgtacgtctttcctctgatcctcttcccctaccaaacacagtgttagtattgt

SEQ ID NO: 183601 - DNA, 609 bp, Cannabis indica
gttcttttgctatcaaaattaactcataatttagttaattttatatatatatatatatatatacatatattcattaatcactagtcatgttgttacacttcattatataaaaaataaagcaatacgatcgatatgcaaagcagaataataaaaacatatcaagcgtatatgatggcgacgaaagatatcgtaataccttcagccattgatctttaagctttaattcttgtattgcttcagattgggtaatcggactttcaaactctctctactctttttagatggaatttactatttgtacagaatgagtgaggagctcggaaaccaagaccctatatttataggtaagacacttcatcagtatctgtggcattttcaaaatattttgacaattaattcaaaaaatcaaatcgaaaaatgaatgattcggtaaatcaaaatctgaccatatatagaatattcatacttatcatatattgacttgtgatcaaatacagtcaacgagataatgcaaactcaatttgagtgatttcgtactactattagaaatattctattattctcccacttaaactcaacgtaacatatgaataatagcaataggtcctc

SEQ ID NO: 183602 - DNA, 768 bp, Cannabis indica
ctttttgaggtaacacaaaatatatacgagggatatacgtacttttttttttatttatttattcttttgaaagagaggtataaggtgcttttaggattcatccaaaggtataatgcattttttatagttttggcttctaccaaaaaattgttttttttagttattcaaaataatttaaatttgtttaaataatttattttacacgagtataaaataaaaaatacgtgtacaaattttgtataacgcacaagaccataaaaaaatagatatatagtgcatcaatttatccaagaacagatccacataaaaatgagaaaacaattgcccctaaaaagttagaaaaataatatatatattttaattaattatgatatatatttgtaataaaaatataatatttatagatataatattagttttaagtgcaataattaagtacattacaaatatatataatagaggtgaattcaaatccaatctatttaatttttttttaagttttagttttgtctttatcttacaaacaaaattaggcccactcactttaaactagttggacttggtggtggtgtgtgtcctatgtagtttgaaagagaggagtgtagaaccacatcttgcttaagcttattggtttcaaaagtggtacttaattgaatcaaagagggtgctaacttggatacttcaattggcatcttcaccacactcaaattagtgtacacaatgattgtttagtgatgaataagtcttagaaagctctctaattctatg

SEQ ID NO: 183603 - DNA, 538 bp, Cannabis indica
atatatataaataaaatatatatatacaaaaaataaaaaattaatacccaaataatatatacatatacacatattattaattatacacccaaatacacaatatacatatacagatctatcacaaaaacaaaaaaaatccgatctaaacataaatatatacccagattataaatcaaaatgtgcatacaaatacaaatctaaaacctaaaactataagattacaatatgcatacaaatacaaatacccagattataagattaaaaaaaaaaaacatactaaaaagcgtcgggagtgcgtggggatgtactgttggtgcgtcgggagtgcgtcgggatggtggtgcgccggggtggtggtgcgccgagtggggtgcttcggggtggggctgatggtggggaagggtcgggatttggggggaagaggggttaaggggttttgaatttttgaaatggaaagaaaattggagaagtgtggctggatggggggtatttagtaatatggtgtagcggcggactattaggcggcggggggtccgtc

SEQ ID NO: 183604 - DNA, 530 bp, Cannabis indica
atacactgaactacaaattcttttgaaaatatgtcattgtttttttccttaggtttcttataatttttgagtttttaccccacatactaaaattttcaactttttactttttatagtgggacagaatttttttacaaaatactttgtaagttttatactattatttcactgttgttttttagttgttccattgttgttttaattgttcagttttgttgttttatgaaaagagtatttttataaaaaaatcccttgtggtagtaaaattgtaaacttttgcctaaagtctagtatttttgtaaaaatattcttttttggagtgttttcttcctatatatttgtataccattttttattaaacaaaaatgtagtaaatagtagtgatatttttgcaaaggtagttttattgtatgtatatatttttaattatttaaatttaatattttatacgtatatagttaaaaaaaaaaattattttttttggtcatgcaagggtacaaaaatacctaactctagtgactattaatcta

SEQ ID NO: 183605 - DNA, 520 bp, Cannabis indica
agtcatcagatgagggagttatttgatctgacggttgagattgatctaagggtaattagagttaaaaagtagaaacgtgtcctgacactcatttagtgtaccctgagatccatctaatgtaccacggaatacattccgtgaaaatacattacgagacaaaatcatatccctatttttatatattgacaataacaattaatgttttcccctaaaaaataaattaaaaaaaaaaactagaaattaaaattaattaatatccatgactattacaattacatcactttatttccaagaaatttctcaatatttctattcaatattgtatatacacatgcatgattgaataatcttatccttatttaattataacaacagtgagcaatttctaaaatattttttatattttatttacaatttatggtttaaaatttgtaatataaaataagtttgtaaattataaaatacactttgctcaataaaaaataaaaaaataacaagaaattaatcttacaacaactat

SEQ ID NO: 183606 - DNA, 937 bp, Cannabis indica
gacaacttagcagctagagaactaccaattactacactaatgtagtcattgagagttttgatacaacaatgaacatacacaaacagaaaaaaaacgcagaaaaccacaataatttttgacacctactgtttagaagaagttagtcaacaactttgtggactcattacaaaaaatttagaattcattaaactcctagtttcatagcaattgcattgtagtttgtttttggttttgtttagcatcagtctatattcaaaaatatcactgaccataatattattcttaatcagtattatcactgtaattgtaaataactatatgttctgtaatgtactattaatagtaaataagattatattaaaataggttttatgtagggaataaaatctcaatattttgcttgaagtgtgggttttgatcgtgggaaaagaatggagtttaattgaaataaaaaattagaaaatgataagaaagaaaaaaggaactaaattacaaaacttaaattttttttttaaaaaaaaaaaaaaaaacgaagaaaaggtaatgcaatttaaagtgacatgcataaattgtgtataagtaatattttagtaatctttttttaaaaaaaaaaaaaaattagtaaataaaagctcaaaacaaaattattacctacaacttattaaaatttctaaaaaaaaaaacatatcattattgttagaatactgtaaactctgaatatagccctaattaattcatgagaatcaaacaatagaatatagattagcggaagcgtaccggagtccatagaatcgatctttgattggtatgatcttccaatttttgcatcaaaaccttctctctggaactttttgttttcttgatgatggggattcaagaatacgatatgaagcgatgcaaaaaatggggacaaatacccgttatattaccaacagac

SEQ ID NO: 183607 - DNA, 644 bp, Cannabis indica
gtgttgtgtcgtgcataggagtgtagagagaatactactacagaacagagtagtgtcccatggtgatgatggggcatagcatagcatagccaaagtgtggaactttcttgtgtttaaatgcgtggcttgtaaggcttgtaatgtgtatattactgtatgtatcgacaaaaggctttaaaacctccttaaactcaaactactacaacactagtttactagattagattagattctactaacttcagtgagttgaatggagattgacaatttttctttttttatttacttattttttgactcactaaagaaaaattatattctcttctttttctttttctttttctttaatttcttttctgttttttttttttatcttttactttttctttaccacattggtgtttcacattgattatacctatgtattatgattttggggtgggtgggtatatgtagtgtagtcacaacattcctctaatttcgtaatatttttttttttgtttgtaagaaatttttaagaggtttttatacttttatattttaaatagtttttttttggttattatatagattttactagaatttcacacaaaattccacatagcaataaatcgagcaactaaaatcgcaatcaaaatccatat

SEQ ID NO: 183608 - DNA, 610 bp, Cannabis indica
aatctgtacacaaatataaacaaaattttcattagttattacgtcaaaatatgcatgtataataatatataataactatttatgttatgtttttgcatgaaataattgataaaatatcttaccctggataatatggggttggaatgagcaaagcatcgccgggatcggctaaaatgaatgtcaaaagctcattggctgcggttgcgccggcagtgaggacaattctactggggtcaaatttagctcttcctcctctaattttctcctatgaaactagccattgacttgtctgaaagataaaagaccatggtaatcttgaaacaaagcattttctctaaaactggacactccttttccccagctgcaggcttctgagttctcttctaagtacttctctagcaaatcaaatgaaacctgttgcatataaaaagaagaaaagaaaatttagcatttatattattaattaataaaccactaatgaaagtgtgtttaatttgattatatatatacagattattatgtatgtgtgtacttacttgattctcagctaatcccatctgtatgacacctgatgggtaagtgatttcatgataggattttcatcatatgc

SEQ ID NO: 183609 - DNA, 669 bp, Cannabis indica
caaccggaggcactaagtattgggccctaggcttgaggaccctctggagttagacttgcccttgctcttaacgacagtcggcagctgccacctgtgctcggacctcttgagaccttatctcaatagtttcgagtacgttgtttaggaggcccatctgtagtgccggggaattctctacaaaattgaagcaaaataaagccagggacatgcataaaatggttaacaacagttaacaacataaaaataaaattattaagaatacaaaaaagattttgatccgagaacaatcattgactctgctatactttagttctcctcgagcaaataataatacatcttccaagcttaagaaactaccatactgatcgaaaaacaaaacttttttatatttattaagttaacgaaaacttgatcaacacatttatacataatatttattcaaaaaaatatgtttgttgagtgtatttttttttttttaaattttaattcagttactaatcaagttttaatgatttaattaatgatttataattagggttgttctatccgatccaatccgcacttttttagtcaacaacatccaaatccgcactagtgcggattttattttttggattccaatccaatccgcacatagctcaatccaatccaatccaatccgcaaaagtc

SEQ ID NO: 183610 - DNA, 663 bp, Cannabis indica
aagagaccgtatccactcttcagcacactaatatccaaggacacatttattagagaaaaatgataaaagacataaatagtattaggtggtgccaccaataattaaacattgttacatgacaccaatatattttagcaccctttaatgtgtaatattgttatgagtaaatactattttggactttgtgttttacaaaagttatcaattggccctatttttttcaagatactcgttctaatgatacaactttcgaattttaaagttgtctaaaaatgtaaattttattgcttaatttttgtgatttaagatacatcaaagaacatcaaactaaacaaaaattaatcaatatgatgaactaaattaagattcaaaattaaagttcatgctgacataaacaaaagtaaaataattagaacaactctataaagaagaacaaacactagccttcttctttattgctttcaatggagttacaacaatgcatcaaaatttattgaattcctctagaggaaactcaatactcacttgaagaaaattctcttagaaaagcttagattgagaaacattcaaactcttttagagagaacactcaactcatatagagatcacaaagtatagaaaacactcaaaattaaacttggtcttctctcagtgcttgacaca

SEQ ID NO: 183611 - DNA, 616 bp, Cannabis indica
ttactgatctgttaaaaaaggataaatttctgtggaatacaaaagcagaaatagcttttcagcagctcaagaaagcaatgactaacacgccagttctagctctacccgacttttctcagacatttattcttgaaacagatgcgtccagcactggtattggagcggtactcatgcagaatggtcatcctattgcatttttcagcaagaaattagggcctaaatttgctggcacatcggcctattttcgagaaatgcgggcgatagtggaagctgtaaccaaatggcgtcaatatttactgggtcgtcacttcatcattcgtacagaccataaaagccttaaagaattactctctcaagttcttcagactccagatcagcagcagtttttacgaaaattaattggcttcaattttacaatagaatataaggcaggaagggagaactcagctgctgatgccttatctcgtcaacacgacaatgctacttcagtgcgcctcgctgccattacagctgcctgtttcgattttttggaaaattgcgagctgaaaacattactgtcctgatttgagcaaacttcatactcagttacagcagcaagaattgaacacagaagcta

SEQ ID NO: 183612 - DNA, 609 bp, Cannabis indica
agttgctgttcatttaatttaaggcgtattttgttgaatattttgaaaaataaaaataaaatgtcgtttttctccttaatataagggcgcgcttcgtttcggatcgacagaaactgaaaccgccaatgtgcttacgtggcattactttggtggttaaatgggaattctatatcgggttttcttccacgtgtgttaattcggtacgaggttattgccttaccattttggattagctacaacttctacaaaattaattaattaattacggaatttttaaacaaagtgtttatttttttttacaatttaaatttttatacggtttatttttttaaattttcatttatacaattttttttaaaactaacatactattattctttaacttaattagattttataccgtttataatctctttaaagaaactggttgtacatttccttttcatgtcatcaatcaattaatatacacgtttttcttccaattttgcactctatgcatcattctctcattctcatttttttttctttcttttttctgtcattatatttatactcattattaagggtgtttgcggtacgggtgatgtgattttgactatttttcaaatc

SEQ ID NO: 183613 - DNA, 550 bp, Cannabis indica
cacgcttcattgccgaagccctgaaggcagtggctgtaccctttgcccaggtgtaaacggggccaagaaagcccaaatcaataagaccagccctgttaaccatacgacgaaagtcgaaagcgtatcttgatgaattacccggattagcatagttgatacactccctgtcatggagtgtaccattcatatcacccacaagcaataccggttttgtgtcattgagaaccacatatcccaatctttgccaataaacttccttatcctcatatctcggggggccatagatgccatgtaaggtccaagtggaccctggggggtctgaattattttcaaacgagatagtgaatttgttcgaggatatgattttgcaatcaactcctttcatccagcatatacccaatccccccgatagaccaatgggaggaacataatgcattccttcaaaacataacttattacatagtcttagaaacttacttcttgaaagcctcacttccgagagaagaagaagctcgagatggtgttgacggatcaaggtcgccaattggcg

SEQ ID NO: 183614 - DNA, 750 bp, Cannabis indica
ggtttaattttttttctaaaactggttatatttagtaatctaggttaaaaataatttatctagtgttttttttatagttgattacattcagatttagcttatattatttataacaggtttttcacaattctttttatatgaatacaaaattaatataagtatgtatataagaacgtatttttgtttttgtatttgtttcatttgtttatttaacaatttttttatttttagaaattctctatatgttcgtattcgtttactaaaatcgaaatttatttgtttaattgtattttcatgtatgatagtttaataaatcattatatgataatatataaatttacttgtttaatgtgtgcacgtgattgtaatatttggagaaaattgttgttaaaaatttgttgttctgtataattagttttattccgatttgtctttaagctttattttcttgtctaagcattcatgattgcgtttttttttttaatttttggttgctgataaggacgatcaggaggaattattgaggtcaccgtagctaaagaagatgatcaacaattgtcgttttcaccctgacatcatctgtagcagtcaacaaaggtgaaaaacaagagaagaattattttctggttttttgtgatctattttcttacaaataatcacaaatgaagaaaagatcgttgataagagtgattcgcaggagaagatcgtatctttgaggagtgatttgtggagagactattggagagagat

SEQ ID NO: 183615 - DNA, 548 bp, Cannabis indica
ccttcctatttgtgtctgctacgacaatttctctctacagccaaaacacggctacggttgttggaacacttcagattctgtgccctgcttggtacatcgtctccagcaacaacaacttggttatatgcgccagtgccaacgccacaatggtgacggtgagcaaattggtatggagtgctacgtcaatcgatgtgactcaatctgggcatgccttgctcaacggaggaggcgtagggaacaacacgttgcccattctccaatgtgatgagtcaaactactgcttcgtcaccttcaaccagtacatttatgggttcagcttctcatctgcgtcttacttgttttaccttacaaccacccctaaggccaccgttgtcacgtggacaacacagtccgcactgttgctcgcagcagatacaatcgttagcgtaacgttaccgaacttcggaactgttcaagcaacaaggctgttgtcgacgggcttctggtcaagggtattcagtgactgccgatgctatctatgcgtccacgagttcgacattgtactccat

SEQ ID NO: 183616 - DNA, 708 bp, Cannabis indica
atgcatactaaaatggtaaattaaatttaaatttagagaatatcacaaaacgaatctgcttgggaactacgcatccctttctgaccttactgtaattagggcataattaattttacagctttctcgtcttcccattcccatatcatctttctttttttttacagtttgtagtgaaattacagattgaaccttgctctgattttcatacagtaaaaaagttgtaataattgtttttgtcagtgaataatgaagaggatatctcaacttggtatttcaatgttggagctgatattttttggctactccaataataagttgtagaaattataatatttcttccactaatttgtgctataaatttaactattaattataaataaatatttaaatttaattatttattgtaataatatttaaattatatttttaaaattcttataaataactaattgttgaaataaaattattattcacatatcactttttattggtacatttattggtatgttcctgttgatcctcgctgtgtgttttgcaattttgatgaagaaaccattgtccatattttggttagttgtcattttgcgcaatcttgtcggcataggtctagtgtggggctgcaattttctacagaagctacctttgtcgattggtttaaggcgcttctgacatgaggtagagtggctttggtggatgagctcgtagcat

SEQ ID NO: 183617 - DNA, 505 bp, Cannabis indica
atatagtgcatgataatttagtcgacacacgaattttacagacaagttagggtcattagacatatcaaactaacaaactaacaaagaatatatgatagacaacacgaattaccactcctcattttcacatatcgtcaaatgatagagagcaccctagccaaaagaaagtaggtatccattatgcttgattaaagcaactataccttacaaaaatagaacaaaaaaaccaaacaaacaaattgaaaagacacacgattaagttagaaaattccattactagctttcagtaattattgagcgaacatgaccattttggatgcaccattgtaagaggcttctcactcaactttttgtgtagattgcgagctagtggtggcatatagctcctcttcttcatagtaactgttaaaacctagaatttctttcatcttgtcaaaagatggcatgcttttatgaggaatatgaccctctttgatagaagcaagagcatcctgcagtttagtca

SEQ ID NO: 183618 - DNA, 534 bp, Cannabis indica
agtgaaaaaaaaaaaacaaaaagtaagacaaagaatgaatgtaaaacaaataattctgcttacctcaggaacgtcacattgtgtctaattataattctgctttaattacaaaaaaaaaaaaaaaaaaaaattagctgcgaaagggaagatcaactagccatgacacgaacaaccaggtcaacttcaatcatatccagtcaaactcgtacaaatataaggataaaacatctaaagcgaaattagtattggttaacaaaatacatattattagcttaatatatttaattttcctatttattccaatttctgtatatacttcatcaaaaatttaattgaatttatatcgaataatcaatgcgccgaatttccacgcgatgatttcaattcttagacgacgattaccaattacaacatcatttccgtatatatctattctaactgcaaccccgccaaactaatggattcagcagcaaactcgtttggaggttctcagagcctcgtggccttggcccaacagctacgacactacaaggc

SEQ ID NO: 183619 - DNA, 546 bp, Cannabis indica
gtttgagtaagaagattgtgttgcaggtgtgatggaagaggataacaagaagaagaaaagagcagcaagtaaagacatagcaagacttgcattatctgatttagccaaatattttgatctcccaatagtggaagcctcaaggaatctgaaagtaggattaacagttctaaagaagaagtgtagagaattcgggattcctcgttggccacatagaaagatcaaatcgctggatagtctcattcgagaccttcaggtcttttttttgtccctttaatcccatttagcgctattacaacacgttcaaaggaatgaacaccgatttgtgaatgcaatttttcgtgttgtgtgtgtttgtaggaagaaaataggtggcaacaggcgaacaaggatgcagctgaagcggtagcaaagaggaaagagatgttgaagaatgaaaaggaaagcattgagaagacgcctttcttggatatgaaaaccgaaaccaaaggttcaggcaagatgtttcaagagaaggcacaagacagagttctcaagaatcaacaggca

SEQ ID NO: 183620 - DNA, 576 bp, Cannabis indica
ggacctaaactcaaatatggacccagcaggggatcaaaaaaactcgtaccaaaacttggactaagactcgaatcccgatcccaacctggacccagaccttgacccagaacaaaaccggaacccagaatcagaattggaattgtgactaggacccagacctgggaccagaaccaaacccaaaccataacccaaactcgaaccaaaacttggatcgagaccttgactaggactgggatctgagacatgggacacgaacctagaccgagacctggacctgacctggtcaagaaccctcgctgggacctaaaccaagatccagaccctaacatggacccgaacccgaacctggaccaagattgggaccgagaccttgactcgaacccggattgggacttggattcaaaccaagacacaggacccaaacttgaacctagacccataccatgacctaggaaatgcacttggatgggggacctaggccccaaaacccagacccaaataggaatccgggactcaaaccaaaataacgacctaacctggacccaggaatccgaagtcagaccgagacccagaccc

SEQ ID NO: 183621 - DNA, 946 bp, Cannabis indica
taatgggaaacaggcacacccgaatacctttaagaaggtgtagtcaggtttttgagagaacagtagctcatagggagtgatatagtgttgtttttgaacaggtaacctgttaataagatatgtggcagcagtaaaagcatcccaccaaagtgtgagaggaagtttagcttgggcaagcaaagtgagccccatttcagtaacatggcgatgctttcgctcagcacgaccttgttgctgatgagtgtgaggacacgggtgtcgaaacacaatgccaagtttggcaaatatgggagcaaggggtcgaaattcaccaccccagtccgattggacagatttgattttagtgtcaaattgtcgttcaacatatgaattaaactgtaagaaggttctagtagtatcagacttggccttaaggggaaatatccaagtgaatttagtataatcatccaagaaatggatgtagtatttgtatccttcaatggattggtggggagaggggccccaaagatccgtgtggattatttggaatggagccgtggtcttattttgagaagggggaaaatgaatttgatgcaactttccatattgacaagcattgcaaaaagagggattagcagtcggaaggtgcaagaaatgtaaaactttattcatgacaactttattggggtggccaagtcttttatgccacaaatttacaagattttgattcttagtacattgctgtacagtttcagcaacatttgcaacaacagatgtagaagaaaaatgggaagtctgaggaggttgtagctgatataacccttctttaacagttccctgaagaagaggcttcttcgtgatctgatccttgacagaacaacaatcaggggtaaattcaatggtaacatcattatccttagtaaatttagagatgctaatgagattcttggtgatggatgggacatgc

SEQ ID NO: 183622 - DNA, 564 bp, Cannabis indica
ttttcctccaacacttcttgacttcttgtatccttaggttggtaggtgaatttagctataaagttggcgaatattttcccattgaccgctgcccgtggtacataagaaatgtcaaattggctgagattaatcatccattttagaagacattttgaggtttcaggcttgtgtaggacttggcgtaaagggtgattggttagtactactatggagtgagcatagaagtatggctttagcttccttgaggccattatgagtcgcataagctaaacttctccatttttgggtataaggtctcagcatcttttaataacgtaatacactggttgttgctatttcccctcccctttcacaaaggccacactagcgacatgtcttgaaagacccaaagtaaagagataacatttctcctttctccagtttcacaaatagcgatggcttccccagatgtctttgagtctccagaaagcctcttcatagtccctcacctaggtgaacttgcttgtttcctcctagcacattaaaagaacagtagacatttgtctatcgattgcgtagatatat

SEQ ID NO: 183623 - DNA, 899 bp, Cannabis indica
ttatgtatttggacttgtcaatataaacattattgccaaacctatcttaacactgcagatgatgatataataaaaataatttcttttttaacaaatttaataataaaataagtcttatcaaaataataataataataataataagatttttttttttttttgttatttcaaagtaattttttttgtatttaattattattctgtatactatttgattacagtttagagtaatatatataaatatatatatataatatatatacaagtaaagtgagcatgtgttagttagaaaataactaacttggctctaacaaaaaggtaatcgtaacagaaccaagaaaggtctaattgtagtgtaacagtcttgaagaacaggggtagtattgtaatacattgcaattacagaaccaacttaaatcgtaattcaaatttatataacaacctacatagtaaccaccagaactacaactcaaaatcaataaaaataaaataaaaaaaaaataataaagtaattcccttaataataattaaatccacccaaaaaaatatacatgttattattatatagtcaataatatggtttggttaaaaacttatttgagtcactcagctcagaatttttccgaccaactttattggctggattaattatcccaataaaagaaaaaatatatatataatcatgataaaaagatatatttatatgactgtattataaaaccgaccattaattgatattgtatgttgataaagatgatgatgatataaagggataacctttaaatatgctttcatgatatttatcagatctttacaccatatcttcaataaagatactttacacgtgaatattatatatgtatatatatattatatatacgtaatccctagcgttttgt

SEQ ID NO: 183624 - DNA, 661 bp, Cannabis indica
tttccaattgttgtcgctgaatggtggtacatttcgcacacagtggtgtagtatccagatacaaatccagctcctgccacagatcttgtaagtccgaaaaatattgagtaacagtttgattaccttgcttaatctctttaagcttggtgcgaatttcgaaaatctgagaagcattaccaagatcagagtacatttttcgggcagcatcccaaacctccttggcagtcttaaagaatagatatttgcggctaatttttggttccatcgaattaattagccatgcaagaacaatagaattttcagcttgccataccttgtgtgtggtgtctgttggagatggtgcagggagatcaccagtgatgtacccaagtttcccacgtccacaaatgacaagtttgactgattgtgcccattgcagataattttttccatcaagtttatgggctgtgatatgaagagagttgctgtcatagtttatggactgagttgtagtttctgtggtggtctgagaattaattcctcactggttgacatttctagagaaaaggagggcagagatagatctggactttgactagttgttttgtttttccttttttttatttaaaagagagggaaactagaaaaaaaactggaacagaaaaaaactgaatggacagag

SEQ ID NO: 183625 - DNA, 510 bp, Cannabis indica
attgaaagaaaaactttctttttgatcccaaaataaccctgatcattaaaaaattaaattaccatataattagttgacttgaaaatattaatttgtaggtaaccatatagtcaccactaacttttaataaagaaatatataataaatagtagttatttttatttcatgtagatgttataatcaatttatgttttaacattatatattggaatattattatgtacgtaacgttactaaacacttttcatttattttatttaaaaataatgtaaaaatctatatatccttatcacaaaaaaatgatgaagtcactatcaaaaaccagtgcaaaaaagataaaaacgacaagaattttaaaaatttgaaaaggaaacgttacatttagcaagaaaaaaattggcacaattcttgtaaattaacttggcaagatttgattttgacaaatatttatatactagtactaataagtaataagtgatataataaagtaatatatataggtcattttcc

SEQ ID NO: 183626 - DNA, 694 bp, Cannabis indica
actgaactcttaaaaaaaaatctagatctaatggagattaatacatgaagtcgcttttgtttatatttttaagtagtatgtatgtatacaattaatttatacaaataacatagaaagtgtgttattgttggttatacaataatacatttctataactaagaaaaactgttatgcaaagtggtccaacctacaataacatagtcggtcttaacacatcaaaaagtgttatggtaaattttcataacactattttggtcttatgaaaagtgttttttcttgtagtgatactaatcctactgaaatttttactgaaatttcggcagcataacatctataattcggacgttcccgaaaattttaaacatgcaattaatctattaaaacatccacaataatacaaacaaacaaaactataattaacagtacaaatattaccacccatccgaccgcagtcatgcaattccagaacttacttcactatggatgaatatctaggatattcaaactcttctaggatttataaaatataaaaaaataaagtttgagtagcttaccaattccaagctagcgttcaagcaatttctgcgaaagatactaccacaattgaaaagctgcatgtgaataaaagtagtgttggaaattattttaccaggatcttagatctactcacaagtatgttattaacatcctaaat

SEQ ID NO: 183627 - DNA, 928 bp, Cannabis indica
ataatattgtttttgggtccgcctttgatattttatgaatattctttttttttcataaataataatttatgaatatagaagagttgggaagatcacttgttgatgccttgatggttaattaagcacaccaaatgctctaatctaattcgtattcgcaattatataataatgatcaatattgtataagccaatttgaacatagggaggaacccttcaatgaaaaaaaaaactaatatttctagaattagaacccactttaataggagccaaattggacccattaattatttttaaaaaagtggggaaataaaatccacaatttgttcataatatatatatcttcaagagtaatatattgtgatatacatcatccctttatatatacatacatatatatatattaataatagtaaaaaggttcatgatgtgtatacgtacaaactatctgtattgtttaaggacgtatatttatatatacacacaattgcgtcatatgtacgtgttccattttatagataatcataagtgcgtgccgtacgtatgaaagtcattcctatatataatgttattattgttaataaattaagattcattgatgtttaaaataagcaaatatataaaaatgagtagtcgtttaaagataattctaaaacaaactcccggccgtattcgattgagtgatgaattatagaaaatcttttgaaaaatgagggaaaaataatggtctttatccaagtgtgtttacagtttttttttttcatatatattttgtatgttgtatattaatatattgttgtcagattagggactaagaattgaatccaaaatttatacacacttgacactagctagatataggataatatatttacgcgtgatatagcaagagagaaataatattcgtagtacaaaaccctttaatatatgc

SEQ ID NO: 183628 - DNA, 612 bp, Cannabis indica
ctcgttgcacggtttagtaagcttttatttggttagtagtttattttagtagtatgatttaagaaaagcctgttaagaagcatgttagtagcctgatagtagaataggcgcatgtttttaatttctaaataagcgacattaataataacgaaaagggagtcctagccctcaggatcgagaggaccgatagagcgtttctgtgcaccaagaacccggggaaaggggaagaaggagccagagatacccttcagttgacttaagacaccaaatcaacgaaaagcacggtgacttacgggatcacctggataaaaagaaacatataccagcagtcgccgcaggaacgccgaacgaaggaattttggcagagttggcaatactgcgcaaagacatgactcgggtctcccggaggcaaaaaggggatgactaagactccgattgtgaggaccgggagccatgcgcccgacacatttttgaggcggagctccccgaaaactttaagatgcccgagatggcagcctacaccagggattcaaaccccagcgatcacttgtctcgatttaaccgagtaatgacggttatgatagtcagtaatgatgccaagtgtttatgctt

SEQ ID NO: 183629 - DNA, 844 bp, Cannabis indica
catagtattatttattatttaataaaatacgatccttaattatacaattttctaaacgagtccttagtaagcataataaaatatcgctaactaatcgtaaactcatagttaagtagatctcgagtgatcaaaaatcaagagtcaaagactaagagtgattatgaggactcacggttaagtatggggatttccatagagaataatctactctagttaatatagtagtcaaaagccaaggcaatcctcctcagtgtacggtacacaatcgtaaatcgtaccatcaaatttctaatatttattttttattttccccccaaataattgtttttaattattgaattcgtaaaattatgattttggcccaaaaaaaaaaaaagagagagaaccataattaataaaaagatatattattatcactcaaaaagttgaaaattatttgcaaataatgaaaaaaaattaatatttttattcaataatatatatagcttttattcaatatataatatttgcatagataaaataaaaataacgttttgcaaaaatatataagtttagataaagataatggatatgttgtggtacaaaagcataagaaatcagcattaaaaatctcattattagtattatgacatatattaatcttacccaaaaaaaaaaaaacaattatattaatttacaagagtgttgtggtacgtacttgtaaatataaaatataagagccaagatattttagaagtagacagcttttaggaaaaaaaataattaattaaaattaaaagtcataataaagatcactatagtccaatcttattctgtcttcttctgcaaggccgacattgtttct

SEQ ID NO: 183630 - DNA, 571 bp, Cannabis indica
gttgttgttgaatttaatggttgaattcatgaaataggtagatgataatcttgagttgcatgtggatgttctgttgttgatttaatcatatttgtttttgaacttttgattgtatgtaggttgagctttagttgagattgttggagcatttttctagcttgaatcaatgtatttttgatgttgtggttgcttgaacataaggttaaatcatgcttggaagttcaaggtttcaaatgagaagttttgttgaattgtgttcttgaatggagcttgatgttcattgatttgtaatctgaatttaggtgtgttttattgggggatttgatgcatgaagtaagaatttcaaatctctaatgtttgttagcaactctactttgtgatttgagagtttggttgtgaattgagatgaaatggttgggttttcttgctgaaatttgtgttttagcttgctggtttttgggtttgaaacccaggtgtcgcgacatggattttagcatgccgcggtccgcccctatggatgagagctgggaattggtcccacatgccgcggcatggcttttgcatgccgcgg

SEQ ID NO: 183631 - DNA, 502 bp, Cannabis indica
gagctcgcctcagagatggtgtttgagtttcactatcagcaaacatgtaccacatcatatttttttagatttcaagccacaaatctcttggctgataatctaaattgctttgattttgatttttattttgtgattttcactaactttctttattattttttgcttttctctcgattataatgaagtctccctctctgcctatgaagatgaacaatgagactttaggtataaatctttagctcagaatgagttttatttatttaaagaaaatcaaaataaatttaaaaattaaaaaaatatatataaggggacacaaaatattaggattgtacgtaattttttataaactactcaatctaaataatttgtccaaaccaaattaaaaactcaataataaatgcaaaccaaaaaactaagacaaaaaatataaagtgcccaatctgagatggcttgaaaataaagccaatttatccaataaacatgaactaatctgattaagaac

SEQ ID NO: 183632 - DNA, 661 bp, Cannabis indica
acttgatcacttatgaataattatagacacaaaaaacaaccaaaattaattaaattacacacacacacacctgtctttctcgctctctcttgttttcttacaccagtgtacgtgtgacaagctcatctaaagcacaatttaacaaaaacaaaaaaaaaaaaaaattatctttgataaattaaaagtatcattgaagctcccttacaaaaaaaaaaaaataaaataaagtattattgaagcttattgttttgccgtttcaaggaaaaaaaaaaaaaagacttattgttttgttgttatacccaaaaaaaaaaatactgtgtcgttttcgcttattatattgttaaatagttgactcgttatgtaggtatagttaatagtgggttctttcctgtcccttccccacacacacacatatatttattattgcagaaattcccactataatttatatataatataatcaatatccttagagtacttataaaatgagttattatagtttattctctaaaatataaagacaaagtggtaaaagtgatatttctgagctaaatttgagcttttatgtatatttttttagcttaataaatagtaaaaatagtattacatcacatgagctaaaaatataaatattatattaatatttttaaaagttttcttt

SEQ ID NO: 183633 - DNA, 615 bp, Cannabis indica
aatatagttgaacatgatccacaaataattgagtacagagaatcaatatttaagcaacataaatttagaatttctaatatgggtgtaatgaaaaaaatgaataatattaaagcgtatagataatttatggagtaataaatatctgtgcatgtgaatctatattatgcataatcatgtgattcaaacaataccattcaaacaaatatagtaaatacagtaaaatgtatgtatatcaaatgattcattgttggagggactgagaattctatacggagctagatttaaagaattggatataaatttgtttagaagatgtttggagcagttcaaaaatatttacgtgatgatatttgtgaactttttgagatgaagatttttcattatatttatcatcgcaagtggatgtgattttccacctaatctttagcttttttttttttggtaaaataacaaatatttactgttattaatattatttgattaaaagaataatatttacataaaaataaagaaagaaagagggttgtgactctcgaataattagcatcaaatatcaattcaaatattaatgagattttgattttatttttattttattattttattatatataaa

SEQ ID NO: 183634 - DNA, 539 bp, Cannabis indica
ggggctattggaatgtatgctcaacaacaatacaatcctagttccatagtcaaatcaagaatcactactatttctatggttgaagaaactgaaatacatggtcgagatgatgataaggaaattttagtgagtaagttgatatgtgatagtagtcaaaagagtggtaaagggattgatataattcctatcgtaggaatggggggacttggcaaaaccacccttgcccaactagcttataatgatgatagtgttaaggctcactttgataagcgaatttgggtgtgtgtctcagatccttttgatcaaaaaagagttgctaaggcaattgttgatgggttgggaggaaatgctcaaaattatgatgagctagagagtttagtgcaatgcattagtaactctatcaaagggataaagttccttcttgtcttagatgatgtatggactgaggagaaatcaaaaatgggaacaattaaagcaaccctatgcagggtggtgccggtagtaggatactagtgaccacaagaaaagatgagatcaac

SEQ ID NO: 183635 - DNA, 693 bp, Cannabis indica
gttgttcctctgctaccaaattcaactttctaagattaaatacttcaatttcagttactaaaacctctaaatcttaggagaaattggcaagtacttggttggattttcctttaggggggttcgaccaagagagtgctagagttaaagtgaaacctaatttctgattttgttttcttaacttgtacataaatctaagcttatatgataaacttaataatgtttatcgtattccatgacaaattactaaaatacacttagtcataaacttacataaacatatatttaagggtaaaagggtcattaccctaataacccaacaatcacaaactttctaatagtctataaaaatttcggatacctctaaaatattaatctataccaatgttacatctttagccaattcatcgaattttattgttgtcaaatataaaaataataaatcacacataatgcatatgcaatacatatataattcaataaaatctctgtaatttagaaattatatcatatttgcatattttctaataatagggcttatttctaatattggatatattatatcataattaactataatatactgattaattattaattttcatgtctaattatgcggtcattacattagaggacgtgctcctctcacctatgcccaaatggtagtggtgcaactgcagctaaaataggtgacga

SEQ ID NO: 183636 - DNA, 1210 bp, Cannabis indica
aaacgggaaacttactaaaatcgggtccgatcttgtttgattcctgccaaaaacagattagatattctgattgtatcaagatacaatcgaaatcaataaggaaaaggcaataaacaaagtttccctaaaaaaggataactttccaaaagagaattccttctcttttgagaagttttcaacaaaggaaagttcagctgaaagtgcaactttccaaacaaggaaaatggcaactaaaaccgaataaaagaagtaagatttcgaaaatgaatgcaaggcaatcttaccataaaaagaaaaaattattttgtcacctaacttgccaaaaaaggactttacaatattatattttattaaaaagtactcacttttgtgagtgcgtttattaatatatcattatcttctacttaaatgtagcacataatttacattaacttaaggcgtataatatagacatcatttataaaggtgagtatattttaaaaaacatgaaaatataactataaattaaaataaataaagtaaagtggatgtataatataatttccttaaaagaaaaaaaaacatgagcctcattccaataaagtcttgataagattttgattagagcatgtaaacacaaacaaacaataataataatacattagatgattgatcaatcccctcatttaaaaccaaattaaaatgtaactaatctaaaatgtaaaaaagtattgcaattttaatttattttctaaacttaccaaaaatcacccaactttctttaataacgagctaactaatttggtactttaacttgttcttcgtaaacaagaatttcgtttgcgacattgctcaattcttcgttgttgtcttcctctagcctttttatgtagccaataatcaaacctttgactataaagcaccacgtatcccatacaaactccaattattagaccacatccatatcccaacatcactattttccaatctaatattattatgtgattggtgtgctcctcgccattatcaccatcttgttgcatctccatgttacatgatttagacaaaggaaatccacataattttaagtttccttcgtatgaatcattgttgaatgtttcaaattggtttccaagaggtattgggccttctaatttgttgtaagaaaggtttaagtatgcaagttgtgttaaatcagtcattttacttggaatttctccgcttaagtcat

SEQ ID NO: 183637 - DNA, 660 bp, Cannabis indica
ccgtgctcatttgaattcttctaatattgctagcttcttgtgtctctatgatctgaattgtgtggaaactagctctgataccactattggaatcttaccaattcctacacaaaaataaactcaacacaaatttaggcccaaatagacattttatggtacttatctaaaatcttttaatgcgtccactaaaagaattagatcgatacaaacctagaacctcaacccaattgccataccaataaccctaagaaaaccctaacaaacctcaaatgtttgatcaaacattggagaattattttcctccgtgaaaacactaaacatggagagaaaattaaggttttaattccgaacatgcacacacacgatcaattagtgaaacacaattagaatcaaatagaagaagagaaagaatgaaagacagtatagaaaataccagattttgtcaacattcacccaaatgataggctacgtcttcgacgagcacgcctcagcaatactcgagctccactatagtcaataacaggtacagatccttgagtctctcaagatttcatgtcacaattagtttggcagataatcttttatataacctctcttcgaatgtgtttctctctttcttttacagcttctctttttgtttctcttcttttctagtacaac

SEQ ID NO: 183638 - DNA, 533 bp, Cannabis indica
gtttatgtggctgtatgagggtgtgacagctgccctctttttgggctgagtcaatgcatagggaaagtagtcgactttaattttactactaattttagtttaaggaaaaaagtaaaactaactaagtaaagtaaaagtaaaaagtaaaaaaaagtaaaaaaaaaggtaaaaacgtaaccctaacccgtaaccgtaaccttccttttttccttttttcctttccctttcccttccttttccggtttccggttacggttacggaaactaaacctacctaggtcggaacgggaacgggactactacttttactttttttaacttttttaactttccttcggtaaaggttaaaaacttaaacggaaaggttacttaacggttaagggtttaggttaaaggttaaggtacggtaaaaaccccgttaaaacccgtaaaaccgtttaaaaccttttactttttcgtttaggttaagtttagtaggtttttaaggttttttaggttaggttttaagtttttttaggttttttcggttaacg

SEQ ID NO: 183639 - DNA, 572 bp, Cannabis indica
gtaaacagttttgtcataacaattttagatcagattattattaaatttattttgacaaaaaaccagttcatggtcttatttgtactattttaaaaaaaacaaggtctattttgttatttaacaaaacaaagcgttcgattgataacttttataaaatacaaggtacaaaatagtatttaccttaaatattataagagaaattttattcgcacctaaaaaacttataaatgtactttattttaataatttttattttacataaaatatatatatttaattatataattttctttttaattttttcttccaactcatatttttttaaaaatatgtttattaaataaaaaaattatatgaaattttatgaaagaattataaaaaaaaatatacatgatttaaaaaagttataaaaataaaattaaaattcaacacaaaataaatgtaagaatttttttaaaaaaagaatattaagagaaatttttagtaaatatttttagagaaatttttaaattaattattaaggtgtactagtactctcattataatattaacctcgcaaaacatacatattc

SEQ ID NO: 183640 - DNA, 731 bp, Cannabis indica
gttaaggtgtatgggaatatgtgtggagtctgtaataataggtggtccaaatgtcggcatgagattcggaactagctcgagttaagggcattaattagtcacagaggaattttacctttttttttaattctatttttaaatttacgaattcaacacttatttttcatattaaattcagttgatgaattttattggtggaagaaattgaagatgttattaaatgtgctacttttttttttttttttaagaaaattgttatgcgtctatatagtatatatatttttatttattttgatatttaaaataatttttaattttttttataattatatacgatatagatatttgtaaaattttagcgtttaaatattttgttgcataacgaatggtaagtagctgttaaattttatttttaacactgtaaattatttgaaatttttaaaaaaaattacacgtgattttaaataaattaaaataatgttatggatgccgaaccagaaattctcgagctatgatcattattgttaatttatatattttttattataatattagatttgtaaataattttttttcttcacaaagtcttgaatatgtacaataatatattgtgtttatctcacattttttaaggtattggtttcattacgatttttttatttttttaaattagtagttttttttattttaaaaattatgtttatttttaattgtttttttcatttgaaacc

SEQ ID NO: 183641 - DNA, 691 bp, Cannabis indica
gtaggaggttttgccgacaaattactctaatgaataaataataaatttagtttattatttatatttttgaaaaaataccccatcaaaactcaactttatttattttaacttacaataactatatatggacttctttatatttttcttaaaacatttaaatattatattttgaatactttttgaataattaataaataattaacatagataataattaacaaaatatttgaagaatccgaaaaacctaaaaaaactaatctcaacttctagaacataaatagcaattgtgctaaaataataataaaaaatatttatatttaaatattttaagctaaaattttattgttgagttacactattttacaattgtccaaaaccataacaataatgagaataagtaaaggtatgtaaaagacaataacatacattttcgatagaaagattctctagttatatcaaacttttaagggagagtagatttttttgttgttgttggtgttgtcactttatagaagaacatatttatataatcaaataattattatttgagttgttattgataattatttataattaaacttttaaaaattaatttgatttattacttaaataattatgattatttttacaaaagaaaaaaaaaacacaataagtaaacaaaaaaaaattacaaaaatacgattagtaaaaa

SEQ ID NO: 183642 - DNA, 574 bp, Cannabis indica
  modified_base (389)..(389): a, c, t, g, unknown or other
ctcagcaaactgagaatctcttaaatttgttccacgaagacctctcatcagtatcgccaattcttcgttttcttccatctgtgccctcactcttttaatttccttcgacatatctccaatcctcgaggaaactccattaacagatttcgccggcggaggaggtttcgacgatcctgccggaggtggtttaggttcggtagcgaccgcaagaactcgactggtagtccgtttggggatccgaattctttcgtacgaagaggatctacgggtcgggaaggttcgacgcagaggctccatacttatataattcaggcccggccctggacataggcgagctcggcctgtgcctagggcccacccagcccaggggcccaaaattttttttttcncttttaaaatatacatttttttacaattttgaaaaatccatattttttctaacataagggcccaaaaaaaaaaatttcctgtagcccactttgttttagggccggccctgttatatatatataacaactatagttaaacaatatcaaaaaattataatatgtatactacctaagagaatattatg

SEQ ID NO: 183643 - DNA, 785 bp, Cannabis indica
cacgctctttaactcgtccgtacatctttactcctctacttccattactctcttgctctggtttctttgtagaaaacagagacagagtatggagcgtttatcttttatttgttgttttctcttgctcatttctatctcagggttcgcaggtgagtgtaagtttctttttttttttttttttcaactataattatttttacttcttacgctttcaaaatgccaaacgatttagagaaattgtcatggagttcgtctttgctctcttttagtttttgtatataatgttggtacatttttgcagatgctggttcaataggagtgaactatgggcgaatagcgaataaccttccttctgccgtgaaagtggtacagcttctcaaatctcagggtcttcagaaagtcaaggtttacgacgccgacccttctgtcttgaaagccttagctggaactggtatcaaagtcaccgtagatctacccaacgagcttctttacgcggcagccaaacaacagtcctttgccaactcatgggttcagaaaaacgtcgctgcttattacccatctaccgagattgaagctcttgctgttggaaacgaagtcttcgtcgacccgcataacaccaccaagtttctcatcccagctatgagaaacattcactcggctctaattaagaacaagctggattctgcgatcaaaatctcctctcccattgctctaagtgccctacagaactcatacccctgcatcggctggttcgttccgacctgagctcgtcgaaaagcgtattc

SEQ ID NO: 183644 - DNA, 709 bp, Cannabis indica
actaaaaaatagagtgttgtctgatcggtttcttttctcagcgatttcctctcaaaggacagggtgttttaaaagtctattatacttttagataaggaaaatacaatttattacaagtgaccagttatattcatggaaaaatatatggtgtatatatttcaatataaactctaaaatataatttaagatacaatatttttaaaattcaaaaatgtaatagcataaaatacaagagctaaaaagtaaatattttctctataaaagttattagcggttggggttttttttttttttttttagttctaatcagggttctaattgtttctctaccttactatgtggcttttttttttttgaaattagcgtgatatcattagataaaccataaactagacctctcggtcattacataacaggttctccggtatcatggaaaccgggatagatccaaacatatgatgagcaaaggcccatctagccacattgtgagcagcaaagttacatgttcgcttaataaaagaaaaattacagctaataaaagattgagaagacttagtacaaaatgagacgtaattttcaagcgcccaacgagattccaatccattgagagcattgatcaccaccctcgagtcattctcaactataataaacttgtagcccatctctaaggcagtcgaaatcgcaaggcagcatgcctcagcttcaccac

SEQ ID NO: 183645 - DNA, 732 bp, Cannabis indica
atttatggaataatgaaggcaagagtaagcagcaacaacaaaagaaatttccaaaccaggcaacaggaaaccaaaatgacaaaagcagaatagataggcaactcaaactcagccagtatctaacaaccaatcacagtgatcattcaaaagccacttgttaacatattatcttggctggcaagaccacttgccttagccaaattggataaaaggggtactcaccccactcgatagtattaaaaaataaaaaattgtggacctttggtgaatcttccttgttagccggtgtatatcggcacctaataatgattttggtcagctaagccattctctcaatagtccttttttttaacatatttgaaagggtctaagtgagttagaagccgccatatacgattctagtttccattaaataatacatataagagtcgaagcttggagagtggagactgaagcccctaatgagaaagaaaaattaattaaataaaaaggtgtcatttggattcatttagttgttttgctgctttttaaaacccaataatccaaaatgtaaaatttttacggatttgttcttttacaagtttttacttgttttttttttcattcgaaaaatattatttttattttggtttcccataacattgtcagtggcggacccagaatttaaagtgaggggggcgtaaataaatttaaaaagaaaatataaagtgtagttagtgggatttgaacctt

SEQ ID NO: 183646 - DNA, 511 bp, Cannabis indica
gtaaatgccctggctaaggcattgtctggacacaaggatgaggtgcttttttctccctacatattatatttgttattcaatatttttccagacagaaaattatacttaataggctttttaatttagttgcaagcttattagttaaattatttgcataataacttgctacttttttatatctttctgattcttgaggaattgggatttgatttattagttttgagcttttttccctctctcttttgtaatctataaatttttatagggatattcctttcattatttttacgtaattttattatttagctctaactaggaagacactgtatgaacaggactacatataaatgtaattatgaatgttgccgctgtcttgttgtgtcaagtgatgatcagtcgagcttggattttactttatgatttttttttatgtaactttttgtgctggcctactatataattctacaatacaagtgaataaattcagtgtctggttttttatttgtctcct

SEQ ID NO: 183647 - DNA, 641 bp, Cannabis indica
atataaaactcaagttttgaaaagtactcatatttactcactaaaagtttgtggttttgtagtattctcaacaaagaaaaattccaagtttaaattcccctcttcccaaagtaaaaaaaaaaaaatgtgagatccactatattattattacataaaaaaaaaattacaccaaccaaagagttattccttttaaattttacatcccaacactttccccaataccacagagcacacaagaagtaacatatgatttaatatcgatattcacgcatatttaattacagtaaataataaccactcgaggctagctcaagtggccataaggggtgcgtatgtgttggaggtcttgggttcgagtcccaaattatgctgatgtaatatataaacgcttaaatcaagaaaaaaaaaaaaaattaaaagtaaaataataaagtattgtcacataccatttggtacataccatttggtatttttgtcttcgaaattgatcctgattcttcattcttttcttttcctttcttttttttttttctacctatggaaaaatttgtttgtcgtgctctcttgtggttcttaaggagacgggtcacttatatataatatatttctaccctttttagaagtatatatatattccttcc

SEQ ID NO: 183648 - DNA, 560 bp, Cannabis indica
  modified_base (494)..(494): a, c, t, g, unknown or other
aaactaaacaatattcaaggaccaaaaccaagctatatataattttagtttttggaattatataaggaatgaattgactaacccttgtacattattaacaatattgatgtctcttctaatggcataattcattactgaaaaaacaacatttctaactttccaaacctcataaactgtggccataagagcaacaaaatacactgccttttttaacttgggcaacttagacacctatttcatgagctgaagcacattactttacattttccaactaaaccaagctttgataatataatattcactaattaaagcattatctaaactaaattgtgttcaagagtctcagtcacacaataggcagctactattagaaatgaatcaatgatacctaaatgcttcatgtaatgttcccgcttcaagtttttattgggtctttacacccacagaataatgactcttatacacgagtacgtcactctggctgcatcctaagnttgatgactgaccttcagaccaaacgagtatttttagcgtactttgtcctcactcacaggcttctt

SEQ ID NO: 183649 - DNA, 598 bp, Cannabis indica
aaaaggagagagagaagccattcgcaacctcagcgtcatcaaagcatgggctggactatatcaagctgggccaacgacgaaggcccaataatttgttgggtgttttacaattatataggaaaatttacaaaaatacttcaatttgggtaagctttacaaaaataacattacatggcattttttacaaatatactgctctggacttttttatttcttttatactgtgtattgtataccctagaacacatacgaagccttcaccttcaacatctacagaccgaactaccagagcaacactagaacagttagaaaacaactatttttccagttataaagtaagtatttaaaattccaatcctgaaacaataatataaaaaattactaaaataacagtagaaatacaaaactaaataaccaaataaaatcacaaaaaagaaaatactatacctcaataactcttttgtcagtggggactaccataacatcacgagagaagactttcaccttgaaaaatttatcctaaccctaaatacattaaaaaaaatatatatactttagaacaataaaaaacaacggttaaaaaacataaaaaccaagt

SEQ ID NO: 183650 - DNA, 691 bp, Cannabis indica
atttttgtttgtttttcaaataaggccattgttctaaaattttatttaaagttctaaatgtaaaagtgtgactaaaatttttattccactttttatttttttcaaatataaaaactgggataaaaagtctcgtttgttgtagtgctatcatcattttttttcaaccttttagttaatttttgtactaaaaaacacatcttgaaatctttttttttttaatttttatttttttaacgatattcgttatagttataatatcaagtttgtaaatttttaaaaaaattatgaataagacgttttcttataaagagatgctaataaagcttttctgtaatgatttaggctctctcactacaaaaaactgctacttctagtgacaactttttagtcacaactcaatttttttttgtgactaaatatgacttttaatcacaacaaaatattacttgtacactaaaacatagtatttggttacaagttgttactaatttagttttagtcacaacaagtactgtgactaaaaatacatttagtcacaaaaaattgtaattcttgtgactaatacttttatccacggaccttttagtcacaacataggaatcatgattttataatcagtcacaaatttttttacttttagtcataagtttgttgtgactaaaagtaagattttttgtagtgtctttgtatg

SEQ ID NO: 183651 - DNA, 605 bp, Cannabis indica
aaaaagaaaaaattaatacatgaaaaataaaatgagtagaagcaaattaaatatccctaaaatatttacatacactgccacatgtaaatgcattaatcataagtcaagagaaaggaaaaaaaaagaaaaaactcggcacaaagacaagtctcaatacttcctctgtgtgaatgaatcccacgaccaatcccagaaattaaaacacacatatgaaacttagaaactatataagagaagcaatcagataaaatgtatttggtttattaggaagatcttaaatacccacttaatggtaacagaagaccctaaagtacaaaaacaacaccttaatttacaatctatgggaatgcgatctaatccatgcaaaaaattcaaaatccgggtacttttaatctacttcatcaagaaaacttgcatgagaaattgagaatttttaaaaaactttgaacggattgagaataaaattggattttagttattgtaaacgaaatcaaacaaataaaataaatatagctaaaaaattgaaggtattcgatattcaactaggaggattcaaatcaaataacctaaatctacgcattcgcttcgaaaccatcaaatccgcc

SEQ ID NO: 183652 - DNA, 509 bp, Cannabis indica
agatgatttttccaaatatacttggatctttcctctaaaaacaaagtcagataccacctctgtattccaatacttcaacaagtatgttgaaagacaatttggtgtccctatcaaaagtctacaagcagactggggtggggaatatagacccctaaaacccattcttgaacacctaggagctgtgtttagacacccctgccctcacacacatcaacaacaaggccgagctgaacgtaagcatcgacatgtcacaaaaatgggacttaccatgcttgcacaagctcaaatgccactctcccactggtgggattcttttgtttatgcaacttacttaatcaatcgattacctatccaaagaaacaaatttatttcaccttatgaaactctgtttcaccaaaagcctgactacaattttcttaaaagttttggatgtgcatgcttcccttttctaagaccctacaatcggcacaaatttgaatttaaaacttctatgtgtgtttttcttggat

SEQ ID NO: 183653 - DNA, 510 bp, Cannabis indica
atcttttttgagtgctttattcattatcaagaaaatttaagcgatctttaaacaaaaaggaaaccccttccttctatatgatgtcaattaattgtgagagggtcaatcttataacatcaccatcgttgtttggtgtcataccatgataatatcacaaatgactattgctttctcgatacccttaattacaagaaatgtaaggatataacagaataacagatccttaatacagagagttacatgatgcaattcccatatgaatgatattctatttttgaggtgataatgagaaacgatcacaaaatatccaggcctttctctatgacaagcatgtatatatcttattgtcaaaaaccgatttataatattatgttggtataatataaaattctaaactcttttagaacccaatgatatatgtaatacctggatcatgagggaacttgcatcaggagtattgatttgagccttcaaagtgacagaatttctaaagtacaatatgtagataac

SEQ ID NO: 183654 - DNA, 809 bp, Cannabis indica
attattaataaaatagtgagatcattcctactgtgattaaacgatctaaagtataaattgtaagtcacggtgtcttgtcttttgacatgcaaatttcatattgattttgagtgatctgctagcccctgttttcaggtttcagtgctctgttttttttttcttttcttttggttctttggcagtggtacaatggcaccacacatggctgaagttttagacattaaagaggcgttaagttggatcaaggatcatgaatggcataatgttgaactcaagtttgattgtctctcaattgtccaagctattcgaagtaatatcaccatggtttcgcctcttgggggagtggtgatggactgtcgaaagtttctatctattttaaacaatgtttctttgttttttattaaatgatctcctaatatgacttcgcacacctttgctagagtgacgtattcttttccagatcgagttttcagtaggagggatgttcctactgaattacagtcttgtcttttggctgattttagcaaattaatagaattccaatttgcaattctaaaaaaaagtattgaatttcatataacttataaaaataacttttacgcaatatcgttaatcaattatagagcgctacctataaaaaattctaggcagcactggtgctaaataggaatgcgctctatagtacgtataaactatttatatgatcactcctacttggaagtgatgcttatgttctttttttaatctaattctatttacttaattacattgatttgtccatttttattagtttgctttttaactctcac

SEQ ID NO: 183655 - DNA, 686 bp, Cannabis indica
agttaaatatatatatatatatatatataaatgtatacattcttccctttcacaatactagttttactttgataagattcattttacaccaaaaaaaaatgttttattttcaaagtaaaaattcatggaactaaataagttgtcataagaaccactaaggctaactcaatagtgagggagatgtgagaaaaaggaagagggtgtaagtttgaacctagtaagacccgtaaatttaaacaagtgttaccattattctacactcaaaatatataaatatttataaatatatatggaagcatataatgctttaagttagaatgaaagtttatccttctcaattgacaaaaattgcagcttaaagactgacgaaaaatacatatgcactgaatattttcttacaactataatgctaattactaccaaagattcaaccgttcaaacaagcaatcacatcctttttctatttgcaataacattcctttcaaatataatttcacagaaacgtcactcatttgaatatgtttcaatcttcacatgcaagcataaaatggtgagacaaccatggtttattattatactatcggttttgaaatatattgatagttgtaaatggtataaatcaatttaaaaacaactatggtataataattagtgtacatctaagatgacagtacatataaatctac

SEQ ID NO: 183656 - DNA, 864 bp, Cannabis indica
atgtatgtattgtgacccaataataatgtccaaatatatatgtgttagaaaatgatttagttaccattttatgaatcctatatatttttcagtgtttgcagcttaattatcagtatgacacatcattacttctaatgattaggcaatattgttagaaaggtgtgagaaaatattttcttgtgtaattcccatcgtttggtgtgttccttgtataattgtctagtttaaatatcaaggctcattgagctactttttaccaaaatctattttttgagttggcagtatggccaccggaggagaccaaacaccactcaatagaaatagatcggtatatactatatagctagctccaacatgttagtacaattttagctctaacattgttcttccacatacactttgggagcattttgaatcaaccttttgctatcaaattggacagaaaaaatttgtaattaattaataaattggaatataagtgatttaaggagacagaaaaatgtcctttcaaatatgtgatgaggacacatatgtatgtatctattctatactgatcattgattgagactttaatctaatttacttgtgtcttttgaagcaggtatagggtcaaaaatataattctttctttttctttccctactcataataaaccctatttttcctttcattctacttattttttaattacaacaccattttatcaatttatttatcttcaattgaaatagatatattttatgtttatttatctatactaatatttttgagtgatgatttattgttaaaaattatatcaaccacacagagcagttataagttttgaacctgacaattctgtgttttgattataatttttggacc

SEQ ID NO: 183657 - DNA, 980 bp, Cannabis indica
atggccaccactaagtcgggttcgaagttaccttccccagctaaaaaaatttctaaaatttctaagaaacctcctacaaattcatctaaagttgatcctaagatgagtttgaagcgcattgcgaagaaaggaatgagtgatgttgcagagccatctggttctaagaaaagacctattccaaataaaattgagtctcgtaagacaaagagagcaaaatcttcgaaatctgccaaggatgtaagttgggttatgttgtttttcaatttttgtttagtttttttctggttgttgtgttttttcatatgatgttttgtgttttaaatttttcccccttcttgttttaggttatatcttattttgattttgaggatgaagtgcatgatggggaagtgaagcctaaagttaaatccaaggtattgttaccttgaattttctcattatcttaagtttaaaatttttaatcaccctttgttttctttttgtcaatgttttacctgtttataatgacgattttatgttttgtcttctttttttttttgtatttcttttatgtcttttttgttgatgttgtttttgtattgttctttagtgttttttggtttttttttgtgctattaaacagtttatagcattattagtttttcagtaacttatggccttgttatgaacatttgtttaactgtttgttttcagttatttttaggttgtttaatttaatttcttagttgacaattactattttaattttattttctgcatattgttgttaatatattgctttgaagttgctcattttttaggatgagcatattggagttgttttttaaatgttattttttggttttttcctggttgcttattttttgttttgcattttagttgttacttgcaatgtatttatttagttgttcaaatttgttgcttatgtttttttttccctctttcaggtccatgctaagagctcagaaaagtatgaagac

SEQ ID NO: 183658 - DNA, 647 bp, Cannabis indica
atatattaaaaatgcttatctaacgacattttttggtttaacagaatatacctgttaaatttaacaatgttaataggtttgatctcccgttaacaaataaacccaataaataaacccaataattaaacccaaaaaattaaacaatctttttttaaattaaaaaaaatcatcttagccacatatctctaacaacctgtatatccccaaatcatcaaatccggtataggtactctattaattttcttgttattattcttaattttaaatttagcttcgtatttaacatgcatggctaaaaatattctctttctttcctctcaaatctttctggccacacccaaaatatcggtttcaactttcagaatttaaaacagacaaagcttcactctctcttgctcttgctcctggatttcgagaattgttcatccacgatctacattctttcattcggtttctctctctcaatctcttcttttaatatttttaatttattgtattttttttattttattattttggaatattcttgttcttgtttttggatttttgcttcttgaattttcgttttcggtgttttgattattgttatagctttatgtgactacgatgaaatgaaaggaaatgaaatgtctgttgttcttgttctg

SEQ ID NO: 183659 - DNA, 917 bp, Cannabis indica
attctttaaaaataattaaataatcaattatataacaattttataattttgtaaatttttttaagaaattaataacataacatttgttaacaaaattaaataattaaccctataaattacaattactattgcataatatatattattacaaataaaaaatcaaaataatttttttttacatatttacacacatatattacactgtatatacattgtgtatattatatataaatatacaacacatatatatacatataatatatataaataaaattatacacttataatttacactatcaactatacacatatatataaattaatataccaattataaaaatttcaaaagacgaaaaataaaattaataaaattataaaaccaacctcttaattgctcgtaaaaattttggttcctcctctagctttctaaattctcgttagtgtcacagaccggtgtaatcgcaaccccaaataacttaaaaccaaaaagactaaaaaaaaaaaaaaaaaaattaaaaacaaaaggagaaaaaaaataacaaaaatacttatattaaaaaaaaaaaattgtctgtcgtatgcaatggtggtggaataaaggttcacagtggtgcaatgccagtaatatatggtgaaatgaccggagatagaggaggagaagagaaaacagcggagggatgggaggtgatcgggtgggggaagaaaataggggaagtggaaaatattttcagacttaagagggggcttttatagtgttttattacaggcgggacccgcaggtattaattgaggttccgccaataatcaagaaacggtcaaaatcccttattaataccggtggatcccgcctctaataattcgccggtattagtctttttaaattttgggcggtcaaattaccgcccaaagtattagag

SEQ ID NO: 183660 - DNA, 505 bp, Cannabis indica
gtggaatgactattccattttgaaatagaaggatagaccattccaaggcatgatgagaaaaaatttaataattttttttatcaattttttatgtatttttaattttattttattctatttctacctctattctcatttccatttttattcttatattttcattcctcacctcaaattacatgcttttgctagcttatctctagtgctgcgtggtaattacattagcttttgttattatttatttttttttttctattattgatcacgaaattcaatctgttaagtattttatatatcatgatcatttgcagttaattaggagctggcctcaaattttgtggacagatataatatatatgtataaataataatgcaactataaataaatatatatgtatatatgtgattaaaaatgaaatataaatacatataaatatgtaaattattaaagtgaaatagaaaaaaccaaaaaataaattcatacaacttcatctacttacacacg

SEQ ID NO: 183661 - DNA, 599 bp, Cannabis indica
taaaaaaaaattaaaaaagaaacattgagttgcttaccgaaatactgtaaaaaaaataaaaaattcttcaggttcaggtatatgttaataaatttttaaaattcttctattacatgaaaattaaaaaaaaaataaaaaattaacgtgtgaaaaataatcaatttaaatatttagtatggattattttgttaaatcaaattttcttccatgcaatttttctttcctcgtccaatatgaaatttttttttttatttttttttttctatttttttactacattatccttatcattttcttttcccctgtcaaattcaaactttcaaacataagcataaagttattaagacatttttcctttggtaaattagagcttcactcaatcaaccaaagaatttacaaaacctgggaatttttaagcaaaattagggagcaattacagttaataaaagagagctgcctaaaccaactcctcttaagctcactttggactgcagaaacaacaaaattctattgtatacatcatgttttactctatgcacatttacatgaataggagaaacaacatattatcccaataaaactttttttcaaatttttcc

SEQ ID NO: 183662 - DNA, 788 bp, Cannabis indica
aaaacagatttctgggttgattggaatcagggagtttagacagaagtcatgaaaagaaaagtttgaaaccatgtaacatgttctacaatatagctcaattgctgcggaaaaaaaaaaacaagttcttgagtatttattccaaacagcccctagatttctaaactagcattcaaaatcaggttgccaaataatgaatcttcaaagcatatttgtttttttcctgtattttaaaaatcatgacacttgtattcttaaattaatcccaaatggaccataaacttccaattgttttgcagtttggacttacaacacaaactcttggcctgataggaattaggactaagatgacagcaatagactttaattaagattattactggtctcactgaattaaaaaaaaaaaaaagtacgagatcacatccctgtgagttatgatagaatcaaacttacgaaaatcctatgggtggccagcagcaaaaattagcattaccttattctttacatcctgctttttcttcaatgttacctagcaatgcaagttaaaccaacagatgcagtgttgactacaaaacttaaataaacttctttgactttctctaaggtaagtaacagcactatgatcaaaaatttatgagatggaaataagagaattgttaaagggcaccattgatgttcaataacatcatgccgctatcaattccgcctattaatataatttaatatcagaactacatactttaatttaataactagtatggaaaattgttaaattgttgttccttagtagc

SEQ ID NO: 183663 - DNA, 577 bp, Cannabis indica
ttgtccaacaaaggacacatccaagtccaactgcacaatataataatgaaaatataatattgataaaataaaataaaatattcaattaaacaaaattattaataagcaatatcagaattattgtttatgagcttaatcctcaatgcaatctttccttgtcttcttcaacaccgactttctatttcattataagttttgtcagccactaatacatctcttcctaccatgtacccccaactacagcaaacacactccaacattcctaatcggtaatcatctatttaattccgcaaaattttcttaaacaactctcttctttgcctttctaacagtttatcctcaagagtcatctgaatttaacagttttacaattaactgcaaacctaccaacccaggatatctaaagtgtctaatcctagcacaatcacaagcaactgcaggtttcctttcgagcctattatcaaatggcttaaaaattctaagaattaatgatcattgcaaatcatatgaacaaaataaggtgcagaatattaccatcaccttttgtcacttcctttttgcaataattgctacattt

SEQ ID NO: 183664 - DNA, 959 bp, Cannabis indica
aagcagtgacaaagagcttgaaccagcaacaaacagtctacttcgagtaccatcttcttgtgtggttactgtttaatccaactcaagacctctttaagaccaattgcttcaaccaattctagttgaattacaccttgtttacacacttaaccgggcctcaatcaaactaccattagtatctctaactctaattactaaaatagaaactaaaaatcatctgtaaaaatcgcagcatccatgttcaccttgagagactttgtccacataatccatggaggcatcatgtgaatcttgagcactacaccattgttcaagtgtgacaactagtgtcaatttaattttactaccatgccactaccaccaattgtttaccttattcacatttttattagtatttatcaagtttaacagtgtgtttagagtaattgtttaattatagtagttactattatgtcgagtgtacatgtgaattttcatttttatgaatggaaaccactttataattacataataaaaataaatattatataatatttaagtatctaaatatagtcatattttataattacacagtataatatcatgaggataatatgaattagagagaatacatttaaactctttaattaattacttttaattatatagttaagcaaataatgtgctcccaagagtcccaacagctatttctaattttatgcacaagataatatttatatatataatacatacatatatataattaagtaaatctaatagcacatattattttaagtttaaatctaaaactaacacataaaatatcacacaaatcatcaatggtatattcttttcattattaatatgggattcattctttaatacaaaatatattttgtcaaatgatattcaaaatgagatagtaaatattagtgagcactagtataatattcatatccctaattgggtaagaccacttt

SEQ ID NO: 183665 - DNA, 911 bp, Cannabis indica
tccttatttcttcaactactgttgtgttgctctactgaggcagagaagagaagtgtattgatgacatcattgtcaggtgagaattgagatgagttcctttgaacttttcataacaaacaattaagagaagtaattaattattttaattaatacttatgagatgtacttaaattaaatatacatttttataattagtttcacttagatatttttgtagtttgttttaatttgttataaactgtattttttgtctagtttttttttttttttttttttaaattgggaaattttaggggatttacttatatattattttttaatttttttttttttaaatttacagtttcggtggctcttatggttgcttgggttgttatgtgaatttcggttgcgatttaattatttcctaaattattacgtggttgctatgtaaaaatcaaaaaaaaaaaactttaaaataataaaaataaaaaaaaacaaacccatgtaatagaaagaaaaagtttgcatgataaattattagataaatatcattttataccctcttaatgctttgcaaaagttactaattagaccttctgttttgttaaatgacaaaatggaccatgtgtttttcaaatagtacaaataggacccttaactgattttatgtcaaaataaaatttaataataatctgatctaaagtgttatgataaaactgtttatcttttttgtaattgttcgtgttaggaattgtcttcaagttagttatattaaaaaaaaattagtcaaaaattaaactcagggtcctattcttactgttttagaaaatacatgatccattttgttatttaacaaaacagatgatccagtcggtaacttttataaaacacaaagtctaaaacgatatttaccctaaattatttcaatt

SEQ ID NO: 183666 - DNA, 561 bp, Cannabis indica
agaaaggtgctaagcaccattggtaccctacttatcaaaaaaaaagcaccactagtaccctctagcacttctcatatataatatagggatatgattttatcctgtgatgtactttcacggaatgtattctgtggtacattagatgagtctcagggtacattaaatgagtgtcagggttacgtttttactttttaagcctaattacccctagatcaatctcagccgtcagatcaaataacttcctcatttgacggctgccgtacatcacagattataatccgtgaaagtagaataatagaacaaaatcatatccttttatatgtatatatagtgtacgatcgactctcctagagataaccagttttttagatttattcattttctgtataattgattttaggtgaagaaaacagttgtttaaatttttcttgggaggagctaacattgaccgtttgccatgcatgcatgagttgaaaaaagtgtgcactttttatttttgaataatatatctcaaataaacactaattattaattaataatgtgtatttactttttgaaggg

SEQ ID NO: 183667 - DNA, 772 bp, Cannabis indica
attttcttggcaaacacaagtcaaaataatataattaaactcattatactattcataaggttcttatttttgttatttatttttattatatttgtcgtaattattataccatgagcttaagataaaccatccatatgtaatttagtacatttgtttatttaacacacgttactaattcaataaaataataattaagaagtaatttcttcaaaattggttatggtgttagactataatatagtacatgaaatacaacatatatatacgatatgtaatgcagaaaataactataaacatatcgtaaacatatgcaatgaaagatcaaaaatacctccagccattgatctttgaacttcaatcccggcaatagcttcagtattggagttcgggcttcctcgctctctcaattctctttagatagaatttgctgaataattagaatgagtgaggagatcgaggaccgagaccctatatttatagatgagatactccatcagtatctgtgccacattaattgtccaaatattttgacaattaatttaagaaatcaaatcgagtaatgaatatagaaatctgaccatatatagaatattacataattgattttgtccagattcaatgaatataaaatattcatttatcaaaaaattaattatttattttatgttcttaaatagaaatttatttccttaaatagaaatatatttcccataataatattcttatattctcccacttggtcagcatttacactaaaacattcaaacccaac

SEQ ID NO: 183668 - DNA, 609 bp, Cannabis indica
tccgtacacttgcgtatacaaatttttacaacacttacatttgtgatatgcttcaacattcaaatcctattgaagtcataaaagaaaaagtaagtatattctcattttctctataaatacaaacatataaaaatattttccttttaattagttataaaaaaaaaaaagatgaatgaaatgtaataaaattaaaagaaaaaaaaaatagaaaacctatgtatttgcaaaattagatcaaaattaaggtgaccttttcatccaactttttattaaaaaaaaaaaagttggataaatctcaattttttcatgaaaagtggcatggaaagtacacttttatctcacttttttcaaataaccgggataaaaggggtactttttatcccgcttttatgaaaaaattgggataaagaggtagtttttatccttttttttcataaaaatcgggttaaaaagtgtactttttatctcgattttttaaatacttttatcccacttaccaaacatcccagattttattttagtaagaatagggataaaaaaccttaaaaactgaagataaaaagccttttcctgtagtagtgtcagttttgccattatgtttcaataatg

SEQ ID NO: 183669 - DNA, 505 bp, Cannabis indica
gttagtgaatgtatagaggtacatttttgtgttatacccgaaattcaattacactttagaggttgacatgtgtccaaagaaaagaaatacgaagtaattctgaatgataataacgatatcattaaatgcattgttgtgcaagaacacagcaagaaacaacacaatttaagcaataacagaacaaaagcaatagatcaaatcaatcaattaactatgaactgaaatgagaatgaattgaattgaattcaccaagaattaatgagacaaagatttgaatgtgaagaagaatctttattgctgaattatctttgattacaatcaatgagagagagccataaaccagaaaacaatctgttacaaaaccagaaactagttacatacaatcctcacatgagggaagtcatttcatgaatgaacaatccctttaacatccctcaatctattctctcactgaatgtgttttgctctcttgatttctctctctctagacaactcacaatgcatc

SEQ ID NO: 183670 - DNA, 619 bp, Cannabis indica
cgaaacaaaaaaaaaaaaaaagcagtataaatgttgcaatttccgtgcaacagtaaaaatgtaataaatggggaaaaatagtagtgggtgtaaatttcccttttcatatgtacacgaaatatgtttctgggcctaatatcagcttgatctatttgggcctaataccgagctaatatatccagcaaatatataggcaataacttaagaaacacatttttttttttttaggaataattatgtaaagcaccatttttttttgtaaaatatttacatttttacgtttcaagaatattttttcacatttttacagttttctaaaaaataacgcaaaaacaacataaaatcaacaagaaaacaatataaaaataacaaaaaaaaataaataataacatacatacatataacaaaaaattaacaacaaataaacaaaaatttcaacataaaaatactagtattttatgtaaataaaatcaaaaaaaatcgtaaaaaatgtttaaaattccgtaaaaccatatttttattatttttgttgcatttgtgaaattaaccatttttttaaaataagaataaagataattagagttcatgatgattacatactttttaattatattcagag

SEQ ID NO: 183671 - DNA, 616 bp, Cannabis indica
tacgaacctgattgatccattgtaattatcgcaatttgatagtgcaatattatgaactaagtcttcctccctaggtctctaaatcagaagcagttttatttatctgattatcaaaaagtatgcaattatgatgaggcaatatgtatttatagagttagggagggacttagctacataactctaattggactggatctgcccatcaaagacttcagtcaagtcaaaaaattcacacttctgcttcacctagactttacacatatagacgctaagcctattaatcactaataatatgggctaagatagcaaataactatgcttttaagaaagtgtaacaaaatttatttagtaaaattagttaattcacttattaaatttacacataaagttcccgatggaatgtttgagtctccactctcctcgctatttgtttttattgcacttttataactgcaatttaatgaagctaactggttgcgttataatgttaagagtccttgttaacatcttcagttaaactaaccaaattgtaaagatgccattgatctcaataataaataaactttcagtttcagttttcgttttcattttaaaactacatatcatacacttcatt

SEQ ID NO: 183672 - DNA, 665 bp, Cannabis indica
gtaaaagatatagaataaaacacaactcactatatataataaattaatttacgcttctaatatcatttatatccataatcataagacctctcaaaattaattaattagtaataaatagtatagtgttcttataataaattagattaatagtgacatatatatatatatacactctatataacaaataagttaataaataaataacaacaataatgagagtgcttctatatagtatgaggggattcttttgtaattgtttatgtatgaatagtcatatataatatatattgtacttttatgtcaaagctacacttttatgacaaaatttctactatttatatataaaatatgaattaagaatattaattagtttctcaactttcttttatgaccacaaaatcacataaatatcaaaataattatgtaggtattagtattaaattctcttaattgaagcataatatttaaatgctaatcgttattaacaaaaaaaaaataatcattaaatttgaattaattaatgcgtataaataattaattaaaataatacatattattactctatgaaatttgagattcattaattaataatattatatctttgtttttattattcaacaaaaagttaactgttctttaaattttttgttcgttgcatatatgaa

SEQ ID NO: 183673 - DNA, 858 bp, Cannabis indica
aaatttgaaaattttatggttagaatatctataaaaatatctaggttaatttcaaattattaattatttaatgtatcatataagataattttaatataatattttaaataaaaaagataaagctatcttttaatttaaaatatgttaaatatcaaaatatctgatcttataattaaataatatataaatattaaagaaattaacaaatttttaaatctgaccataatttaaaaaataaaataatcaatttttaaatttaaacctaaaaataatattttattttaattttggggtttgaaaattggaaaaatctgaaattgggaaaaaaaatcccacaaaattcggaaattttgggtgaagctggcagtacgctgcaaacgggccagatgcgcgcgcagaatggaagctgcaaggtgtcgtgggcgggaaacctcggcgtctgcagcgtggcatctgggcagatacaatgtggcgtgcgtgtagacggaagactcacttcctaaaaaagtatagggcaacatagagcccaagcagtttagagtgtcaaacaaatgcctccgtcgaaaagagacaccaaaataaagaatcagcattacgacctttcattcatctcaggtagaaaaaagagttaccgtcagaagaaggccactacaaaaagggtaagataagcactccaaaaacaagaacgcaacactgccagacttggagaagataaagaataacaatgatcgtctaacaactagacgcgtggcaaaatagggagagcagagagaaaggacacgcttcaagaagagaatagatcagaatataggccagccatgcaatcatagaacgtactacataaacagaaaaaagact

SEQ ID NO: 183674 - DNA, 880 bp, Cannabis indica
taacatgcctattcattaattaactcaattctttcaacgttgagttttaaaactcaaatatatccttacttttcaataataacaataataaaattggcttttgatttaattaatatcaatgtttgatgatcgaattttctacacatttctcttggaaaatataaaaatggcatgccacaatcaataatcattaatttttccttaatgataatcataattgagaaaaatcataatacttcaaatccaaattccaacaatctaaataagtgaaataaaagcaaaaactcataactttaactttgtttaacttttcttataaatgactcaaccaaaaatattgacgtttccattcaaataataatagagataatattaattgagtaatgttgaaaacacatttgaattctacataccaattagtaattacacatattaattatacgtttttaatcttaattatacaatcaaaagagatgtaacctctacttataattataaatgactaatatttaatacacattattatgtataattagtgtgtataatttgagagtgtatttaacattactcatattaattcttttatatctatattttattaaaaatataaatttagatttttgtcttgccaaatatttttttggattcagtctttattttgtaaaccgttaaatcaaaatagtattttctttataagtaaaaacttttactgaaaaactaaggcaaactagtagccacaaaaggggccacttcccttaacaagccagtattcttaaccttgcagctctagcccaactggctaaagatcaaaatagtatttaaactctataaatactaatattttttacaattgcatgtatccctacacaactcacacaca

SEQ ID NO: 183675 - DNA, 1171 bp, Cannabis indica
atatgtatactttagtttttttttagtttttttttttttaataaaaagctcaatttttatcttttgcacaatgtcccctaaaaatgcttggacccggccctgaaaaccttttccctcatgcgatatagccaaaacaccctatacaaaaatagccaacatcgttaaagagtgctccatcaaatatttaccttgatctgatttatgatgggtgtattccatcgcgcaatatttttcaacccaacaaaacataggacaaagaagaatttgtccttgaatgtgcaaaaatatattgatcaagaagagttcttgttgacagaacaacaacaacaacatcgggtatcttttgttgtttatttcatacgtatgtaaaataagttgtttataaaataattaattagtatttttatctttgaaatttttacactattaagttgtactgttatgatataaaatcgttaataatactcctaaaaatataaattttacaataacgcgatcctttcatcatattctattcaatttttatctttagaccaatgatgtgtacggtgaaaagtaattgataaatgtatgcaaactaaatatatttcatcctttttaccttaatgattaaaaaattaaaatatatatataaattattataaaagaaaaaaatgtcttttattttattattcattgacataaaaaaagtaaaaattatttaatttgtatctatttattaattaccctccaccacttcatccatctcacgataaagttaaaaaatgtgatagaaggactatattattgtaaaagttatattttgagaggtattattaacaagttgtgtactatatggggtatagctgtaaatacatccgtgccaatctgatccgccatatatgaaaagcactcaataatatgagtcgtgccgtgctggcccataaaaagatatcgtcgtgccatgccatactattattttgaagggtaaactcagcacgacctgtaagctcacattttttcgtgctatgctcacattttttcataaatgggtcagtccgtttttttatacgagtcgaactcgggcttcacttttctactattttttttttttacaattaatgagttaatcactaaatcatatgtattttttttatagttttcaatttttgtatagttttttcaataatac

SEQ ID NO: 183676 - DNA, 575 bp, Cannabis indica
ataggtagcaatgaactatatattatctttattattgtgacatacattacatttagtagtattagttttgtcttttttcaagctaatttcttacttatagtatgtgcatatttggttggacgtacttaaattagctaagttatatatattaaaatacgagagttaggatagtgaattggaagctcaatgatggaacgaaattgcattgtggcttaggggggccaaccttttttttttttttttttattaatttgaaaaattaaataaatatattttctattttttgatccctttattttatttattttttatttgacccttttaatatatatatatatatataaatatatatataaatcttacctattatataaatgtctatgtaacggaatttgttgtgcatgttaacagaatatacttttcttctaacagaaactaacgtttaaatttaacatacccatttgaaaagttggcaatgcttgtaatgaaattgaaaaggcatgaaattgcggttgttaagagtacctagttagttagtgagttagttatctgttagttgggttgttactctcctc

SEQ ID NO: 183677 - DNA, 341 bp, Cannabis indica
aaattgtcgaaaggaatagaaattagagtgaggaggaactacaccctttagtaccttgtgtggaaagagaagaatgttattagcaatgggtttattttttctttctatattcttggatagatgattaagagaggcaaagcaatacttatcttgatgctaccattaattagcattttataattcctacttagttttcttttcatgtggggcataatgctctatataacgtttaagttaaacatgtgcagttcgattaattgcactctattatcattattagagatatcaatagctcctttagaaaaaaaaaaaaaaaaaaaaaaaaaaaagaaaaaaagaaa

SEQ ID NO: 183678 - DNA, 829 bp, Cannabis indica
aatcatgaaataaatcatgtgaaccatgaaacataaaatgttatttctgatctttattaataaagtaaatctgattatatgaaatgagttttatttagggcataaaacccaacagccactgctagagctgaagtcgtggatgccactgagaaggtcgcggagaacaccaatgcccatatcccttagaaaaaaatcttttatttgaacttttaatagctatacatgggtaatcgcattttgtaaatcaaaaattaaaaaaaaaaaaaaatgtagtcctccaccttttgcatttttactctttgcaatatttgaacaatatatcctttgaagataattttatttaaaaattttccaagtattgtgtcatgcagttttgttggttttgttgcgattataactacatcatggcatattcattacattaactgttaacgcataattttgtttaaccaaatatatagcattttacgtaataaatagcaccatagaattttataataaagataataaacaccagatattttacaatagttttatagttaaaatctacatacttcacgagtctgtattattagagatatttattttgaatttagagtacaaatctctatatacaaaataatagaatttctctctctgtttgccgttccttttccctatggattatgtctctatttataggttatagctttgcaattatttttattggaattgattcatttacaactattggtgaaacgttgacatttcccacatttaacttatatacacatgggataatatctaataactacctaattgctccttgtctttattctttagatggtta

SEQ ID NO: 183679 - DNA, 675 bp, Cannabis indica
ataattttaagcagtcttcgtcgctccaatcatggcaaatccactgtaattaatttcaatatattcattaatacagataataattttctacaatgtgacaccctttgtgtaggttataaaaattaataatttgatatatatttttgaaaaataaatcataatttttgaaagagagaaattgtatctgtttttaaaagacgcaccttgatgaaaattgcatcaccttttggcacacttacaaacatgtctcctccaacatgggctacacctattaataacaattaataatattaattacaataaaaatgatttttgtctccaaaactattaccactatttgttgtaactattttacaacctagaagtatattattactacaaagttgtgcccttgaattgttattgaattgatgagttgcatatatatgtgccctgaataattaagatgtatgcataatttggtagttataacagttgaggaaaatgtaaaatgaagtagaaatttggggacacacaatatagtagtaattatggttaggggaaactcaaaatcataaattcaagtgcaaaatcaattggtaaaaaaaaatcttacatgacaacttcataaatatattgatattctatttttttttattgtaaaatggtgagtactcttatagttgtacataccgg

SEQ ID NO: 183680 - DNA, 535 bp, Cannabis indica
cactagtccacatatggtagaccattgtctaacaaaacaatagtacagtttcatagtatgccaaacatgtattttgacaaacaataacgaaacccgtcataccttgtaaatcacaatagaaagttagacgttattgagggattgaaaagaacaaaccttcctgcaaaatgattgtaacctcctccctggccataatgagattttccttttgttacatcaaacacagacctggttcaaaaaactaccctgctttatccgctaggcaaatagtgacatgctgatttttactttccaattcattgatgggattgagtttgagaaactccataaaatatgtttcataatgatccaaacttgaaaattatgtatgactcaatatttccttcaaaagtatgctttaaggattgagaaaaccaaaatttcctgaataatttagatgattctcgacatattcaatgaaatcaactacttttcaatgattctttattatcttctgtaattctttacaaggatattataacttataagacatgat

SEQ ID NO: 183681 - DNA, 651 bp, Cannabis indica
tattaaaaaaatatatatttttactaatatttattttttactaataaatcatattagtttggatttaatgttaattaacagaaaaaaaaaggtcattttaatttaagaaacccaaaacaacattccctcttttatatatttatttatatggattactaataatttttttttactaataactcactacaatattagtttggatttaatggtaattaacaaagtaaataaagataattttataatttattgtaaaagcccaaaacaacattctcacttttatatagttatagatatacgattaatctaaaattttaaaggtattttatgcattcattattttttatttatatatagattagtacatttttaataaatattgagttttttttggttaaattctctcaactattactctacttacacttaattctataagcttaaattttgatggtaaaaccctctaaagtactgaactgcttgtaaatttaagacgtcatttatttttttacagtcaattgccgatataaactgcttgtgtgtacatttttgtacatgtgtcaaatttatatttgtacacttaataatattattttaaaaatataaaaattatttcaaaatttataatatatatttttttattgttttaaatat

SEQ ID NO: 183682 - DNA, 525 bp, Cannabis indica
cttcccttccccaagcccattaactgtttcgaatcggaaaacttaactatatgcattaattaggcaatagctgactgactaccccagttctactacaaaaagaaaaataataaaaaaaaaaaaaaaaatagctacctaccccagttaaaccaaacatattattataattatcatcatgctcatcgtaattctcataaaattatctttaataaaaaaaaagtttatcataaattatagttattagctattattcattgacatcttgtccttttcatacgctgtagtagctacataagacatatattatcatttttttgtaaggatatttaattcaaaatcttaatttattaatgtcaaaaaagatgtgaaaccgaaaacatttcactcctcctccagtcgtcttagttgaccaaaatttgagttttttttcatttttatttttagaattattttctaaaacagaaaagtttacgatttcttattttgaaatggagaataatttacgatacaaaccttgttttcctc

SEQ ID NO: 183683 - DNA, 891 bp, Cannabis indica
cttaaatcagtatatatatatatatatatatatatctatgtgttaatttttgtattttctgcatttagtatttttttggttttgctcttgtttttctgtcaattattgttcttggtttgataattttatcattactaactattttgattatttaaagtttagttgttttgattatgcacatttagtctaatttttttacaaaactattaaaaaatgtaaaactaaatatttatttataatatatgatttaaaatttgagtatttataagaaaatatttaaattttaattattttttatatgacaatttatataatattattgaaaaaataaagcaccaattcgaccatagatcagatttgaaaaaaaaaaaaaaaaagaccaacacgacaaaaatactgaacctatgtgtcgggcaaatagtggcacgaccaccagacccatgtttttatggagcacaacacatcccatattatgaaaagcaacaaaaagataatataggcggaacacacatttataccactaaaacacccctttaaaggcctactatttaaaatttgagtgcataaatgtcattaactctaaagaaacacaaatgtcatttactctaagaaaagaatattcagctacaattaatatattgactgacgactgcaaacaaaattggtttttgtttgcaggttttttgataggtaagtgtcaccaccaaccctgaagattatatgagatttcaccgcttgtaactctgaactatacacataataatttcttaaaagataaaaaatcatagctatagaattcaaaatgaaatattataatcaatataggttggatggattaagaggataaaagctaaggagtgacttagcgcccttcaaatactgatacggtag

SEQ ID NO: 183684 - DNA, 579 bp, Cannabis indica
cggcctcgttggtggctaaagggatttggagctctagagatttcctaagagagaactcggtgtggatccttggccaaaattccttggtgaatttctgggaagataggtggctctgcaataaggatttgattgtcggcaaggagtccttgaaccctctggtgggtgctaaatggccaatccagctgttatggaatggtgctacggatcattgggatgatgaggcagtccatagatactttagaccgcccacggcgtcccaaattttggcttcggatttggtgaaatacaactcagtcgatactttgatcaggactgctaatggcattggtttgttttcactccaatcggcttattgggcgcttaactctaggcggttctcgattgatattaagctgttcaaagctctctgggggtccctcctccatgagagagtaaaactgttcatttggaagttgtactgggatgccatcccaataagctccaaattacaggatattttcggcaacgatttgggcgattgcgctacatgtggggcgagtgggagtgatagcttcgagcatattttttgacttgccctgt

SEQ ID NO: 183685 - DNA, 646 bp, Cannabis indica
gttacaagttgtcactaatttagctttagtcacaacaagttgtaatttttgtgactaatacctttagtcatggatcttttaatcacaacataagaatgatattttataattagtcataatttttttacttttagttacaaatcttgttgtcagtaaaagtaagattttttgtagtgtgtatgcatatgtatatatatgtagtatatatataaatatgtatgtgtgaaagtaagtattgatatgtatatgtatgagtgtgtgagtgtggttgtgtaagttaatgtgtattcacaaaaaaaaaaaaaataaatgtgaaatagttgtcttgaagtttagagtatattttttgggaagaaattaagtagcaattgaggatttgagatatgaatgtatttttaaaagtttaaacattgagtggtaatttgataaattgttaatttgttaatttgtaatatgttaggttcaattttgtaacacgttaaatttataattaaaaaaaaaatacagccataatgttttagtgaagttgatgccgtacaaagttctcaataaatggagcaatcattctttcaatataataccatccatcttcgttgagttatttccaaagaggagtaaaaattaccaaaagtcctaaatatgagtt

SEQ ID NO: 183686 - DNA, 723 bp, Cannabis indica
aaatattatgttcattgtattacttgtcgaaatcgcttatttggtcgccaaagacctcttcatttggtcatcggtggtggcttaggtaaacattttacattattatttaattttaattaagattaacacaaaacccatattttttcattttcaaaattgtatgtatatatgtatgtatgtagccgctgacgtcatactttggaggaacaaagaaacatcagcatgtgtacttgctggtgcaacagttgtatggcttctaacagaatggattggttaccaattctttacattattttgcaatgctctcttaatcacattcaccttacttttcctttggtccaatctagccacttataccaattttgtgtgagttttttctttttcctctccaaatttgattttgtttattaatgttaattatatatagttgtcagctttgaagagttattgtatattgttatgagtgcagtttagtgaggtttttagtttgtgctgtatatataggtcaccccctcaacttgccaaatatcacattacctgaaggctcactagtgggacctgctcttttgctgagatgtgagtatcatcgagctttgagaacctttaataaagtaatttttggggcagattttaaagatttacttaaggtaaaaaaaaaaaaaactttgtttacaatcataaaaaacatgcatgcatgccttataacactaacatgagatactt

SEQ ID NO: 183687 - DNA, 586 bp, Cannabis indica
atcatcttggactttgagggccttctcggcctcctctttcgccttctcgacttccttctttgctgtctctgcttcctccttcgctttctcggcctcctgcttgaggcgggtaatgtgatatcacgataagcctaatggtaaataattagggtttatatttatattttgggataattaggtgataacactactacaaatatgggctttagaggcggtttataaggcctttcagcgtcagttttggcgaaattcgctaccgatgctgatccgggtgacgcaaatcgtcgctatagggaccctatggagtcagtttttgtaaaataaccgactccataggggtttaatctttttcagctttaattaatataattttttttaacttttattaaaaatctaaatttatatttttataattaattaaattaaattaaagaataaataaaattaaattaaaaagttaaataaaatacaaatttacattgctctaagtgtttgtatattaggtattttttttattaatatttatattttataatatgtgtttgtatttttctagtattttagtatcatttttataatttttaag

SEQ ID NO: 183688 - DNA, 793 bp, Cannabis indica
gtgtcccatttctccatgatactcacacctctttcttggatctttctaaaaattatccccttcaggtttccctggaggctttctataatggatcatattgcatgttgctttatgcacattttctcgagtatccaccagactagagtactcggtgtaccttggttcatactctttcttggcttctttggaactttggctctgtcccggacactttcctcgtttcttattctaagactggctcacattattccctagaacttttaattttgaatatccagaagtggaactgcatctggtatgtgtcgctgcatagctagagaaattggtttgtgtaggggctttcagcgatgcagatggtccatatgggtttccatatccttgagccacaacaattaccacgacttgagctggtagagcagtgtgtgtcaaaagttgcattcccagcacttgagggtgacctaccccctacaaaagatttacggtagtctgttatctaagaattagcatctgtccgtgaacgaccccttgtttgggatagatgatgggaatttggacccattgtcccagatggcctgctctgactagcatctcgatttcatccttcaggtgcttacaatcattggtggagtttcccacttctccatgatactcacacctctttcttggatctttctagaaatttccctcttgaggtttccgtggaggtcttctataatggatcatattgcatgtttcttatgcactatttctcgccatccaccaactggagtctcggtataccttgcttcatcta

SEQ ID NO: 183689 - DNA, 608 bp, Cannabis indica
cacactagattcaaaatttaagtagcctcttaaagtgcgtatccccagaagttcagtggcagtgatgagtaactcaacatcaatctgaccatgtctaacaagctctaatttttttctctatgcaacaccgttctactgaggtgttttaggtgttataagttgggataagatcccttcttccagcaagtagtctttgaattcaaaatccaaatactctccaccatctgatcgaagcatttttaatgatttatctaattgttttttagccatggctttgaagtttttgaactttctaaaagttttaggcttcttggataataggtaagtatgatcgtatctagaataatcgtcaataaaagtgacaaagtattcataaccacctcgagcttaaatattaataggtccacacacattagtgtgaataagttcaacttgttctttggctctattgccttttgtagaaaaatgtcttttagcgatcttgccatctagacaagattcacataccgaagagtttcaattttaagtctttctaaggccattcttgttagctggttatctgtcttgggcatatggcctaaacgtgatgccatagatacgtttcatca

SEQ ID NO: 183690 - DNA, 524 bp, Cannabis indica
ggatccccttgacggataccacgggaaggtttaactgatcctaaaatctgctggttgattgaaaaagagaagctaacagtagaaatgcatgtcatcacaaggttgataaagggaagggggaatttaaatttttccataactttctgaagaaaaccccattcgactctatcaaaggctttagccatgtccagcttgagacccatccatccagttcgacccgttttgcggtgagctaaggcatgggtaatctcctgcgcaatgataatattatctgatatgagtctacctggaagaaaagcgctttgggtaggggagataatacagctaagaataggtttgagacggttcactaacaccctagaaatgattttgtaaagggtcgagcaaagactaatgggcctatagtcagtgatttgttgaggatgggaacgtttcgggataagcacaatgacagtgttatttattgctccaaggttagcagtcccattaagaaaacccttagccgcacggaggacatcctggcc

SEQ ID NO: 183691 - DNA, 509 bp, Cannabis indica
gcagatattgaggctccagaagatgaactagctcaatatagaacaaataaaacaagttcacattaatatacataattaaactataaattcaaaaattagttgatcccatctcaagatacaaagcacacattaatatcaagtctttaaacaataatattaactgtaagcggtactcttggtgtagcaatcaaacattgacaataaaattgtgtcaaacaatagattatcctttgaactaacgtactgttcacacaaaataccttataattgtcacacatttattgccacaagtatatttaaaattacctttgggtcagtcaatatatgcatcaattacaaatacacaaccatcttaatatttcaataaattaatctaaacaaaagatgtcactttggtaacatattgtttcaattaatttatttaaaataatagaaataaacaaacaccaaaatttgaaattaaattagttttgcataaaaatatatatttaccaaactgaaaccaaatc

SEQ ID NO: 183692 - DNA, 663 bp, Cannabis indica
ataatggcacgtgcttcaagcgcgtgggctgcatttatgatggtcatcattaatatttatttcttattgcaggcaacgattcgcttcccgtccattgagaaaccagcgcatttaatcaatgtgtcagaaaagtactcaaacgttttcaaccgctctgatgggcatttatctccaccattggatttgtagaatacgaatcgattacgattcctagcatacgatggcgtctgatcacagcagctttgcaccctttctagtctataaaagccagccttttttccttcactgggctactttcaccaattttccattttcccccaagaactccttcgggaaaattacagaaaccatagatttttcactgctatttctccgtcgttgccaatctacgttctaccgtcgatcgtcatcaacttccagttcacaacctttgtgtaagttttctgggtaccttatactttgttattcacttgcatgttaggtagagcttttggtaagtgcttgatttctggaaaatgatttttggcgagactgtcgtatggtgtataaattttttttcttttatttgtgttctgccgtctctctttctctttcgttttgcaatcagccatccgctgagagtactatccaggatatgggacggtttttcgtacccatgttcta

SEQ ID NO: 183693 - DNA, 572 bp, Cannabis indica
ctcgatcttttacttgttcatccttcttgtctccttaatgttcgttattatcgatttttttctttttgagaacttcagctgattttgttttatgcgttttattacacaaaaactcaatgatcttattaaaaaaaacaaaagacacttttttttttaattttaaattcctcaagttttatgggtcactcagcttgtcggaattaaaacaatgaaaaaccaaaaacacaaaatcaaagaatgatgatacagtctacagacctttttttagctgtaatttgatatttatatatacatttatatatattttacctgcttcacatattttccatattgaaaccatatctctcttttgggcggtgatgaatgtaaaagctttaatatttgagtgtgtacttaccgtttttcatttttgtaatgcgtgtggtgtggacatccagttggagatatgaaaattcttataattttcataatatggaccgtaatggtaaaagggaattgtgataaacataattttcatggtggattctgtgtgagcaagtcattatacgaaatgcttgctcacacaaaatggc

SEQ ID NO: 183694 - DNA, 522 bp, Cannabis indica
tgtatctaattagcgactattattttagggcttatatattgccactacaaatataaaaatgtaaaatgagtttgattggtttctcagtcaatttggtaataacaacaagataatatacgtcaagtctgataggtaatactctctagacacttcgaccgtccctgttctctctctctcttgagaaccatgcagatgaacagaagcccagcaatcttttccttttcacacctatatcctaacagtttccacattgtgaaacccatcccaagtcccagatctagtgatcttggtgactccgttcccattttctccgtcgaacaacccagttcagtgagctccaaccgcccctgtcgcgtcaagaaaccgagctcaaccaacccgtcgtatcaacattaactctaaagcccctcttcactcagatgcaagctcaaggacactctcaacctcctcattaatgaacccattcaggtaatcgagtaccttcttccattttctctactctgtcaaatcacttctgtacag

SEQ ID NO: 183695 - DNA, 924 bp, Cannabis indica
agaaattatattcacaagactgcttattgtttgtaacacccttagacaattaatttttaaaaacacatgctcttcagctaacccaaggcttctccaactattatatacaatagtgcataatattatatatatagggatattggcgactaaaccacctgaactttacggtttgtaacacttaaccacaaaaaccgaatttttggcggctaaactacctaaaccctggttccgttttgctctacacacctccgtccaaaaatcaccgttaagtgccacggtggactgtccacgtgtacacacttgtacacgtggcaaatttttagtggtccacgtaatattaattttaaaaaaataattataaatattttaagaaaaataaaaaaatcagaatttttttttcctttttcctttttccttttcttttcttttttttcttttttttctttcctctttcttcttcgttttctactacagaattccatctccgacccccccccccaacccgaccctccaatctccgccccagcccccagatcaataaaactctggtcatcacgcgaccctcacctcgtcagcacccaaatcacacccaaattagtgtcacaagttcaaagtatcaaaaagaaaacaaaaacataaacagagaagtgagtagaaatacatcttggaaagcttgttgggggcaccgccggtgaccttggctactcgaaggagagcgagctcagccttgagatccgagctcccaaacggcgcgtctctgtttctccttcagaaaatgaaaccctagcgatgagaggggttacgcttgggttatatgggtctgtaagaggggtatataagggtccgcctaatgcattgggttgggctctcgagtttgctactaatttgggtgctgacgaggtgaacggagataatggtggtgct

SEQ ID NO: 183696 - DNA, 512 bp, Cannabis indica
atggtatttcagagaaaaaaatttgatatatagtaggaaggccacctgaatgcacaagggaaaaatgtgttcataaaagtacacatccctggaatgaaaaattctattagaactgaggtcaagaagtctataggctttcatgcttgtatagtaaccaagaaaaacacatggtgctgatcttggtgaaaacttggacctagatagactcaatgttgaagcctaagctaagcagccaaatactttcaagtggttataggatttatgtttagaatgtagaatgtcaaagggagatttatgtttcaaattagccgtgggggttctgttaatcaaatatgcatcagtggctatgcattctccccagtagcacaatggaatgtatgattggaagagaagagcaagagcaatatttagaagatgctgatgctttctccccattacaaaattttgatgtggtctttgaacacacgaatggtaatgcatgacaccaaggtctttaaacagtacatcaaact

SEQ ID NO: 183697 - DNA, 714 bp, Cannabis indica
ataaaaaattcgaagccacacaggctagctagctaactattttttttaattattatttgaaattcagatttcataaattgctagaattccagaaaacattacgaactagcaactgaaaattatctaagatttcataaataataaaaaggttcattattagaaaaatagtaataaataataaaaaaaatttgttttaattacaaagtgaaaatgtggatgggcctcttaattttttttttttgttggccaattttagggttcttaatttttaataataaaaggtctgtaaatttttttatatataataattaagaaatctttggaaattttgtctctaaagggggaaatttgggaacaaattaattaagacagagtgaaaaatacaaaaaatatatatatattgaatttttagtttgttaattaattgtttcggataattaaaatcacattattttttttgttagaaattttttataatactctccaaaaaattccgttaaaatatcagtcgaacacaaaatcaaggacaattatttccgtactaaaaaatatataaaatatgatcgatcggtactaaaaaaaccaaatgtctcttcaaaaaaacaatatcaagaaaatacacagttcatccatcatcatcatcatcaacatactcctgattcttatcagatctaatatacatattcatatataaaattccagtatatgtataat

SEQ ID NO: 183698 - DNA, 650 bp, Cannabis indica
ttttcatagtttctatacaaagagtattatccgatgttaaaatctcaatattgtaaaaaaaatgacattagtttattagtctaatccagtttaacttaacctattgctcttacatttggatcaaggcatttaaagcaacttctcattctttttttgtttacatttttcagcaacctgagcggaaatagcattcatgggcccataccatcctcccttggaacaattacaagcttagaagtattgtaagttattatttctttcttgataactgcttacaatactttcagcatgataatttattgtatattgattttactaatcagtgcataaacaaaatgcatcttctaaatgcccttaagtcaaattatatatatgtattaaaagaaagtcaaattatatgtaatatttccttatgttaaaactaaatagctaggacttccttcagttctgtcaaggagaaagaaataaggtaaaaaaccaagtaaaggaagccacttgatgatggcataattgttaggagatcgtacaaagaaatatagaattgggacatcccaacatgtataagaaaaaaaaaagtttctgaactttatttgttcccaggtgaacattagacctagatttcttctcatggtggatacttatcttcaatc

SEQ ID NO: 183699 - DNA, 606 bp, Cannabis indica
tatttgtgagttccctagttttactcaatttgagcttaaatattgaaactttatttttctttttggccctatacaataagatttgagtctaaaaaaagaaaacaaaaaattctttgttcatctttttttccacaccatagtatattgatgttttatgtatttgtaaaggtacgagaattttgttgaggaaaaaatattgatggttatgtataattgtaatgaccgctctagtaatgtggattagaaaaggcaattagcactaatttttattattttattattatttgtgaattaatttatttgtggaccccaatatttagaaataaatattagagttataatttctcaattccggagattttattaaactctaggggtattatttagcttatatgtgaaatatgttaattttgtaatttttgctcggcgacaacggaaaatgcgatggatggctagataatcacatgagtaagtttagaaccctatttcatagtggggaatattttagagaaaataaattatcgggattgagcggggttatggaaattgaccattttacccctagctttagaaataccctagttttaagtctaagggcattttagt

SEQ ID NO: 183700 - DNA, 856 bp, Cannabis indica
acgataaaaaaaaccttcgaacacaaccaaaactccaatcaacaaatcaaaaatcaaaagtcgattcggaatctatagacaaattcaattcagtgttactgtaagcaaaaaacagtatcgaatctgaaaagattctcaacaaaaaaaataccattgacgaagaaaaaagcttcagcaacaatctccaaatttcgatcaaaaattagaacagaagttgttctcaacaaaagaaaacgattctcaaccaaataaaaattggtagaattgttgctggacaaattacaaaaacagtagagaaaattcgatagctgaagaaaaagtgctttgttatgtgcagtcaagcagaatcatggcacaaaagtaagctaaaatattgttgtaatattacattgctaaaaaatgatcattgtaaataatatgatcatacattttcctgcacacaatacgactccttttgatttatgctaatgcaattcctcaatgctaatgtcgtatttagtaaaaaatcctctttctctctaaaaaaaaaaaaacttagtaaaaaaatctcacattgtttaaaaatactttagctgttgctcataaagtctataaataaaagggtaaatagcggcataagtacctaaaattttaagtttgtaagaggcataaacccaatgtttatttttagtggcataagtacctaatgtttgtaaaactgtaattttcctccaattttgtcagtacaaactctgttttgaatttattaaaaggatatttggaaataactgatagtatatgtttctgtctagacccaataatttaaaatttagaccttatatgtggtctgtttatgaaaataacagagtctgtactg

SEQ ID NO: 183701 - DNA, 563 bp, Cannabis indica
cagctccgaagtatcctctactccgactccgaaaactcttcaccgaaacgtttcttccacattgctcgtcggctagactcctctgccaaagctctcaagttcttcgactatgtccgagaaaattccaagtgcccagagacctgccattgctgtcgtccgttttccaggccgttctcgagcttgctagccgcgaaaccagctgggaaaaaaaggtttttcagctgtatatttcgtctcaggagcagaatgttccgctcaccattaatgccgcgacccttctcttaggttgcttggggagggccggaatgaaggaagagttgcttattgttttcaaagcactcgatccggattgtaagaatacccatgtttgtaatcgcctggttacagtgttgtttaatttgggagatgttggtgaagcactccatgtgctcgacgaaatgcttgaaccgaattcgatatcctctcccaatgatacaacagttgatgttgtgttttccaagattttgagaagagatagacctgggaggcggttcaaggatgaggaaattgttggattggtgtct

SEQ ID NO: 183702 - DNA, 980 bp, Cannabis indica
gtatataatttgaattttataataaatattaactaaaaatattcaacaatttgttatttcattatttttaaaaatttaagttttaattttcatttaattattaaaaaaaatttaaattttaaatttttttattttcatttattttttaaaatatttttattcattaataataattaaacaaaatataaattataattataaataatttaaaaaaatttaaaaattaaatatttaaaatacttcaaaaaaaaaatcaatatttaaaagtactattgttaaaaaaaaaaaaaaaccttaatttaaaagattagggtttgtaaaaaatgaaatcccctttctctccccccttgggttctattccgccttcctttcttcaacaaagtttggtgtaataacaattcagcccaagaagaggtgagtaaagtatcgctacaacacctacggctacggcagccatctattttcaaaattcaaaaactttttcaaaatttttccccctctctctcaaaaacagccgcacctaaaattctagggttcccaataattccctttctcttctacccaaaacactaatcaaaatttttctcacgacaaaactcaaaaaaaccaaacccaaaaaatcaaatctctaggttataactttttgtttgttctcactctctcgctctccttctttgcgtatccatcctgctcagctcacttgggtcttcaccggccaccagccccaacgtagcatcccgagatgaccacagccccacttccgtcttccttctcttctcgacagcctacgaaatcacgggggcgaaatgctccgcttgttgtccttcgcgcgaagaccatcgtcagtatctcaccaccgttagctttctccctatttttgatttgaacaagaaattacagacaaaaatatctttatgctcttgcagatccaactcctctctcattctctctacctttttaggtatgtttttgttactgag

SEQ ID NO: 183703 - DNA, 504 bp, Cannabis indica
gaaagtagtaacattatgttatgtgtgtttttaactgagacaaattaaactttaatttggggaccaaccctaccttgcccacccaactcaactcaccttattatataattccttattttaagaaaaatgttagggagagaagaagaagaagagaaagggaaattttgggttttttcttttattcttttttaatttttatgggctgaaaaattttaattgtcctaattaaattataacacgtgtgctgacagaaatcacccagctgtcacttgtttttggatggagacatagagtatagagggtactgagtggcatccctatcaggagggggtttttttggctttatttttggaggttaattggtcatcatacttgaatcaaccaaccaaggaccacataaagacatgtatttatttgtaaatattatgagtggattgatattgggtcctcacaactatcattttaaaaaatagcgtcttgccattaattagtaatatttttaat

SEQ ID NO: 183704 - DNA, 763 bp, Cannabis indica
aactctctcgccatggctaagggagtgattcttcatcaaagctcaaattgaggtatttgtaattttggaagagttaattttgtaccacctatgattactaccagtataataattgatggtgttgatttctttcaatttgagtataaaattgtaatagaaaaaaaatgatagaaatgaagcacacaatactaatttgcaataattgatggtgttgataataattgcattttatctttaattttttataaaattagtgaaagttaaaaataatttgcaataaaggaggtatatttatataaacctatttatgatgtagatgtcaaaccagtaaacctttataacaaactgagatttattttttgttcatccaaaaccatgtgggataattattttaaaaaatctcttgagggacagctcaaaggcacaaacttaatcttgtgaagtaatggctcttatcccattgatgaaaagttgggtgtatgttgggcattctagagaggaagtacttgtcctttattagaactcctagatcttatctaacctaatagtttttggtggtgatttaggcttctgttgtagctttgatagcctgatctacctcttactaaattagccttaacaaattattgattaatataagattatctttaaaagagtaatcaagtaaaatcttagttatccataacataacatcaacatgcattggattcaaagccaactaaccctattgaacacaaatggactatgctaactgtcttgagca

SEQ ID NO: 183705 - DNA, 618 bp, Cannabis indica
cagcattggctggggcaagtttcatcgaggacttggtgggattcgaacctgacgaggaaaagcatccctaccaatacactatccaagcaaatgtttattatttcttcttttcaataactatccaaacaaacatttactaccaaagtaaatgttaacataaatttcaataagccaaagtgttgaaatataaaaatacaatacaatgcttttatcaaactcactagctatacttttaaaaaagacaaaggaatcacaagcttggtttcattatatatactatttgttgcccggcctatttctgaaattaaggaattagtatacaaaatcatactcaattaaacattagatgacattacataagtaacataataagaccacatttcacactttttaaattataaaaaaaaacctgttctgaaataatcttcaaactctatatgggtttcttattcatttcctgcaaaaatgaaaaattctctgaaaacaattaatctatttcttttcttcttaacgtactgttgttccccggattatgttgtaaattggttagtttgtattaatgtaagtttttttttgtatactaaaagaaaaaaaaacttaactagttgttccttttcg

SEQ ID NO: 183706 - DNA, 629 bp, Cannabis indica
ggttcgacttcctgtggatatgcttataaccgattgtaaatctattgttgataaacttgcctcttataattggagcaatagtatacttgatgacattttaattagtgttaagaacttgttatctttcaatccaaacctaagtagagtctaatatatgttggctcataaggttactaagttaggtcttggattagataatgagttggtttggaatggttgtctacctttattgtaatttgctgactttgtactccttgttttatccaatgaagcactagtttttatcaaaaaaaaaattattattcattttcttaaatttattttatcatgtgtgtatttttcatgtcttttttaaaaatttgttataaatttattattatttattgtaatttgtatatatgttttttggtgcaatgaagaaagtaaaatgagggcttttataacaacaaactttaaaaatttacaaaaaaaatttattgcttagaagagattcatcttctttcctccctattttgatgtcccttaggtggcgtttggttggagataatgaaatggaatggaatagaaagaaagtaatttttattccattcctttgcttggttacattttaaagtagtggaatgatattc

SEQ ID NO: 183707 - DNA, 776 bp, Cannabis indica
aaattactcgaacaaaagagacacaaatgttgtaatcccaaaatagctcttggagaggcttctcttctattctaacctttcaagagagttagatctctcccaagagattttctctcaattctaaactctttcaacataactgaaactgggttctaattaagcaaaaacacaactcagcctaaagcaattaaaaaaaagattaaaactaaataaactgctgtaagaaaactcatgcttggcgtttatggctattcctcctttgttagacacatcggaccagaagcttatcatatagaaaatattgagtcttgagttgatttgattattgaataaattagagattaatttgcaggcaaagcggctcaaggccataatggtggctgcggctgaactagcagcattgcgtcttaagggtcttccatctacaaatcataaaggtattgaaaacgaccaacaaaatagggtgtttcgccttctggacaagaacggagatggcaggatcagcattgaggaacttatggaagttatggaagagcttggtgctcctggggatgatgcccgggagatgatgaagctccttgattccaatagtgatggatctttgagctctgatgaattcgacttgtttcagcaacaggtgtgtggcgattgatgtctttaatagtagaactactaatcatgggcatgagacataaatgagagtaattgattatgcaaatgcaattctgtttactgtttgtagttgaatttatgcgtaatttggaagtacagagtat

SEQ ID NO: 183708 - DNA, 706 bp, Cannabis indica
gtacttcattatttttttcttatatgcgttggaatcattgagttgtttaaactttatttttagtattgtagaatatttaagtattttttaaaaatttacgagtggttttaatatgtacaatgtaccataattataaaaaaataaaaatttatttgtaattatatttaaataaagaaacactagtatttatcttaactatatttccataaatatattttcatcacattcaaaggtagtaattaagttgctaaatatacatgtgtgtatatgtaatctcattttattatatatccaaatatatatatgtttataatagttaattaaaaaataactatacatatatactataaatttcattatcttcaaaatttcagggggggccagggccatcccaccctttaaagtgcctccgcccctgcctatacatttattattcgaaatatgagtataacattacattttgattgttttaatcggatgaactacttcgtgtataaattataaaatgtcaatgtaatgctccaattttcgtctatttcatttaccaacttaagcttacacagttagatttgtactattttcgtgcttagttaaaatattacaaataagactattttgtaaaatggtacaaaagaaaaagtattttcagtcaaattcaacagtaataattaaaaaaaataatactcaaattttgttattattctac

SEQ ID NO: 183709 - DNA, 508 bp, Cannabis indica
aagtactagtttgtattatagataatatttttacgtctcgaatttgaggggtagcagttccatgcggcagttctgagtgagcaatccaatctgaagattacacatttgaatttgtctgtcatatatttggatattttttttccgattacaatattaactatgaatttgggtgaaaaataacgagtagatacttgtaataataacagttctttgtattattgttgtactttgtttaattgtcctgttttgcgagcatataatgcaatttaaattgaagagttcagttttgtacatttcaagagtattgctgctggcacctgccaaaaaacagcaattttatttcacattattctattgaatgagataaaagcagcacttttattttcacattatttattcaatcctattggattttgtcaacccaattcaatcaaattgagtcaactgatccaatctaatactgatctaattcgatatattggatttgatcggttctaaccattagatg

SEQ ID NO: 183710 - DNA, 1007 bp, Cannabis indica
agtaatattttacattattattctgatgctaggtattaacccattccaaataatcccttaaattgttgaccttttacatttattttttttattgtattacataataaaataataataaaattattactttttattttttggatgaaataataattgaattttaaacaatactaaaaactaatacaaatatattacaaaattattttttataccaaacatagtactattttaaattttctattgtgatggtcttagaacatctccgtaaataagtaatacaaaattaaaataagctcacttaggccaattccaatgaaatactaaaatgtcaatctgtggagattttacactaatattagtgtcactataaactacaccaattttttttttattaatttttttatatttaaataatatattcataattaaatgtttgtatatatttattggaaaatttacatgatgtactaacttttcttcatttattacaaaaatactgtgacacgctgacatttacattttttactgtttttatttattcggtagtatactgccattggttatatgtttttatatattatgtggcttgtcttcatggggtttagcctcttcatttttttaaaaaatagtgttttagaaaaaggatcatttgacttgttgtgttactgtttgtgacagctttctattatttttttttgggttttattatttttataaaatattttcaaatattttaaaggttatataatcattacataaatccactctcccataatccatgttcatcttcttcttagctcagtcggttacaagatgtgagtagttttatatttcttttaaaaaaaatttagttattacattttcttctcaagctttcctcttattttccctccattttcgttccttttctctataaatactactcctcctcaatctaaatggcagttacacgttcatctccatcatcctctgttgctaaaaatttcccaaaacaccccagaaacaaa

SEQ ID NO: 183711 - DNA, 503 bp, Cannabis indica
cacacaattgcatctcattcttttcagagtgaattcctgagccaccactttcctctctcttttcttctcttcaatatttcgaaatccttgagtgaatgagtagtgcccacacacatcaagtggtacctcaatcatagtatgtaagactatggaaaatcagcatcaaagaaggagagaaagagatccagattcagatcttgattatgctctgctacagaaaggaatcaagggctagagatctgaatggaaggagtcattatattccgctgcacccaatgtaaggttttcttaaactcttatgtgtttattttcattgttttagaattcatattaggatgttaatcaaacatacttggtagtaaatctagatcctggtaaaatatttccaaacaaactggggattgaacggctgagcattatgagtttaggcagtatgcttagcaggaatttcttttgtcccgctcagtgggatactgtacgtagcagctggtttctaattagca

SEQ ID NO: 183712 - DNA, 546 bp, Cannabis indica
gttaatgtgtgtttaaagtttctatcttttttttgtgttctatattattacaggtaattgtgatgttgagaatgaaaagatgagtcaaattggtggaataactactctacaaactcagttacacgtatgttataaaacaataaggattaattaattattagaacaattttggttttcattgtttgcaattttgttattgaaaaattattggttattgattttttttttgaagattactaagtgaattcaataaacaattcaaataatacaaaattattgtaaacttatttgatcagattataaatcttttatatcagaaaccaaacctaatatagatcaaaataaatgaatagaagtaaaaattaaaatatattgagttttaaaatagtaagaattgaattttatgattactattttaaacaaaatttaattttaagttttctagctataagcattatttggtattttcatacatatagaaatattggctttcttaatttttaacaaaaaaataaaaaattataatgagttaatgttatcaataaa

SEQ ID NO: 183713 - DNA, 1079 bp, Cannabis indica
ttttgcatcaacaaaatattgtcacgagataagaaagtttcagcaaaatatatatgttgtcttaataatgcattcgttccttgtgatgagtttaaggtcattatagaccataaatttgtagaaaaatttacatgatatactaatttttactatttttttataaaaatactgccaggtggtattttttatttttttactgtatttttttattaagtttcatactgcagtatactgtgttaaattttcactggtattctactggtgttttttagttgttctactggtgttttgaattgttctgttttgtgttctactggtgttttataaaaacatagtatttttgtaaacttttccgtgtgacagtatttttgtaaaaattaccccaaattctcgtatttttgtaagtttcccaaatttttatttggtctactatatattaattggacaactcgatcataagcggttggtatttttgaattttcagtggctctttttctgactcattatttcagaatcacaagtgatttttttttttttaatttttgggctcttggatcaatttttttttttttggattttttggtggtctctttttttttgggtactacttcgattcggatttttttttttccatctcaaaaccaaatagcaatgggtggagtagctcatttcctcttatatatttctatttatcttttccacacatttaacaatgtgatactctctaactaataccatgacaacaatcatgatgtttcatttcaaataaatcaattggtgataaataaaataacaaccactacaaaaaaactgctatttttagtgataattttttagtctcaacataaattttttgtgactaaatgtgacttttagtcacaacaaaaagttacttgtgactaaaacatggtatttggttacaagctgttactaatttagttttagtcacaataaatattgtgactaaaaacacatttagtcacaacaaattgtaatttttgtgattaatacttttagccacggaccttttaatacaacacaataataataatttataattaattagttacaatttttta

SEQ ID NO: 183714 - DNA, 947 bp, Cannabis indica
aacaaattctgattttgtttcttctttctctattttattcaagacttaatattacttaagtaatacttatccatcatatacttggcaaattacaaaattgcccttacacaaaattataatgaataaatatctcaagggcataatggtcatttccaataacccacatatatagcctcaaaacttccaaatgttcataaaaaattttggtacatctaaactacttatctacaccaatgtgacacttttgatcaatttatcgagtttccactattactgaacattaaagtaataatatagtaccacacataatttaataaaatctccgtaattaaaaaaattatatcatatttacctattttctaataataataagcattatttagctatcatatactaattaattattagttttcatatttaattatgtagtcattacatattatatttttctgttttgaaaaaattctaagtaattgtaccctgataaaattcagatagtcaactgcatacatgcttgtttttattaattgatacgtgtgcaactaattgttatacatattcattctagaaacactcttaaagagagttagtgatatactccaataattctttctcttttattttgcaagtctaaaagttaatatgttagtgaagatttacatgcataaataactataactatgtagttattctgcacacatatatatagagagagaattgttcatatatttatagatttatataatataacatcgaaccttttcacgtctatagctacataataaatcgcttgttaattaggcttagcggtgcatatatacaattttttttttttttgtttagttaattaataccttgggttgaattttgaacccttctaaataataaatatgcttgaaacaacaaaaaaagaggaagagaaaaaagaaaagaaaaaaaaaaaaaat

SEQ ID NO: 183715 - DNA, 877 bp, Cannabis indica
ttggctattcacacctactgggctcagatttttatcttacccaagaaactgctgaatgaaattgaagcaacttgcaggtcctttctatggaaaggtactcaagaggggaatggaccagggcttgtggcttgggagtacatatgcagacccaaatctgctggtggtttggggcttcgaaacatacatcaatggaatgtggcagctttggggagatatgtgtgggacatagcaagaaaaaaggattgcctctttgtaaaatggatacacatggtttatctgaacgatcaaaactgtagctccacaagattgcagctggtcttggaagaaaatagtggcagtaaaagacagatttcagcagaaaatggacatggatagcttcctaaaacagaggtatcgggttaaacagggctatcatgatttatttcctaaacatcctaaacttccatggtgtaatctggtatgggataggctaattattcccaaacatagattcatactatggctagtgttttggaaaaggctaaatacaaaggaaagagtaagcagatatcaaagtattgacacaacttgtgtcctgtgtggcaaggaagaagagactagtgagcatttattttttaagtgttgactatagttcaagctgtctgcagcaaactaaagacttactgcaatggaaaacaacgacagatgacattacaaaattgttgcaagcctgccatcattcaaagagtcttaatgcagcaaggaaaagcattgtgaacacagttatggccagccttgtgtatcacatatggaaggccaggaatgaagctctatggaaccagcaactgtggctgacctccacggctgtacagaaaagcaaacaactcagtttgctaag

SEQ ID NO: 183716 - DNA, 585 bp, Cannabis indica
ctatcgggctcagatcttgattatactctgcgacagaaaggaatcaagggttagagatctgagtgggaggagacatatattccgctgcacccaatgtaagatttctgatacttttatgtgtttaattttccatcgttttagaagttcatatttaggttgttaaatcaacatacttgtgagtagatctaagttcctggtaaaatatcttccaacatgtataacgtatagtcttatttaattggatgaaatagtatagaagagtgaacgaaactgcaatccaaaataagtaagttaacaataatatttaaaatgtataaatattttttatgcttaaaccaatacatttcaaaataaaaaatatatgacacttttatcaaaaacccaaaaataaccctcacataacaacaccccaactctctctcttcctctatctctctagcaactctctctctgcccacttcgcacgaaccgaaccccccacccccaccacgagtcgagccccacctccgacccgacaccagtccgaccagagacccaccagccgcaccactcgacagagacgccgacggagaccaaaagcaccga

SEQ ID NO: 183717 - DNA, 721 bp, Cannabis indica
acctattttatacatcaccatggtctaattgttagtacactacacaaacacataataacattgttccaactcatctcttcagctctttcatcaagtttaggaaagacatcttttattttatttttcagaaaaggaaaaaaaaagaagaaagcatatttcgtttccctttctgactccatagaagaaaacaaaatcagaaattgacgtcctacattctgagcaatctctttctttttgtaccataaattttctgggcttcacaaaacagactaagcccatgtctgtttgttttacttttcctcttttcgaacgacaccgtccgacgtcgttagaacctcaatccggaaattagatgaaatcttttgtctctagataactattgtgcgaattttctggctgaagaaaaaaaaaaataaatgaagcagaatcgacatggaccgagtcaagacccgctcaaggcgcacaacttttcctggttacccgatagagcaagcgagttattcgctcttctaatgcgaatcggactcctggtttgcctcgtggcatcaatttcgctcgctctccattcggctttctgggggtagctcgtctcggcggttcgctttaccggaccggacacgaaatttccagactactctgcacaaaaacgcgacgtcacgggacccaccaacatctcacacgttatttttggaatcggcgcttcggtgcacacgtggcgaga

SEQ ID NO: 183718 - DNA, 1045 bp, Cannabis indica
gttttgcatccatgcaattaggagagaagagaagtatgaaacaaaacaagaaaagaagaaaaaaattaaaatagaaatgaaatgaatgatcaatgaagtaataaggaagtcttttacaaatactttttactctttgatcataatacttatattttccaagaaacatctattatttattttttaattcaaaaaaaagactaacgattaaaagtcatccatttaaattaatttatatcattatgtttgagtgcatcattattaattacaaatttatgaacaatcatattttatgttatctctttactttaaaaaagttgaggtataagcatgtttaaaaatcaatacgtaacttttttacattatatttgaattttgaatcgaaaaatactatagttgtaatagttttataagagtttaaaacattgtgaaaaaagtgggaccacaatcatatattaatcattatagtttaaggttattattgtagaaagtgcggaatttctgtcagtttattttgtcattttctaataattttaaagttacgcgttaaagacaataaattagatttttattttgtttgttaaactactttatctctcttaaaattggatagtccaaatgtataattattttttcttcttatatattaacttatttattagtacacgttatattaatatgcatggtgatattctgaagaaaatttaaaataatttatttgaatgttatttcagtaatttaataagaattttcttattatatatttataaaataatttatatattaattagtaagcttgctttcttttttttttttctagaagtttacaataaaaacatcttatatatctctttatattagttttttagaaaatttctatataatttagagtgacaaatttttttatattatgtcaaacccttattccaacatgtgaaattattctctgaattttctaaaaaaactaacatataatacttcctaactatataatatacaatctatatgaaaattcattttcatttttttgatctcacgtcctccaagg

SEQ ID NO: 183719 - DNA, 612 bp, Cannabis indica
ggttaattcataatctgtcattcacttcaagagaaggatagcaattagacattaacattggtaacttaacaacaggattcgtctccctattttcttatcttgattaatcttcctttgttatttttaattttctgaattgtcttatttaattcataaaaagtattcttttaccagatagaatcaatagtataatttagtagtaattagtccaattccctgtggttcgacctcacctgtgtgagtttactacttgattgcgtatacttgcgtagtgatcataattttcgcaacaagtttttggcgccgttgccggggaattgtataaagattaatattacataaaattatactaacttctactttggttaattcttttttgcttatttctaatctgtttcttttagattaaattttgtaatattattaaaaattaaattttgttctaatttggtttttctttttagttttagtattaattttgttgtttcaaatttttatctttttagttactaatttagtttttttttttttttaattttttacttaattgtttttacttatgagttttgacctgcaagataaatccagatgctatatcttgtaggattttgc

SEQ ID NO: 183720 - DNA, 513 bp, Cannabis indica
gggctcttctcaagccggttaagagtaggacagcaggagctcacgcctaatcttatttttttttttttttaaacactacatttaatatttattaaaaaactcaattatattttaaatactatatttatatataaaaaagaaacataaactttacataaaaattctgataacgatttttctgacccaaaaccactcattagcttgagatagacctagctcttcttaaaagataataatcgagtactgattcagtgcttcacataatttaacaaaaactaacaatgtgtttacgtgtcaagttttaagagaataaaataaagtcctataacatgagactctttaatattcaacaaaaagcaatcccaaagttctccttcatcttctacattttatattagggctatttacaaaaataatgggaaaataaagatgtgttttgatatatatggcataaaacttaatcaccctaatatggcatttttttaaaaaacttacaaatatgggaaaaatcat

SEQ ID NO: 183721 - DNA, 518 bp, Cannabis indica
ccatatttttgtatattgggcctgatgttgttaatatattgggccagcaaagagaaagtgatggtattgggctttggtttaaaattcattttgacttaacgttgtcttcttctctctttctctctcttcactgagaaactggaatgagtgtttttcagtttcagtcttcacactcacacatctcccttttccctccattcctagggttttgaacaaggttttcttcaaactcagttcatttccatccccaaatctcgaccccaaaccctcgaattgcttccacattcttgttaatagagcaccacagacctcaaaattcatggctttttcgttattttctacgccacaacaacagcaacaaccacagtcatcgccgtttcagactcagcagcagtcccagccatttcagcagaccagtcctttcttttctcaacctcagcacacacaacgcccacaattcaactcaacagcacagcaacagcaatctccgttgtttcagcagccacagcagcagcaat

SEQ ID NO: 183722 - DNA, 933 bp, Cannabis indica
aaaaaattaaataaataaagtgtgagttacaaaatatattaaatggaaaagataaaggcataaagaaaagtttcaaattataaaaaagagataaagtagagtagagaaaaattccattacgaaaagtgaacgctaacttttcagtcatggagtgtaaatctcattaatccacctgcaattgagcatcataaatgaagtctaaatgattaaatagaaaaaaaaaaaaattaaagtaagataatgagataataaaataataatagaatatgattaattaaaatgaaaggtggctaattcatttatttcaatcaaataatgctacaaaattaaaggagatattaacaaaaaaaaaattggaaaaaaatagaaaagcaatggaaaaactcatataagatgttacatcacttctctatattttcataataattatataaattataaacggatcctaacaattatagatgagtttaatgtttaaactcataacaatataacaacatcaaacactataaaaattactaatattatatatataatataagagatcacgaatacccaattgattggtcaatccttacctttcactatttagtcagtctcacttcaatttcaaaattaagaaagaggtcgcaaaaaaaaaaaaaaaagagttacactgtttagaaaaataaaaatagaaacaaagaatacatagatttcataaaatcttattgctatatatatgtataattagtttatgaaagaaaaatagtacatctcattagactcttagggccgtaagatcataggtggtggcttttaaattcttatagatttattaaccatcttttaatttaatttcaaatgtaatatttatattagtataaaattaaaaagtctacatatatatataattaactattattaaagtaaataatatgtatataactctcg

SEQ ID NO: 183723 - DNA, 512 bp, Cannabis indica
taatagatatttgaaagtgttatatgtggttaatggtttagattttttatatatataaaaatagatgtatagataatattcttgagcatgttgttcttctttctcttgagcgatctttcctgcttttcttcagcctcatcctcgtgctcggaatattcttgagcatgttgttcggtcccagctcctcccttcaacttagcctcacgcttaagttgaatgagctccttctcctgctcagaatgctcatgagcatactggttggctcccgcacctcccttcaatttagcctcacgtttcagttgaatcagctccttctcttgctcagctcccttagcctggccagccctgaacttcctcttcttctccttcaccgaccaggtgcaaaatctattggataaagtccgtactccacaagttggcctctgaagtcaacaaggtgatattccgagcgtcatccgatagctgaataatcctttgagctctgtccctaagagcaagcgtgaggggtggac

SEQ ID NO: 183724 - DNA, 636 bp, Cannabis indica
atgttagagttaagcctttatataggaaattctaaaccctattttaaaactaaaaccctaggatatttgcatatttgattaattaattacgaaagaccaaaactcccatgaacatagatattattcaagtgtttaattgggattttagggcccaatttgcaacctaatcttattgtccacgtgtagagttgtacaggaattcataccatgttctttccttggccggttagaaacctgcacggagcaggctggccggccatggggacggccaggggtggccgatcagcttctatgaggaagctggtctgtcatttgacacccatttgagtgccagggtccccgtttactatgatattgacttgaccttcttgttggtgagttgtaccaccacgtagtgctgattttgtccacgtaagcattgccacgtcaggtggaaaaaaattaggataacaacctgcccgggacctttcttgcttaaggcatccaccactacgttggccttctagggatgataaagaatttcataatcataatctttaactaattccaaccaccacctctatctcatattcaaatcttttaagtaatttttcttgaggcttttgtgatcagttttcacacctctatccttagaga

SEQ ID NO: 183725 - DNA, 600 bp, Cannabis indica
tacattcactacctcgtctaaattagacaaaaactaaaaaggccttgaaaagtccaaaaaagattatatggacaatcaagaaatataagataacaaaaaagaaaagtgagccatgtgtaaacaaagtatataaccgatccttatcacaatatgagggataaaagaaataacaaataataaaaaatcgtgatcgaaaacaagtgaattgacgagcactgtgcctaataaaaaaaattattttttgtggcacagaagaataaatgcttgtattttcatctccactaatggtgtcttttttagggtacgtaccaaaagataaaaagtataaaaagacgaaagttgatcatgactgacttttataaaaaaattcggttgacattcttggaccatattgtcgatctcttgttattatttttgcaataatggatgtaatatatccaaattaatagcacatgcatatcgctattatataatttctatgcttttctttttggctatagggaaacatattatatatgataagaattgcaaaatggcacatatatatatatatcacaatttccggggaaataattttgattatcgcctaccgatattaat

SEQ ID NO: 183726 - DNA, 641 bp, Cannabis indica
ctattgtgcttgtaaaattaaggcagtttatttttaaatattatagttgatgggttttttttttaaagatttttacatcacatattgaaatttttaacttttttttttttactgtagagtagatttttttaaaaaaaatattatgtattttttatactgtgtaccgtgttaagtttttactgttgttcaacgattgttttttagttcttttactattgttttaataattatgtattgttgttttacggttattttataaaagatagtatttttataaaaaaatctatgtagcagtaaaattgtaaatttttgcctaaaattcagtatttttgtaaaaatattttttatttttattttattttatagtttatatatagttgttgtgacgttgatttgtagttgtttttttttactttctgctaagcaaagtatattttttgtaattttaaaagtgtatttttataaataaaaactctaagtcgtaaaattgtaaaataaaaaataaaaaatagtattttaaaaaatttcccatatttttgggtctattcattatccaaattctttctgtaccattttctattatccttgaaacaattaatagatatgaatgaggatgcatgtataaatgtgttagaaatttt

SEQ ID NO: 183727 - DNA, 649 bp, Cannabis indica
actcaattagtatgattatatatataatttagaatttttaaataaaaatatatggtaaacacgatttatttatttacatataaaaaaaagtgtgttatatacgaggggtggtggggccgtttagttggatggaaagaaatgaaatgtaaatgaatgaaacaacttttattctattattttgtttggttgcattttaaagtattcaaatattatttaaatataatgtttttttattattttagtagtatgactattctattttaagatgaaaggaatgacagaaaaatttaaataattttttttatgaattttttattattttaattttattttattattcctgtttgtattcctatttttattttcattcttattcttatatttttattctttcaaagaaaaaaaatacaaaatatattttataattatctaaaaaaatatttttctaactaattatgtaaaactattaatacaaaggaaaaaattatatgataaaattcaaaaataacctgtgcgaagcgcaagttgtttactagttcaataataaaaaaaaaaaatcaccatactaacatacttttaaagagctgatacgtatacactaaaatacaaatatttagaagggcattttacaattttgtatacattattt

SEQ ID NO: 183728 - DNA, 513 bp, Cannabis indica
aaaaaaaagttgaaaatggcactgaaattgggcagagatgccctcacctaaaaaacccacatgaagcttcacaacggcaatgaaatgctcaatattctttgatgtgaacatttaaaattaaaaatataatatgaaaaatttgatattaaattgtataatcacgccttttttttttctttcttttgcttgactaatgtaataatcacgtagctaatattcaataacattgaactaatattgtcacaacactacatagatggctaccaacgttttcttacatggcaatatataattatcaagttttttcctttaattacgaaagtatgattttgaatatttggtacggataattggagaagaaatgtcacagatgtgtactctgttccttcctaagccattatgtatgttccttgttgtatagcacacgcctcataaccaaaatgaaaaaagatgttctatcattggtctatttttaacaaccaggtcccactaaactgtgaccaagtttcaagt

SEQ ID NO: 183729 - DNA, 567 bp, Cannabis indica
aaacagagagttcaattggtaacttttacaaaacacagagtccaaaatagtatttatcataaatagtacgataaaatttaatgggcaaaaagaaatttgaaaacataatttggtaataataatagttcaaatataaattaatcctaaattattttactttttttttttatatatataaaaattattattattatttaaaagtaacacatgaatttcacttcaatatagcatattctaataatactaaaattattattacttagctttttttaggtatgaaaatgtcgaaaataacttcttttatagtatttctcattttcaaatttaaatataattttacacaaacaaataagttagggcggtgtattaagaacttagatttgggacatactagctagaagacatgattattccatgtacgtatattatatttctttctctctctctttctttttttttttttttttttttaactaaaacgattaaaaaagtattggtggaagatagaaaaaggttatatatcaaaataattataaggtacacaccaaatgtgaaattcatgccaaa

SEQ ID NO: 183730 - DNA, 696 bp, Cannabis indica
caatttgactgttttagatttttaaactggctagtgtttgagatatctcggtatagtgcatttacattcttaaattgttaaatattccaacataatgttaattcttttgcttctataggatgtattactgtacaacttttttggttcctcccctctaaagaatcaatggagggtcatatatgaatacatgaaagaacaagatttgtttgacaacaccatacctaacttcccaaagttctccgagtccaaacataatattctatgctctgaactcaaaacaattatacgttgctgtcacacgtacgaggcaaaaggttgtggatctgtgaaagctcggaagttgctgaacctttatttgactattggaggaagaagtgtcttgtgcaatctaaaccgcttgatgattcacttgcacaggctatgcaagttgcaagcagtcctgaagaatggagatcaaggggcattaaggttttgtttttttgttgtgaatagtggcatagaaagttgaaattgcttattatttgtatccttaaatcatttttattctctttctaaacagctctttcatgagcacaactatggaatggcgacgatgtgctttgaaagagctggcgatacataattgggagagattgtctaaaagcttctggactcaaaggctatggctgatcggacgcgcattgcaaaatcctgatg

SEQ ID NO: 183731 - DNA, 521 bp, Cannabis indica
attatttgttcaccaatcaagatgcaattaagcaatcttaataatatatgactcgttatttttatcatctacatataaaagtgaaaaaatggcatatacatatcatattcaaacgaaaaatattgaaaagtatttctttaaaaaaaaatctctcgtgtaagatgcctgatcatttgaagatcttttagtaaatgagacttaagggtccacaatgttgaatattaataacttttcttattagaggtgaccaaataattcaaaaataaataaaaataatataaaaaaataaattaattattagtataaaaaaatagagtgacacataatgaaaatctatatatataaatgtacaaacatgatcgtgattatacttaaacattatcctataattgccaaaaaaaaaagctctacataattgttatagctaacgattttttataattgttattaaagtaaataagtagttttcatttaattaatacattcatgcttttacctaaaaaaaataaaaagataagtag

SEQ ID NO: 183732 - DNA, 1046 bp, Cannabis indica
ttaacttattatatatatatatatatatgaatcctaatacaaataacaaaaaatattaaaaggtatattaattaaatatctaaagtctcatataacttaatgtaataatttttaaggaatatcactaacaaattataaaacaacacgtatagaaagtgctagacactactggtacctaatagcaatactcattcttatattatattattgttaaaaggtactactggtacttagtactttactcgattttaaactattattggtgtaattaagtatcgagtttcacataacttaaaaaaaatattgttaaccaatcagaagacaacacatatagaaagttttaaatatcgctagtacctaataacaatactcatttatatattatatttttatagaattgctaaaaggtattattggtatctaacaccctccttagtgtcataccgctattggtgatattacgtatcaagtcttatataatttatgaaaataacttttaaagaacaccgctaaccaatcgtgaagcgctacctataaaaatattgtacttttataagtagtcatcaaattctcattctctaagaattaattagttaagtcaacttaggagatagcaaagttttattattaattattatatatatggacacaatataatatatacacattaacaatcgttttcagagcttttgaaaggttaattaatgtcagtgccattaccataattaagctcattctcaagacagcatcataatatcaaactatatatatatatatcttaatataattaattagttaattaattgtgtgtatatatataaacaatgtatatagtaaaattttagtggtagcacaaatgatggtgtttgtgttttacctagatgaattcaaagaaccaaaataatggtagatgtgttgatgtcaactattgtattcatacaaaaaactgaaatactctttataatgttaagatataaggtgttaaatgttgtagtttctatttaaactagtacaaatgtaattctatttttctagttgtgtacgta

SEQ ID NO: 183733 - DNA, 1004 bp, Cannabis indica
ggtaaaataatttccaacactttcaatctcggtattacatgcttttgttatctttaatgaatttcattctctgtttataatcatcgtgcaactgtgtttgttttatttttatcaaattctttgtacaggtataggtgcttcccaagtaaccgagcagacttatgactcttggtcacttgttttttgcaagtatgttcggggttttgggttcgacaaaaccttctgtacgcactggattgtaaattaacaacatgttagtaatttcgactcaatttgaatttttaaataaacatctttattcatttattgatcgaaaatgtgtttgttaccgtattaacttacatcagagctatttgatcaatctgatcttttagcttaacatgaaataaaacaaattcaagaaattagaaattgtactttaaaatggtggtcatccgacctgagtacctttccattttgtccaaaccattgggcgtagtaccccccagtaggccattcacttaaagtaaatgttctttcagtacttaaaatagtcatccgacctagtacttgattggtagtatttctataaatgttccccattccaatatgtggtactagaacaagttgcatctttcatcatacttacccaatttgtatattcctaattcgagaacttcaatcacttgatattgtccttcccaattaggtctgagtacacctgtcatactgttgggttttatgacctacataaaactcatttcaatataatcagatttacttattaatatagatcagaaataacatttaatgttgcatggttcacatgatttattttatgattatatgtacacaatgtataaattcatctgaaacccttttcacatacttgatcctgtttattgtgctgtcaacacattggaaagtaaacatgactatgtgaataaagtttcctagatttatcagacacaggattttactgatatgataatctacaacagagtttacttgcatttggagaaatg

SEQ ID NO: 183734 - DNA, 740 bp, Cannabis indica
gaggtaatttatcactgttgtacattatgaggtgattcatcactactatttattacgaagtgattcatcattgttgtattatatgagatgattcatcactgttgtgtaatacgagacaatgcaaaatctttatacgatgagcagctacaagatccttaattacattgcgggcagctacaaggttcttgttgtgagatgttgaatgtttatcaaaatacatccaaacaaaactgaaatacttcactttatgaaaattgtgatacttatttagatgatatcacctccaagcaatatatatcttttaacttaaaaaaaattcacaattttttaagtttttgtttactctatttttcagaagaaatattgttttttagtttttatgtacttttttacctatttttttggtcatgtgtttgttcttttcaattttgttgaccatttttaaattttttttttcttctttttaataaaaaatctctatcatctcatgtactatttttgtaaaaaaaaatatatattcttttaatcatttgtacatttttttacctatcttttttctctttggtttttttaattttgtttgctaatttttttattagtaaataatagtgtagaaaattataataagtctgatagcgaaaatcaattacgatatttattttctgttggaataaaatattagaataagtgataaattcacaaaattatctatatttaatttttaattcttatataaaaac

SEQ ID NO: 183735 - DNA, 806 bp, Cannabis indica
ccacaaattaggtcacgtttggaaacgaagctacttactctacagagtttctggtactggaaaaccagcttcattgccgccatggctagattctctgctatgatgggtacgagatatgtccaaggtctccgaatggaaatatagatctaatgaatggaatcgtaatttaaagggaattagtttcatcacgatcgtcaagttttattttttatagatatttttctttttttttctttttttttttttttttttgtagttaacgggtagatttataagtgtcgttaaattttacagaaaaaaagataaaacgttaaactaagaattgtcaaatatatataattttttaaataaatataatttaaaagttttctactcgcacgcggtttcgtttcctaatttctttaagtcaattcgtgatcaaatgtgtataatttgtaatattttagtcatcaagtgcttcgtttttttttttattatttgtttgagaaaagcaagcgggctatacttaagtcagaattaatgggcgtatacaatcaattaaatctggataactataactatagcaggtaagctacccgcggagacatttcactgcaatattatatctttttcatcaacaacctttatattttttttaataaaatgcgcaattatattaaatttaaaagtaatagagctcttgatcattacatatattaagttgtttggcatgaaagagggtatcaattatactagttatattactgataaaagttcagttaactacattgtaatattacagtcttaaaaatataagaaaaaattat

SEQ ID NO: 183736 - DNA, 799 bp, Cannabis indica
tctatggggcttctaatgagtttagcagctggtttttgggagttcttgaaactcagtctgatgaagttggtgttgacgctgctatggttagttggtctatatggaatgctcgtaatgatgttctttggaagcaaaaggattgcacagcagctggtgttatttactcggcccgaactgtgctgcaacaatggctgctgctcgtatcaaaagtcgggtccattgttggttttggtccctcatctggtttggagcagtaggcaaaaaccggtgtctcaatccattaaagttaatgtggacggtgctatcttcgcgacggagcataagtatggttttggttgtgtggctcgggacgctaattggaggctaatggaagggatttctggcagccgtttggggaatgtaggccctgaaattgctgaggttatcggagtgaaagaagcgttgagttggatcaaacgcaaaaggtggactgaggtggtgattgagtcagatgcgttaatggtggtgcaggctgttcttggctcagtttcaatgccatctcaattcggttacttggttcaagattgtcgttctttactttcttctcttaattgtgtgtctttgaattttattaaacggtctgcaaataggactgctcattgtgttgttagagcgtcttgtttaagcccagatcgtatttttagcgagcataacgctccttctgaacttttggctattgttgatgcggtaatgtttctgattaaataaatcatcttttagttcaaaaaaaaaaagtggaaaatagtataattgtaatgat

SEQ ID NO: 183737 - DNA, 916 bp, Cannabis indica
taataaatggttggatggttgttaatcattagaatccaaaatacatcatattaagtctggagcatgttaaacttacataaaaacaaagtttgtgcaatgtcccctttacataaaaggggacaaaatccattgcctaaatgtatattattttattactgcaatttggtaacactcttcaatggatttgtacagattactgctatatgtcaagaagcaggaatgcatgcagttcgcaaaaatcgttatgtgattcttcctaaagattttgagaagggatatcgaaccaacgtgaagaaacctgacactgactttgaattttacaagtgaggagaggagaaatactatttacttttttttttttttttttttagtattttatttccttttaatgttaaaacttagaaaatgggaattgtagaaatcaatgatttttattctcttctctagctgtttttctttttaatgtgtctttttgtttgtttgatcagctctattcttttggtcgatgagatttttaaccaatttgtacgtttgctactttattttttttttagagaaaacgtttgcactttatttaatgtaatattagtatattacatattattttgattgaaatgttctttaaatcaatttaaattgtacccaaccttttcttaaaagaagggcatacttaaatagtaactactatattttttttacggattaaatgctaaacattgcgttttaaatttctctgttttttttattttaagcgtttatatattacattgcataatctgggactcgaacccaagacttccaacacacacacaccctccctatagccacttgagctagcctcaagtggttattttaaatttctctgttttaatactatattttgttagttgtgactaaggtgtacatgtatttacaa

SEQ ID NO: 183738 - DNA, 574 bp, Cannabis indica
ggatcgcttgaagtctgctttacttcaaccgactcttcaactcattgatcttttcaagcgaagtctaagcttgaatttttatacaactacaaccttcctttctggaagtcgaaacatgttacattaaaattcaacattactctcatatgcacattgtttttcatgcaagaaaattcattggagctgcgatacgcctttaaccctccttctcagattggaaggactgcttgaagtgtgtcctaccctccgtgataaaagaatgacagagataaaactgaatggaagacacaccgaaaaaaattatgtcagagaaaccagtatatatttatatacttatatatgtattgatatgcgtttgatgtataaagtttttgaaaggtaaaagtatcgatatcctatgtcttgcttgcgtgtatcttaatatatgtagacatatatatactagttgaatgttatgtgccgagatatgtatgattagtctatattttttgtttaaggaatataatgtaattttttgaaaaaaaatcataccaaatgttatttaatgtattaatgcgattttagtgtaattata

SEQ ID NO: 183739 - DNA, 651 bp, Cannabis indica
aaaataaatatataaaattaaattaatatattacttaattataatattaaattaaaataggaatttatattggaatgttatacctttttgtttgtgaataaatgtttacaaataaatgtgtaattacaaaaatataagtggttataataataaaaatttgataaaaggagttaaataattttttaataataatcattataataatagataaattaaaagctaacttaagtaatatggtgtatagtatacatttgtaatatcttgaaaattaataaaacataataataataataataataataataataataataatatataaataaattgtatattttattaaatatggggaattatttttaaactaattataatataagttaataattaaataaaaataattatatgtgagttattaattaaattacagttcatctaattaactacgtgtgctcaaatattatattattatgtgatatatttattaactaggaaattgttgccttagatttttttccaaaatatgtgaccgcggctgcgtatgacgcgtggatcacaggacacctcaccaaaaaattagctaaatcatatatagacgagcaagtatacttaggaagtgagtccccgaagaggcacataaggcatgtctct

SEQ ID NO: 183740 - DNA, 557 bp, Cannabis indica
tgtcttaatatattgcttgccatactacttgcttttacttgattaattgactaattgcataattttgtgttaaaagttttaattttccgaaattagtttaaatttccaattcaccccctcttggaaacatatcttgggctaacaggatgtaccttatgcagtggttctaggatgtttaatgaacgtgatggtgagcacgagaccggacatagctcacactctaagtatcctaagtcagtttatgtccaatttgggcatggaacaatggaaagccctcaaatggttattgagatatttggagggcatggaacgtggatgatgcctcaaaaagagatacaataaaataaacctcttttgatgttttcttgacaaaacagaactttatatgctagaaagcccagttacaatccgtggttgctctttcaaccgcagaagcagaatttatggcgactacgaaagctttcaaggaagcattgtggctttgcagaattcttatgagttaaacaaatcaaaaagggaagtgactgtgctctcagacagccagacgtccatttacc

SEQ ID NO: 183741 - DNA, 540 bp, Cannabis indica
atgcttatatgcaatcaaaaaaatgtccacacataaatatatttattttaggatgatacaatattattttgtcaccttgttatatttttttatattcctttaattattttatattccttttatatattaatttgtgtcaaaataatatatattgatttgtttgcttcataagtttctgtacagatattttgccaaatcttatttatttatttatttttggaagaacaatcaaaataaaaccaaaactcaagcttcatttctcttatttcttccttttaattgaagtttgatttttcagcaaaacaaaaacaataaccacaagaacaatagaatttatatttgtattgggttattttttagaggacccgtagaagaggaattttggtgaaataaagtcattagatcctcagcaagtgttcaccaataaatcatccaaaaaataaaccacatacaagaacaaaatgtgcggtggtgataaaaaagatgatgatggaaaggttagaggagatacgggagagacaagcttcctagagaaaaaag

SEQ ID NO: 183742 - DNA, 570 bp, Cannabis indica
ttatatacaaaaccttcactagctgtctccctacatcaataatctgaactacgaatacttgcatcgtagaacgagcatcaatgaactgtactaggaaccattagattaaaaatttataaaatttaatatgttgctgactatttattcatagctaagtggtcttagttctctatacaactacaagacaaagcctcatatatgaataaagaagtttttgatattttatataaattattcaataataaatattaataatttaatattcaagcgtatatcaaaatgttcaactctttaatgataattagaaatgtctctataggcttttcaggacataaaccctaacaatactgtcctagcttttcaatgccactcttaagatgtgtcaccaaagaagaagttggatggctatatgctcgaagttcacaaagatgtttacaactatcacgttgggggaaaagtctgtcaaagaaaatactcataaaagggtatttctggcctacaataattgaggattcaatgaattatgttaagaaatgtgacaagtgccaagtttctccaagatctcgagag

SEQ ID NO: 183743 - DNA, 639 bp, Cannabis indica
gctttctttacctcctcctcagacacttgttggttcgattcttcattcatatggtctgacacccttgtctgtatacattctatcacctcatcaaagtctgctccagaagccaaaaaaaaagagaattatagtattgcacaatgacttactccaacccgtgaccccattccacccaatccccattattgttcctcaattttgtgatacgattatgaattcttctattactcactgctctatgaaaatatttactattttgatcacctcctttaagccaaaattgcttagatctctacttccaaaaggcttctttctgatcaagaatcgtaaacaaattcttcttcacatcactgtacttggaaactgacaattgatctctcttattcttcagcaacttcaactctgccccaacactttttaattctttcattgaagtaacctgtgatttctttcccccaagccgccagagcaattgcacaagaattaatctttgcaaaaaatgtcactgttattgtcatcattccacagctctttacaatttcacagcacaaagcattctcaaacttgaaactgtaattttgaacaaaaataggaggacactccatttctagaaaaattggactgtggtccgaaggtgaa

SEQ ID NO: 183744 - DNA, 508 bp, Cannabis indica
ttgtgttttaccggcgtatttcgtctatgcgccggtaaaaatcctttaccgatcaagattctcagacatgttttgccggcacagtattgcgccggcaaagcttcaccgacgcattcagtgtacttttgccggcacataaagtgggttttcttgtagtgccattaatgataaccaacttaacaaaaaaaaaattctcaattgtactgatagcctatcgacaacccgtcaatatcaaaatcaattgatatccaagcaagaatcaataaaaaattaaaattacaatttcttttgtaagattcaactgtcgggaacatttcgatagtagctaaatttaatgactatcacccttatcgaaaacccatcaagcaagaatcaattaaaaaacgaaattacaaatttttttcaatgctttatcgatcaagaacctatagacaacatatcgataacatgttgacaatagctaaacttaatgaccatcaccaaaagctaaatcttatcaataacccgt

SEQ ID NO: 183745 - DNA, 724 bp, Cannabis indica
ataacagttggtaatatttattaataatttctaatttggcccctcatcaaatcagaaactatctaattggtatccacatattaaaatcatgacaatcatgcccttaagtcataaactttattctaaaatagaccacataaatttgacttatttatttgatgacccaacacacattttatgtatgcagttgtgaccccaataaatttctaacagcctggactaatgttagaaaaaaattcttaaaaaaaaaagacatattgtctaggattgagggattgtggatacaacaaatcatattagacgagctataatgctcttttcttcaaaatagaaaagagaaatatcaaaaaatgggctcatgagatattttagttcaaaatttaaagaatgctacaatgctattattcattcttaaaacaatattttaacaatatttaaacgaaaaaattaatgtataatgtattataaaaatttgtgttataaaataaaaaaataaaattttaataaattattttaaaaaataaaataaagaaactagatgtgaatgctcttaaaaacacgactccatgtataatatataaggaaagtttaaaaactacaagcaaattgaattgatatatacaattggaattacttactaaaaattaaattaaagggttagtattataattaacaggtttagcttaattaagtagtagtttattaattacgtataacatacata

SEQ ID NO: 183746 - DNA, 806 bp, Cannabis indica
attatatcgatgtaataacaaaaattatttataacaaaagacttcattttaattttctccctagatctctcactaacttgagcggtcctagtgacctaggtctaatatgcctttaacatatagttggctcttactaaaaactactccatataatatctaatattatataatatgacaaatatgtcatattattatttgtataatttaataatataattgcatatatatcttttcatatcgttaaaaataaaaaatcaagtatcaaattacaaaagagtaaataccaaacttaagaccaaattgaggtcgttttcattttattttataattgaggggtaggagaaagacagtatttgttgcggtccttgttgtgggttgtaataggaatgtcataaatcaattatttcaaaataccagctaattttgctttcaaaaaaataaataaaaaataacagctaattttgtatttttattgctttttatctctatctctattcaaaagaagaatggatattgacagattttggtttgttgtgttgattttttttttttaaattagaaaaatataattaataaataatagataattttttcttttttttttctgtttccttttaatgttattaatttttatatttttttgtaaaatattttcccatattttgataaaataggtcatgttatatatatggaaaaaattttaatgggtattaaataaatttaactataaaatattaattttaaaaaatattaaagtcattagattttcgattcgatggcgtaatcataaaaagaaaaatttgaaa

SEQ ID NO: 183747 - DNA, 736 bp, Cannabis indica
tttgcctgcaatcgtgatctgcctggtaccatgcgatatctctttgtgcagcaactctgttcgttagtaaatgctccagatgggatagttaccaaatttggtcataactatcccaaaacctaccccctatataagtgcagaactcttctgcgattttgtacatatatccctaccatcactaaatattattctctgcaagaattttcctataatagcttctatagtttaaactatatactacagccactataataatatagtaacccagtcgagcctaggtttctacacaatccccacatatattctctctgatttctccaatctccctttgttcatagtctccaggtctgtattatagtcatatatattctctctgattatttctttcttaggttaaggtatcatattggccccctgttccccccgctgttgaaatctcctaaccaacactaccccatagttcatagacatctactttgcagttatcttgtttttagactctcgaatacctctgtccatcctccaaccagtttgctgtcatccctgttccactttaacctgcccagtttaatctatcaagcttcgtgtagttgttcttttagtttgcctactcggttctattgcattaacatcatcttacttgatcctagtcactacttgctcacttgcaccatggatgatctaaccaagtctctttctgttgctctcaatctcacagaaactgaatgtaccattc

SEQ ID NO: 183748 - DNA, 522 bp, Cannabis indica
taataatataaacacaatgtttatacatgatgtcatatttaattataatcttgttgattttttttaacacatgtttgaaaaactaataaacatgattgtttattcagaataaaaaaaataaatataagtgttcgatttttaaaattatttatgaacttttgataaataaattatattaattctatcaaattattatcataataaatatactaaattaataataacataataaaccttaatagtactaataaaatatttaataaatatttatatatatatacggaacacttctcaatgggtattacccattgatgggtactaaacaaatttaactataaatattaattttaaaaattttaaaccattagattttggtctgataacaaataataaaagagaaaattgaatttctatgcttaatttagctacttaattaaagaaaatatcaaaaaaaataatttttttatactatatcaaaaatacgtttatatgaaaaatatttcagtcaaactcatttttttt

SEQ ID NO: 183749 - DNA, 1043 bp, Cannabis indica
atggtagagattttaaactttaacttcaatatccaaatacaataaaaactattaactataaagtctaagtttaagttaaacactaaaatgtttaaactttaaatacaaaatagtttaactaataaatgtaatttatgtgatataatatataacttttataaaaaaaatatataaatcggtttaattcggtttattcgggttaattgggcggtttagaataatttgtaaaccacccaatatattcattgggcggtttggattttcattgtattatttcgggttgtattttttatcggtttattcggtttggtttgggcggtttattcgggttgggcggtttgtaaattttattgaacacccctagaatatattaccaccaaagaaggaaaaggaataagttacatgtgtttctttaataaaataaatagagataacatattggtgcatttcaatctatctccctctttctttttgcaaaatattatattcaacagaccctaattttaaatatttcaaaacaaggagtgtgattcacaatataaaaatacaaccggcctttttaatataaaagtaaatattatttggattatgtatttttcaaaagttataaattggatcttttattttattaaatgataaatgaaccatgtattttctaaaattgtacaaataggaccctgattaatttttgtcaaaaataatttgatctagagttaaaactagttatattttccacatctgtttgtattagaaattgtcttaaagttttgttatattaaaaaaaaattgttaaaaattaagctcagagttctatttttaccatttttaaaaatacaaggtctattttgtcatttaacaaaataaaatattgatactttttataaaatatagggtccaaaatagtatttagcctataaaaaataataaagaaaaaaaaaaagtaagtgtttgtttgtttgtttattttgttaagttatcactcttgagctagccttccttacacacacacaaaaaaaaaaaaaaaaaaaaaaaacgaaaaaaag

SEQ ID NO: 183750 - DNA, 575 bp, Cannabis indica
aaacctttcgtttgctgacagatacattttaattaactcaatcctaatttttatcaataccgactggcctcaaatagttattcagccgaaggctatttcaaaacttgtagcaaaataactttttttgtagattagttattatttatattgtcttttgccacataaaaaaaatcaataattttttttttcatatttttctagaattagaagcaaattacttaaagattatggtatatctatattagctttgttaaaatcttgtttatttaaaagttatgtcgatttcttttttaattttttacgagttgttgtggattgttggtatatagattttattgtacagtatatttctattttgttgtatagtatattattattctaggatgatatttactctttattttgctatgtataatagtggtatataattttgtttgcataatacaaatattttaatgtatgtatataattctattggcatgctacatatatttaattattatttttatatattttaattggatgatatatatttattttaaataatatatattagtttctattttattatatac

SEQ ID NO: 183751 - DNA, 543 bp, Cannabis indica
aaatttgggtaatatagcagcataatactttttgcaatgttttactatttttttattttgttttcggatatctaagttaattgccataataattaataatgccaacaatttcccataactttgtccactttaattgttttattaattaaattataataaataaaatctaattgtattatctattaggaaactcacacttatacaaatgtggcaccacatgtggtttttcacatatttcactataaaaatgttaacttaactaacaaaatcatgccacaacagtatttcaacaccccaccatttttttttcttttgccataaatacaaagataaaataaaagaagaaggagcatattcccttattgtgctaaaatatttttgtgaaagtattattcaaatgttaatgaacctaaaaagaaattataagtgagccagactaatgaatcgtttccacttttatggttaaaattaaagcctaatatttccaggcaatatgtcaattatggagtatatgtatttttgctattggacctaaatttagac

SEQ ID NO: 183752 - DNA, 915 bp, Cannabis indica
aatttaatgatgctttttcctagaaaaaaaaaaactatttaatgttgcctttggatttcagaaaaggtaacttaaattaaaatagttaaaaaaaaaaattagtataggtgttttattagtcaattgtctttgggtagattgttatcaaaagggggaatttttatgtttatggcctttaaattataaatttgtataaatatgatctttttgtctcccaagaaaatatattattttataggaaaattttcaagaaaaaaaaagggaaaaaatagtgtaaagtaactattttttttttaatttttcttaaattatttccataaaacaatttgtttaaaaagaaaaaaaaattatattttcgcactaataatataaaaattcataaaatttataattttcaggagatgaactgataaagttaattttaagataatttgtttgggtaaaaaaattaagttttttattcttaaatctatagctattggagaatgtctttttttctccagccaggcccgccagtcttctttagatttaggtgcggcatggtcaaaattgtattttgctattcgatttttgctactccgattagtcttgtttttgtaacatggtgtgtagtgtttgtcttgtctctgtgatatggtaataagtgttttagtcttatctctgtgacatgattttgagtgttttaattttgtttgtgtgacatggttttgtttcgttattagtttttctttgttcttcgataactcgccatcaaatcgtaattagtagttgggaataataaattctctgcgactgaaagaattgttagtattgaagttgcgtattttacacaatagttgaatgctcaagctacgaaattgaatgaacttgctgcaacaatttttactgtcgtgtcttcttagcggtagattaaac

SEQ ID NO: 183753 - DNA, 564 bp, Cannabis indica
tttttaatggataattatataatttcaattttcaatgtaaggaaaataaaaaaatgtttttgaaaaacaggtattaattgatgaaaaggaaaggttgtaagctgaccggttctttctagttgatgaggttaggcttctcaactcaacttttgagtggaacggtggcaagagtggggtccactaatattatgaatggtcatattgtttttttttaaattaatttattttttaattgtaattagttttagttttaggtattttttttttatttttatattttttttgttgttgtatttttatagaaattcatatagtaactaacagagcaatatgtaaatctcaattaaaattcacacaacaacccacataaaaactactagaataactgttaacgcagattttcgttaactaaataattaatttttttttttgtaataaatgatcttgagatttaattatctaataataataaaaagaataacaataaatgataagaatgtttttacgtggtttaaaattaaatcttcatagttcacgagtccatcttatttaaaattggaatat

SEQ ID NO: 183754 - DNA, 522 bp, Cannabis indica
attatggttagaatatctataaaaatatctaagttaatttcaaatttattaattatttaatttgtcatataagataattttaatataatatttcaaataaaaaagataaagttatcttttaatttaaaatatgttaaatatcaaaatatctaatcttataattaaataatatataaatattaaagaaattaacaaattttaaatctgaccataatttaaaaaataaaataatcaatttttaaatttaaacctcaaaatatcaaaattaataataatctattgaaaaataaatattattaatttaaaatatgatatttaagttcaaatatatttaaaaataatattttattttaaatttggggtttgaaaattggaaaaatcggatttttggaaaaaaaaaatccctaaaaatcgggtttggagtgtaggctgcccaggaggctgcacgtgcagcctctagaggctgcaaaaacagccattgcgcgcgcggagtagaagaggacgccgagaaacctcggcgct

SEQ ID NO: 183755 - DNA, 559 bp, Cannabis indica
ttgttaatggctttgtcttgtggctctgtttttgcctaaaaatagtgctctatctaatggtggtagatggggtataaaaagtaaagaggaacactaaaaaatacatgtttgtttaatttgttgtgtgttcttttagaaaaggttcactatattatataaatatatattatacacccttatgttaatgttgttttggggtgcttatctaaatgatatgattagtgtttttttgggagtaaagttaatgaaaaagaaggggtcaaccaaatagtgtttttgtttttgagacttagagaaggtgacatacattccttattaatgtttttggtactatattaattgtaatggtatatatatatatacatattattattagaacactacaatgaatgattggtatatatgtgtaccaatctcaattgggttgtgctacatttattaattgatgacgacgtataattatagtttgatagttttgactataggaaaaataaaaataatttagtttgtaatttgttggtcgtcttcgacatctttatgttctttacttttttagtct

SEQ ID NO: 183756 - DNA, 551 bp, Cannabis indica
acatatagaaagagtttaggcacatggcttacataactcgcttaacaccaatttgatgtgtttttttttaaaaaaaaaatattaattataataatataattatatatttaatcattctagttaaaaaaaaattatattcaatttttcttgaaaataaattaaaaatattttaagaaaagtatttatttttttttttgtcaaagaataattcattacaaatataataacgtcatagaggctagttatgaatactatacatcttatgtttaaattaatattatttttgttaggataatcaaaaataatactatacacccaataaaaaaataaaggatattcatatctagctaaaacaagttatttattcattcgaagagcatgtacaactaatctatgagcaaacacagattagggaaaatcatttgagcgagaaattctaaatagtaaaaagcaaatcatagttgtgaaaatctttgtaatagactgcaaatctattgtcatcattagtagcatgtaatttgttatagaaaacttgctatcatttctctaaa

SEQ ID NO: 183757 - DNA, 621 bp, Cannabis indica
atctgaaaattatattcttggtttacctgtatatagatgctcggtacatatgtttttctaaccatcaaacgttaaaaataaactgtttacaaaaaaaaaaacgttaaaaaaacaaataaaaataaataaatatattagagaaaccgtgttaatcgcacactatcattgatattattccacggtgattttgtaaatcttatagagtaagaccttcagatatatatctcaaccatgtagatcacatcatgacggtgtgaggctgggagatgcaggtatttcttacatttctttctcttagtctgtgactcaaatttcaacctatctctcttaaatgaacaatccaaaacaattctactacaatgattgagattcttctaacaactttcgacatgggcgagacgatattgtggttccttctgggaacgaagtctcaaattcttaagctcgctctcaaattggcctattttgtgttacaataactcatcgataacaactgacccatatacccattcttgtatattctgattttggagacttcgctttctgggagaaaattcaaaaagttttgttcaaagtatacattacatacctattcaggctggtaaatatttgtgtgaggga

SEQ ID NO: 183758 - DNA, 500 bp, Cannabis indica
ctggagatggaaagaaccaaagctcgaaactgaggagacagcctgctgtaatcaactatttcaggaaaaggatgacctgtagaagctttagtgacatgagattgaacattgttagtagacaaaaaaaaatgataatcttgtaaatatgtaggcctttgagtgtgtcttataagtctagtattaacaactggtgctaaaatatcaacaacatcaggattattaggaatatgaagtggtgtttcaggagcatcaaaatttggaacttgtactggtgtattgaattctggtgtatcaggttctggtgcattgggaatggcatggtagttgggactagattcaggtgctggtggaacatagggatagaaattcaaagcatcagtatgtttttgtgaagcatcaacagcaaaaaaattggaaaaatcagaaggcaaattaccttggtttagaaaagggaaaatatgctcatgaaatatgacatctctagagaaaaaaaatttgtt

SEQ ID NO: 183759 - DNA, 583 bp, Cannabis indica
tattaatatcattgtctttttttttcctaaatcctaaactcaaatcattctcctaaaaaacaaaagtactctaaaaagtaattagaaatatatgattcttaaattgcttattcttttttacatttaaaaatagttttttttttttttttttttttttgcatttttacggaattttacataaaaactcctactgcaactagcgctgtaacctaaattgcaacaaaaaatcgtatagaaatctctattgcaactagcgctgcaaccattttagaaactaaaccataaaatttaaaaaaaaaattaaaattaaaaaaatagtactaaatagtaaatattttttatataaatatattttactttattgtaaaaaaaatattttttgttatttttaaataaataattaaattaaacataaaattaaatttttctaattatttttattatattaaattaataatttaatattttaaattaatatttgtaattaaatttattcaaatactcaactgtgaatgaaaaatggtgaataattcgtgaacattactgaaattttcttattaaaacaattagtcaagaaaaaagg

SEQ ID NO: 183760 - DNA, 955 bp, Cannabis indica
ataaattcgaaaatatttcaataaaacccacaatggtaaaaatgggttgtatttgagatctttagctcaaatgattagagactattatgtaattcataactaaatcggtaaaaatggtaaagtagtaaggtttcgtggttgttctgtatatttagttaaaataaataggatgaattcaagaaggtctctaaataaacaaacatacaagagtagtagagaaagaggctcatgattgacgcttttaaaagaaagtaaagggcacgctccaatgaaaatggatataaaactataggagaagtctacgtatacacccttaaaacatctcaaatagtggtaattttcaaggggtcataaacatctaaatcaacttgaaaaaataatatatttttttctacatcattttttacacttttggtattaaaatgacaaaataataataaaaaaatataaaaaaattgtcaattgttagacattttttaggggttttttttggatattatacttaaaaatgaatttatttacaaaaatatttttaagaaaattatttgcacaaatactgttgtgtcacgtcagcatacatactgaatttcaaaaaaaaaaataacgaaaatggaaaaaattagaaatttttgttttaagaaattttcgctttttgggagttttgaaaaaagtaacattctagttacttttgatgtgaataagatatcaattgattatttttccattaaaaaatttattttagaattttatacatatataaataataaaataaccattttaatatgtgagaaacatatgtttttctgtctccaaaaaaaagacaactaatattaaaagaaactttttagtttcttttttatatttttcaaacttgtattatgttattttattgtttaagattacatttgatgtttattttttttttaattgttaactctatatgtatgttttagta

SEQ ID NO: 183761 - DNA, 527 bp, Cannabis indica
gaatttttcagttttacgacccatagcttctcccaatgaatggtatcaacgatgaagagaagaatgcgtctttaagtatgcgtccaatcgattggttgtttggctatcatcgatgaataacaaccaccaaatgttctttattccctagaatatcgggtaaatactatttaattttttagttgctaattgtttatttctatattataacttgaaattatttttatactatgttacatacatcctaacataattttctagtgcgcattggttgctagaggttgttgcgccagggaaaattatccatttagaccctatacgtggcctataacgtcggttatatgtacatatagcgtcggttatttgtatataactgacgtcatagtgtacatatggcatcagttatttgatagtaactgacatcatagggtaacatttagcgtcatttatttctaatcctacaacatcacttagatcagtgtcggtagcgaatttttccaaaactgatgctgaaaggccttaaaaacctc

SEQ ID NO: 183762 - DNA, 909 bp, Cannabis indica
ggtaaatttttattggtacacttaatattaataattaaaaaaataaattaaaatatttaaaaatttagaaaaaaaaattaaaaaaaaaaataaaaaaaaaaaacaaaaataatttatttttctcattctttcttcttcctaaactcatctctttctttcatctctaattttagatccatacctgcaggtagtttccacgacactagagcaacaaggatttatctttccatttgcttcttaattttttcaaaaattctccctaaactataaaaattgttgtaaataacccatgtatacgtagttgaattctagtcatttatttaaataatttgtttatataccactaacataacgttaatatatttcagtttaagagttcagataaaatataactacatatataacgatctaatgataaattataagagtatgcacgtgcatttttaaagctattgtttgtatgtttaatgtaaataaactgaattttaggtagtttaaaattattaaataagttcatgtattgcaattatactagtaactttacataagcaaattatttttaaaaaataagaaacttaataggaatatttacaacaatttgcataatttagaaataacttttgtcgataaagaatagttcaggaaacaaaatcctacatagttcttggggtaaacaatcatatttatactatagttaatcatataatatcatttggaaaatttttacaatgtaccatttaaaaagaaatgcgctgatgcacccttatctgttttagtatctgaaataatttttagttaaaacttttcttatggttatgtacgttatatttatttaagacatcttgcaaaattgtgagaaattcaaaaaaatttaatatgccaaaaataaatttaaacattatactgtac

SEQ ID NO: 183763 - DNA, 587 bp, Cannabis indica
cgcacatgaactgcaggagatggatttgagtaatgttagaatttagttgtgagtctttgtttctagttattatttattaatgtgatttctatgagttatttattttttattttctgctgtataattgaaaaagaaagaagaaagggtgataaactgataatggtagaagaagaagacgatatatagtaatttaggttttattttattttattgaatgattagtaatctaggttttaagagaaccttaattttgatctttattttttaaaaaaaatatttaaatatatatatgtttaaaattttatagtatatttttcattttttttatattaattttaaatatttaaataattttgttattaaaaaataaaaattaatacatttggaccaatgagaagatgacaagtggatacttacctgtctttaacggtcaggtacctacggaagttccagaactctaacagaaggtatttttaccgctaaaaatatgacttaagtatttatctgctactccgagtaaaacttaagtatttttgccgcaaataacttatataatgatctgtagagtgccttgatttgtagcatta

SEQ ID NO: 183764 - DNA, 1277 bp, Cannabis indica
cttttgacacaaattaaaattctcttcttataataaattttcaaataattaattatttttaaatgatatttaattattttgttacaattatatgaactaagtatgaggcctcaagctaatcaatcgataacaagtgcagccattttttttctaaaaaatccttcaacttatttcattttttactttttaaatatttaaataaaaaaattaaataattaagtgtaataatttaaaattaagattacaagtataataaaatttaaattatgaaattatatgtgtataattttaaattataaaaagttttgctataaaattttaaataatttaagtataaaaaaataaattgctaaaagatccttatatagtaataaattgcaaaaaattaattaataattataattaatttaattttaaaatataattaatcttaattaaagttttataaggaaataaatgattaggttactttcaggttacaagttatttattatttatttttatttaatttccaaattaatcacaaccatttaatagtaatccaatggcttaaaaaaatgtaaccatgatggttacaataaaaatgtaaccattgaaacctcttccattctcttattacttaatattttatttttatattaatatttttttacaattttgggcctttgaacatttggaagctcaaagcgcacactttgctacgcctcatctcaggattggtagtcctgtagtcttatgacttgatacaatttattcatttatttgtataaatagttatttttttttttttattatatatatataattaaaaagatctaggaacagaggacaaaaactcaaattaagggggaccaaaatgcaacagaaaagattaaacaaagtcaaaacataattttttaaaagaaattaaaagaaaataataaaaaaataatataaattttaaaaatattaaaagatgagggggggggtcatggccacccctccctacaacatagattcgttcaattggtgcacattctatcctcactttttcggtttaataacaattttggggacactttttcgatttaataaggcacacaaacacttactactcccaaatgagcgctaataaagctacaataaaaaaatagaaatgttaaattttaaacatgctatattctttgtttttttaatctattatttttcttaaaaaattaagattttctaaaactcggagtgtgtatagggagtgatgtatctcaaacataatataaggaagtttcaataaaaaaatt

SEQ ID NO: 183765 - DNA, 727 bp, Cannabis indica
tttttttttatactatttagattttaatttttaggttttaaattttttaaaaatgatatttacaatctaaagttatccattctacacaaatttttggaggtgtggtagactaaaattttaaacgtttacaataaaattacaatttttattattagttttttttttagatttctttataaattttcaattataaattttttatttatgtatatataataaagaaaatagacgatttttttttttttaaaaaaaaaaaattaggccataaaaaaatagagaccttgtgcaatggcccaaactgcccaatacttaggtcggccctgattctacaccatcctaccaaaaaatagactaatttttttaaaatgccaaacgtcctttaagagtgtcagcattactaactattattattagttagtgttagttaaaaagtagttaattacataagagcatctccaaggagtacactaaatttggtgtcacactatcaccaaatttagtgtcaaaaattatttctattctaaccataatactaaaaattacactaaaaaaatattccatattattatattaatttaataaaatcactacaattgttaaaagataataatattgtaaaatcggtaaaactcaataatgcctcacaaaattataatccatattatgattatttcggcagatcagaaaataatcttttatattattgattttttttgtctctcgattg

SEQ ID NO: 183766 - DNA, 662 bp, Cannabis indica
ggatattcgttgtcttttgtcctctttccctcaagttttagttactcatgtgaaacgaactgctaatcaagcagcacatggcttagctaaatatgctttggggttggatgaagactttgtttggataggagaaattccctatcctgttttctctgatgttgtaactgattccaatttataatatcagtgaaatttctactaaaaaaaaaaaaaaaaaaaaaaaaataacaaaaaaaatatgtcacattttaatacattatttatatgccatatttttataaacaatattaatttatccataatattgtgaatagccatctgagtgtgaatatatttatacatattatatatgtagagtaattaactgtaaattatgctacgcgttatacgtacaaagtcccatatgttttttatgtttattttttatttgttgctgaataagaacccatacaattcaaattagattatacacgagtacttgtgaatgtgatgacttgaccactaattagatacgataaattccttttgagatctttatagatattattgctctcacagttacatataaaaattaatatgttcttaagtagaaatcttttattttcggtatatgtctcgattttatattgtacgttataataattataatctatattttactt

SEQ ID NO: 183767 - DNA, 802 bp, Cannabis indica
acgagaagttcccttagtgcttagagatagggggaaataagcttttggacaaaggtgtaataccttgttcaagtcatggtgatccccactaatctacactcaaggttgtgagtgagtgtttatacatatatattattctcttattatatacacatattttatattgcatgtgttcttatcttcttctatatttcttatatataatatatatagtgtatatatattgtatattatgttgttgtaacatttatttaatctctttgttggtccttgtattgtattacaatagagttgtaatattttgattttcttccattgtaataaaatctctaacaatcaaataggtaaatatattttaatataataaatttattatagagtctttaaatcaaagttcatagcattagcaacttctttgtaacttttttataatatgatcatttttaactgtttatcaaatatttttataatgtgcttttttagaatgattatttcaaaaatacttaaaaataattaaaaatttacatcacttttacaagtctagaggtagacactactagtgtttgatgcttgtatataaaagtgtatggaccatggtactatatatctcaaatatgacaatttaattaaaagggtaatgttatagtaatttctcaattaaatttctttgaacttacagggtacctaggctatggtatccttaaccatcaaatatcattctatttaaggcataaatagaaaatcctccaagattttggcattgttatgggcccattatgaacactgccccttcacaacacag

SEQ ID NO: 183768 - DNA, 1035 bp, Cannabis indica
gaagttgtatagcataaataaaattattcttaaaaatgtaaaagagttgtaagtttctcttttaatagactcggtttgattaaaataaattatctttcttggtataaaaaattaataaagcaaattaacttaaaagataattgtagtagaactatgtatgtaaataaattagtggcaaaagtacttaaacaatcaattttgtatagttaactactattattagtataaaaaaattaatcgcaaaatttgtaaataaaattatttttttaaaaaataaataactatataaaaaaaatgtaaattaacttaaaaaaataataaatcaaattaaaaattaatttttttaattattaatattattattttatttttaaataaatataattaaatattattataatatgtataaaattttaattgtatataattcgtcttatcgtaaaatcatacaccttacattataataactacataaccggtaaaaaacttttgttagatcctactataatattgtgggaatatcaacagtaggacaccctatattaattatacatgcagtactgatctgtcgaattaatacatgaaaaaagatggcagatacatgccactgtgccacatgcaatgcattttgaaatttatttcacttttgtctttcaaaattatgagaagaaaaaaatgtgtaaatattccacagcagaaactgctataaatgcattaattaacgagcttttggggtaattaataaaggggatgtttttgtttttctaatacaaatttgatcattatcgatcaaatgaattttgtttttccctttcttttttaattcgaacatgatctccgactccgagagtgagaattatgagattatatctcaaaatcaattggtgatgagtagagtagcccatgttcttatatatgcctcaatatttttatatttaatccatgtgggacaatgttcttcattacctttaattataacgatcggtgtgggaattttagattgtttaattaatttgtttagtccatcgaattagc

SEQ ID NO: 183769 - DNA, 546 bp, Cannabis indica
ttaaaaattaataattataattactaattatattttttagctaatttattactaaatagatttttttaacaatttaatttattttatacttaacctattgaaatatttgcagcaaaaattcctataatttaaaattattgcaaatataaccttaatttaaaaagtaatttttagttttgaacaactttaatatttatgccacaagtaaaattaaagatgcgaccaaaaaggaagattttgttgttcttttttaatttttattttttactagctatattaattttaataaatgatcctcaattttatattttttttattttttattcaattttaactatatgtattaaaaatatataattttaaattaaaaaaataacgtattttcccacatagcggggttgaccgggttaggtctggacgagttgacagagcataggtcaaatccggtaaaaatattcactcctacatgacatggttttgttttttttgtaagatcttacatgacacggtgaatatctttgatctttgtgtaaagagagggaaatt

SEQ ID NO: 183770 - DNA, 635 bp, Cannabis indica
tgctcttctcttatttttggtaaatttgtcaatcttattgatctaaactcttagatggcgtttgtaattgaatgaaaaagaaaataaataacttttattctatttatttatttaattacattttaaaatattggaatatcattttagtaaaacaacttttcattttgaaatgaaatgatagagtattaaaaaaatttaataattctttaattaatttttttatatattttttgaatttgattacattcttattcctattttttatgtttctatttctttctattctgattttgaaaaataaataaatatttttggggggtttcttttgttagatattgagtattctacaatttcttgtgtttggttgttacattcaagttatattggtaactacaggcttcaagcctttaaaggtgcatggaacaatacatttacaatttgcatttagacaaagtgaattcgtaaataatgcaacaaagctaattagaatcgtgtaaaatagatccagcaacaaatattgacacatccttgataggagagaaaaacatatgaactaaaataaaaaattgtacttttttacatttgtgcttgtgtatagtactttcgtgtaactgcaaatatatttgtagtgtatg

SEQ ID NO: 183771 - DNA, 712 bp, Cannabis indica
gagattagttaaatggaagaagttatattttatatttgatttggtacaaaatgatgagattatatttttattttaggactttatagactaatctataaatattattaaatgactagtttctacataattctactacttaacacaagtgaaagataattctaaaaaattgaagagtactcaaacaaacaaaaaaaactctagatactttagtaaatataataataatttagaaaacttaagtaacaacaaaaaaattactaaaaaattaactatattaaattgataactctaagatttagagttattttgatatctttaaacttgcattttaaactaataatagagtaattggtgtctatattgtgtaattgtgtttagtttgttgtgtgtttgtagtaaatggaagtttgtgtgtgtgtgtgtgttattaagtgttagatagacttatattgctatttttgtgtgtattaagcagaaaaaaaaaaaaaaaagctgaaatgagtgttgggaagtgtttgggacaacaagagaaagagcatgaaaagacttgttgctgactgtcattgctataacaattatcgtgtagcaattggccagcccagtaagtgaattgtggcaaaaattccaggtggcgttaatgaagaataaaggatgcttatgtggttaaaatgtgtacaatgactcagccaatgtgtggaaaaagaagggcaag

SEQ ID NO: 183772 - DNA, 598 bp, Cannabis indica
tcttatttcttacaccactaatactttctctgaggttagttaatttcatttcaacctatcaaacaaatatttaatttgattttttatgtatatatagttttttaaaattgaattgtaacggtttgttacttttaagaatttgttgttttgaccttgatttggtgcaattttgtattcttaatttatttattgtaataatatgtgatttttgttaattatttgaattgaaatttaaattatgttatacaattgaaattatatttatttcatactttggtggaaaatacaggattatgtttcaactatttttgacaatttcaatgtaaatgtggatgcgaatgaaaatactattaacttgggattgtggggatacaactggtaagtattgaatgactaaaatttagttatattttttttaattatttttgtgactgaattttttctattttatggtaaataggacaagagggttataacaggttaagaccattgagtttatcatggggactgatgtgtttatactagcattctctctcattagcaaagctagttatgaaaatgtttccaagaaggttaggccttattttttttaagtggg

SEQ ID NO: 183773 - DNA, 786 bp, Cannabis indica
aaaaaaaaaaaaaaaaataacaacaccaaaatataacagtgactattcatttagattaatgaatactcgaaaaggaaataaaattaaaaaaaaaaactgttaaataaacaacaactatgacaaagaaaaaagtaaagaacacacataaatatagtagttcagtaagagttcgatctatctagtttacttttaaaaaagtttgtgattgggtccattcaggcccgtctcaaactaattgggggccttgagccaaaaaaatttaattgagcattttttatataaaatgttttatattttttttcttgtatacatagtggtaaaaaactaaaatatagtattttaaaaatataaataggcattttatctcaataaaatattaaatgtaatatcttaaaaaataaattaagtatttttttattaaatagttattttttaataaataatagttaaaatacaaaatactgtattttaaaaaaataatttaaagcttttttgtaaaaattttttgggcttgggtagggagccttaggcgtgggcccctactaccccacctttgagtcggccttgagtccattagttggtgaatattcccttgatatagaatgcaaacgtcctttgatcatatacatatataattgtttagatattactagaagaattggctttatttttggttttaagccaatttatcttcagttaaataaaatttcgctccgaatataattgagacgaagccgtaggtcgtgaaaaaattgaagacatacaaaggatctatcttaaataact

SEQ ID NO: 183774 - DNA, 716 bp, Cannabis indica
gttttaatacattattaaataatatttcaaatataaatatttaattttttcaaacaaaaaatttgtaatctttaaaaataaaatacattcaaaatcttaaaaagactaaaatcttaaatgaaactagcaatacgtggctcggcacgtacattcacctagtatatatatatatatatataaaggcccctctattcctatcctttttgactaaagtagcaaattttttaataagaataaaatttggaatgttctagaccaagtatttttaaaataacaactatggttgaacacttccatcttaggtttttggctttttggaaaggaaaaaaaatatattaattgtatataatttaattattataattaagtagattagaaaaagtaaaccggcctcacttgccaaagtaaacatcaacgataattaatgtaccataatgaattaatttttttttttttagagttaattttgcggcaaaattttttaattatcaatttatttgtaaaaaaatcatccaatctcatattttgatagtaaaaccctccaaaatactgttccgtttatattttttaagatgtcgtctgtccagcctcgttaagtcttaattttgcccacgtgacaatgaaaagtcactaaaaaattatcttacatggcaatattttacaaaataaaaataaaaaaatttaagagtaatttgcggcaaaactcccccaactat

SEQ ID NO: 183775 - DNA, 579 bp, Cannabis indica
aaggagagtgtatatacaatgtaatttttcttttaatataaggagttttgtaccataattcaagctgcctaatgtttaggtcagtcttaatttgaacccaagcccacccaaacctgaaacacctaaactcaaaccctaaaatgggcaagctgcctaatgtttaagtattatgtttttatgtttgtgcagtaattttgtgggcagatttaattactcttaaaataatagtatagaagttgttggcagtcttatttggcccttgacacgcataaattgatatttgattgctgtgaacattttttggtacaatttatatatgcattttttagtgtaatactagttataattttatcatttaaataatagaatgtaaatgttttcaattaaaaaaaaaaaaaccaaacttactatacgattttgacaaaaaaaaaagtttagattggataaaaaaacgtagtattgttttgttttgtttataaactaattatagatgaagatattttatatttaacttttttttttttggtataaaagctattaaacctaaaactaatagagtactgctgagtggtggtaccc

SEQ ID NO: 183776 - DNA, 569 bp, Cannabis indica
tatatataaaaaaaattatgattataaactagattatagcgttctcattattatagtaaaatcttaaaaactcactgcactttaaaatttatattcttaccaaatactgaactcaattttttttttttacaattttgctataggtattttttttacagcataactacagttgtttttcccacagcacaattgtgtcactggcccttataaaatgcatcacatttcctaaggtaggagcattttttatctttatataatatctagtaaaattatatcctaatttttgtgtatgatggtatattatagttatagtaatcattttagttatttttgagaattttaaaataatttatttcacaaaaatagaaaagagttcaaatatatatcatattttcgcaggatattatatgaataaaattataatatagtacaacgtcatatacaaaaattagtctataatttattcatataccgcaaaaaataagaaaatagtctcaaaaaagtgaatcgcctagctacgtaataatttatttattatatgtatatattgattttgttatccttttaga

SEQ ID NO: 183777 - DNA, 771 bp, Cannabis indica
gtcaactctccctttttatcggttgtaagtttgaacatgtagtagacaatgtaactacgcggcccataacgtcgctaagtgggcattttcccatcagaggtttggtagcttgcctcctcctctgtgcccgatactcttttctgtaatgactgtcaggtctaattgattttatgctaatatatatgcacacttttcttaaaaaaaaaaaaaaaagaactaaaatatattatttttttatgaacaaaaaataaaatacaataaaaaaaaataataataataaattaattaattaatctaaaccaaatcaaaatagaatagtttacttgatctttctatccctcttctgcccccactcattcatcttcttcatttttttttttttgggttgtaactagagttgtaaataggtaggcatgttatactggtctgactcatatttttcaagctttttaaaataaaagtcatgtagtgccgagccaaaaaaaacataaatcatgatcatgttgtgccataaaaaatataaatatcgtgctatgtcgtgtcgataattttatagggtagggtcggcacgataggggcgggtccacatagaagtgagacagggcagttgcttcccaaagaaaaaaaaggaaaaaaatatatatgtattttagttagttacgatataatttgcaataaaaataatattataaatataaattatctttggtgtaatgtaattaaactaaattgcatataagaatagagtattaagtgacaaattccaccgag

SEQ ID NO: 183778 - DNA, 607 bp, Cannabis indica
atatgaagaatggttttgggttaaaatttgttgaaatggccccctaattgaaaatattcttcttttcaggggaaattttaacaagtttttccttactcttacactcgttagttatctgttaaaatctcaacctacacatctccaaagatcatgaaatttcacgggggcctagccaagaccgttgtgcatcacttttctcttggacacgttgagagaaaaattagttttcttgcactaacgatcgttttaatcgaaatagtgaaaatctcacatttctgatagtggtacccctttgtgaaatgtggcccggaccaatctcggaatatttttttgccactagtcacaatcaatttgtactactaagaaaatgtaatagtgaagaaagtggtttagggtaaaaattatttgttagtaaaaggtggccccctaattgaaaatattcttcttttcaggggaaattttaacaagttttttccttactcttacactcgttagttatctgttaaaatctcaacctacacatctccaaagatcatgaaatttcacgggggcctagccaagaccgttgtgcatcacttttctcttggacacgttgagagaaaaaatt

SEQ ID NO: 183779 - DNA, 582 bp, Cannabis indica
gagaatatgtataatgatttataagtagttacataaaatgtaaccataagcacatggacctaagaagaaataacaataaactaataaaacaatcgttaattagcatgtaagtaataagtagtatgggattaatttaatcttaaaactaattgataattattttctcttaataagtattacatgatatggggtcatgcaccaaaactaacttcccctaaaaatagtgcattttagaaattcattatagtaatgctaaaatggaatagtgttacctattatatgtgtcaatattattattagtctagttaagtatcgagtctcacatagtttaatataataacttttaaacagtgtcgctaactaatcaatcttaaaataacatatctagagatgctaagacactattagtatccaatagcaatcgttatgtatatactactcatcttgattatcttgatttactaattaattgattacaattgtctaggtgacaaattaaattaggtgagaattgatcactacttcccacctgtccaactctttattcttttggttggttactacaatgatggttgacaatct

SEQ ID NO: 183780 - DNA, 890 bp, Cannabis indica
cacttttagtcacaagtttgttgtgactaaaagtaagatttttggtagtgaatatatataaaaactatattcaacatacattacattgataattactttcaaacgcaccctaaatagaaaaaaaaataaggtggagtaagtcattcctcttgaacttgatttattacctggtacaataccaaaagaattaatagtgactatacttttattaagattaattttgacagtaagaaagatgtcgcttttgcttagtgaaaacaaccatagctatttaatggggtaatcttcattctagaagaatggccttcattagggatgtcaaaaatcatcggacaccgttcatctacactcgtccgctttgggcctaaaccctcatggttttgttcttgggtaccttcccaaaaggcctcataccaatggagatatgtctatccttatatacccatgatcattcccatttctagccaatgtgagactttgtttgtattcccaactattctcccttcaaatacaagactacatagtcttctctcaaacgatcttccatcttgtaccgccgttatcaccaaacggaacacactatctaaccttcattgtcaggagactttcgacacaaggcaccagatagatctccaatcttttcactctctacaactagtgtacttcctccaatgcgttggagcggatgccttacatggagctccagcactacctcgagagtttcttgctaattactagctaggccaactctgacaagtcagagcacagtgcctaattgaacacatccatgaacatcatgagagtacatcgaagccttatgagtaataatagagtgggtgggttgaatttgggtatattgtgaggccaatattgcagctcacactttagcc

SEQ ID NO: 183781 - DNA, 673 bp, Cannabis indica
ttacttttgtgtttttgagttcctttctactgtcaaacaaagttgggtgtgttgtgcataatcatgctttacagtctattcttaagattcatgttggttatgtgcattttaatatatttaagacaagactatgttatagtggagacatcacttttgtctctattggttggaacgtttttattttcggtatgtcaagaaattatcatcaattttttttaatatgacgatgtattctgctagttttcgaaaaattctgaaagatttacagtgttgaaaacaagattcaaacaattagttgtacgcctgcttagtttttttttaaaaaaaatttacgcatgcaatgcaactgactattttgagctttatttttaacattgtaaactataatatttttttttttttctgaaaactggtaagatgtgtcgtataactataatgtaaattgacatataaaaaaagtttagattataatttctctatataccgaaaccatgaatgcccctaccataggacaaaagtgatgtctttactacacaatttttctatatatatatttatattacattattcatcctaatgaaaagatttagattctagtttcctttaatttttattcaaaactttttttttaatactagattgctcatcagccgagcatatatgtactggacac

SEQ ID NO: 183782 - DNA, 1177 bp, Cannabis indica
ttttggtttcttcacggctatttgttgagtacttgtgttagtaatactattagtttcatttagtataattactcctttgtaaacagaagcaaagccaccttggccgatgaaattagattggttgtagttgtttgttgctttggctaattctgctttggtgaagattcttactctctggtgctttaacactaaaccaccattttgtttgaatatcttctctctctttcttcttttacagtcgtagaaaaggagtaaaactattatcatcaaaaaaatgcttgctccaataactgtacatgccaaaaacatatatatatcaacattactagtatattatgatatgaaaatgtcctatgaaaaatgacgaagaaattgtataatgaatattttgtttggtcaaatactcattttgataaataattgtatatgaagtatgaatacctgttgctaatgtgtcaaaacgaaatcctttacaatttccattcttcccatctccatgcatcccaagtgaacacttgcatgtgtaatttccagctatgtttttgcatcctttgcaattttttatgatcttaggatctaaacactcatcaatgtctataccaccaaccaaagatattaacaccacaaaaaacagaattagtaaaaagtgtgaaacatgatataattgacataataatataagttcagggtcgagtttggattaaggcagattaagccaatataatacattttttctttagtaattttggaaaatacataccttgacatccttgtttgagataaggatttccctcatatccttgcttgcaacgacattgatatccaccaccattctcggaatagtaacaatcactattttctccacacacataggacgatgaattcgattgagcttccttacatgttaggttatttcccacaacccaatccagcagaactataggattcttgacttgttcgggcttaaaatcgagacgcatttttgatatgtcaaaactattctgatcaaccaagaacgcatacccacaagggttaaacgagtaaacattggtgtggttattgaggctacctattccgactgataaatacttgagatgcttgggaacagaggtctggcaacaccctaaaccggaacacgaggtttgggccgacatgtttacattttcgttgcaggtgg

SEQ ID NO: 183783 - DNA, 539 bp, Cannabis indica
actaccgggccaccagcgaactggcggaaagcgtgcgcgaggcgttcgccggccacgtgctggaggtgggcgacaacaccctcaacgccaccgtcagcatcggcggcgtgcagatcggcgagaagatcgccagcaccagccaggtgctggccaaggccagccagggcgtggtctccgcggtcggcgtgggcggcaaccgggtgcagctgttcgaccccggcgcgatcgatcgcgcggagcaggaacgcatcgccgcctgggtcgcgcgcatccagggcgcattggacagcgagggcttccgcctggacttccagccggtcatcgcgttgcagggggacggcagcgaaacctacgagatgttcctgcgcctgcatggcagcgacggcatcccggtcgaggccagcgcctacctgccgatcgccgaggagcacgacctgttgcgccccatcgatcgctgggcggtgtcgcacgcgatcgccctgatcggcgagcgcctgcgcaatggcagcgcaccagcctgctgttgtcggtctcgcagg

SEQ ID NO: 183784 - DNA, 606 bp, Cannabis indica
tgaattcttcttgttatgaactttcctaatgtatagagtaataatagtatggagtaaggtatagagtaataacaatgtggagcaagtgttgaaatggttgttcactttgatggcgaacagatacttagagtatcataaatattctcgacctttgctctgagaagagaatgtgaatgtcgtaatggttttaatttgatactagatttgcgtaagttgtgaacttgtgataataattacatttaactcccattgtttggattattgtttctcccctttgcttttcatgagtttcatctgctaatttataagttcatattgattattgttaagcccaagggaatcaaaatcatatacatgtgctcacacgagaactttgttttctttgcagattgctgcgttgtctgtggcactgtttagagctttgaatcttacaaccaggtatgataattataaattaaaatttgactattcttctatagttactgctttcattgacgttattctttttttcttgttaatatttttgtcagtataaaatgttattttttcctgagttattctgttttatgtacatttttatgcttttagatgtggtgcatgcttctc

SEQ ID NO: 183785 - DNA, 509 bp, Cannabis indica
atgctttctattaatcaccaaagaattactgaaaatagctcttggagaggctttctctcctattctaacctttcaagaaggctagatctctcccaagagatttctcaattttaaactctttcaacataactaaaactgagttctgattctgtatgtatacatgatagagaataaagctttcttcatagcaacttaattaaaagctactagccaatacaaaaagaacaattcagcttacaacaattagaacaaagattaaaagtgaataaactgctgtcataaagctttcttcaatagataggcaaaacactactactacataacccattatgcgcctctctctctctctctattaactcatacacattattatcggccatacaaacgtccgtcttatcaatactaaacacgaaccaccaccactatagtcatacaaatacaaaagaaaaaaaaatcgcaaggtatcatgtagtttaccttaaaaacctatctattacgaaccctagttt

SEQ ID NO: 183786 - DNA, 733 bp, Cannabis indica
aacacataatgtacctgcacctgtccttaacaccaccactaataacaatgactcatcccaacatgtgtcagcttctccccatatacatagcccacgtgtccttgtgccaccaatacaatccactcaccccaatagtcagcctcagttttcccctgatcacttgccctccactcccaacaataactcacaaccagttcctacttctctcccaccacaaaatgtttccaacaacaatcctatgaactcaactatcccacctcctgtagctgtaacccgaacccatagcatgcgcacacgatccttaaatggcataaccaaacctaagtcatacattgccaccaaacaccctcttcatgagtcattgttacctagagaacctagaaaccttaaagaagcttcagctaatccccactggcatggtgctatggatagtgaaattcatgctctaaaaaaaggccaacacttgggtgcttgttcccccagattcttctatgaatatcattggttgcaagtggattcatcgagtcaaacttaacaaggatggttctttaaatggtacaagtcacggttggtggcaaagggatacttacaggaaagcaggggatagacttcgaggagacctttagtcctgttgtaaaagcccactacagtcaggactgtgtatcattggctgtgactacaattgggatgtgtcccaactgatgtgagtaatgcgtttttaaatggtcctctc

SEQ ID NO: 183787 - DNA, 527 bp, Cannabis indica
cgttgagcatcctgtgtctactagcatttatttcaatttgaatgtgggccacgtccaaagttattatcaatacatcatcgtggcgatgacttaactcaatagcttcattttcactaaacattatctggatgtctagtccctcattgtctattacagccattcgtctgacagactaaactcagctagcgtgggtcgttgatgaccgaatcgagactccacttaaatttgaaccaccaaaaatcacattcatagtctttttgatttagggtgggggagactagctccaaattttatcgtgccctttctatacgtgtagcgttgaatccgtttctaaacaatcttggaagaagccctctttaaccaacctattcagttcgactttcatttgtctacattcataggtttcatgtccatgctctctatgaaaagtagaatatcagatcttatcccttctttcggtatcaatggtcatttttggtgagaacatagatttgggaaacgacactttcacttgagaaacctactaa

SEQ ID NO: 183788 - DNA, 916 bp, Cannabis indica
cacacattaatggcattacctagttccatttagtacttaagtggctttcattagtttttttttttttcaaatggtagaagaaatggcagaagaaaatgtcacttctaattattatgactttatattataatttaatattaagtcaaatatatgttaatataatcactaatttaaaaaattataaaccattttttgtatatatattatattacttttaaataaagggtatatataatatagtttaaccattaataattacaatattaaatccatttagtatgagttcatagctacttttatgcttccttaggtagaaaatgaatcaaactagttctctctcgaccctattctaaatgctcagctttgcggtgcagaccaatcttccgtattctccctttattttataggataattacataagacactattttttgtaaaaaaaaaattatatttttatgtttaaagatttttttatatatattttaaaatttttcatagaaacaacacaaaaacaacaagaaaactacataaaagtaacatgaaaataacattaaaacaacaacaaaaaataacatacaaataacaaaaaactaacaacaaattaacaagaatacaaaataaaaaaaaaaaaaactagtaattaaataaaaatcaaaaaaaaattgtaaaaaatattaaaaatttacgtgaaaactgtaatttttatatttttttttaattatttatgtgtattgtgaaataatccttattctatcttataaaaaaaaaaaaagcaaatgtggaaaaagcgtgaaaggcgtaaaactactaaatgtcgtggtgaaaggcttttctctatctttcaggaactgaatgggaaatggttaggtaaatgactttagaatcgaatgcgcatgcgctcgtcgctcagcgagag

SEQ ID NO: 183789 - DNA, 612 bp, Cannabis indica
agactccttcaaattctaactgccaataaatattttcattctcaattcattaaggtaaatgatgcaaagcaagattagagagggagagaatatagagaaaagagtgagattgggactactttggtttttctatggagctacatatctagatgaatatgcttgttgggaactgagtgtttaagaggagggaaacactttgtgaggaatcaagtgagttgtataagttagagtgtattgtacttaattttttgctcaatcaataaagagattcggcaatattgcacaactagaataaatccataaattacatcgatttattagtcttcaatcaacatatttcttgatgttttttatgtttctgcattgttttattcttttcattaattttgattttgatttaagttcttgctatgtgttttatggttttagttgtttagttcttgatctctaattctagtttagtttttttttttttaaaatgtaaattaatttttccccactacccctttgtttgtttttttcaatattttgttgttttcattttagttgtttgcatacttttgagtttttgtttacaaattgaggaagttgatttataaaatatcttaagaa

SEQ ID NO: 183790 - DNA, 1197 bp, Cannabis indica
gcataaacttgcagcatacatcatacattctacttccttcttttcataatttctctccaaccgagagtctatgacctcatcgattttcatacttccaagtaatggggagccctgcagcttatagttttttcatgttaataaacaccaatagtattgatcttatagaaatttcttgttgttatacagttaacttgcccattctgcaacaaattgttgtcctgtttttcttgaaaattcagtgacgctgaatccacttaagagctccaacaaaaccaccccaaatgcatatacatcagctttctctgttatcaacccactctgtgtgtattcaggggctaagtacctacaaataataattcagtttataggcttgagatatgaaagaattgatagtttttgtaggaagtaaaagagtctagtaccccaatgtaccaataacacgagtctcctcggctgactgaccatctacttgccatcttgctagcccaaaatctcccacctagttatagaaaaaatattattacgatgaaggcttcaaaacatggggactcaagaaaaagtctgtcgaagaaattacatggaaagcaaaaaaaagtatattcagtgaaaatactaaccattggttcatagtcatgagtgagaagaatgttgttgggtctaaagtctctatgtacaatgcaaccaacccggcaatcttcgtgtaggtatctcaatcctcttgcagctcctattgcaactttcatcctacttttccaagacatcagctctttttcttgtgatcctgcaaattattaactactctctttgaatttccaagagataagttaaacttaggtggcatttggttggagataatgaaatcgaatggaatgaaaagaaaacaattttattttgtttggttgtatttaaaagtattagaatatctttccaatggaatacttttctatcgttttgttgaatggatattccattattatataattttttatattcattttcaaattttgatttccatttttattcatattttcattctcattcctattcctatattttcattcctacaaccaaacgccaccttagatatgtaaagaacttcgaaacggtttggcttgatcatcttactatataagtgcctgtctagtgaaccattgcaagcaaactcatacaccaaaagccattctatttcagtgcagt

SEQ ID NO: 183791 - DNA, 615 bp, Cannabis indica
gcaattgatttcttcactaaatggaccaaggctgaacctcttgtctccataacctgcaagaaagtcctcgactttgttgtcaaaaacattgtctgtaggtttcgaattccaataaagatagtgtgcgataacggaactcagttcgatggtgacttattcactgagttctatgagaggaacaaaataattaagagcttcacgtcagtatccaggcctcaggcgaatggacaagtggaagctgttaacaaaaccttgaaagatacaatcaagaagaagttagatgctgccaaagttagatgggtcgatgaactaccttaagcactttgggctcacagaactactgaaaagaccgcaacaggccatactccattctcactagcatttggctcgaaagaaatgatacctgtggaagtaaacatctcgtctcatagatgagagttttataatcacgaagataactaagaactctttaaactatctttggatctatctgatgaaaaacatactgagtcgcagattactaatgcagcgtatcaacaccgagtaacaagatttttcaacaaaagggtcaaaaagaggctattcaatgttggagacttagtgctaaggtgagta

SEQ ID NO: 183792 - DNA, 696 bp, Cannabis indica
ggccattttttttaagagaattattagtgagaaaacttaagaaaatgtcgaggtggactaaaagagcgagcacctacaaatatcaagatatttctacttcgccagccaccacaaaaagacaaattcatctagaattctcaccttaagattaggtactcgaacaatctgaagaactgtagttatcaacgcaataccctggttagatcaaaattaatatattagttagctttttcagtcatatacaaaacataattcaagataaaatataatatatatgatcaaattgattgaaatttttattcatgtgagaaaaatgtgctaaagtggcagtgtgggattgaaaggatgcatgacaagtgttccgcagtccaagataacagagacatttttcactgaagtattctgttgctgctactaaaacagcttgatatgagttgagtatatgacaactgcaaccaacttcttaaaaaggaccaatgatatgctcaaggacaaaatgaaaacaactaattacaagctttcattatctacatggtatagggtgtttgtctagaaataatttattcactcaaaaacttgttattcaccggaaaatgatatcattttctcagtagagctgaaatataaagccaaacaaagatagatgcagcagcctcattgcacttgattaaactggacattatataatcaaaaaac

SEQ ID NO: 183793 - DNA, 800 bp, Cannabis indica
gtactaggcagccctaaatacaagctattctcctctgcttctctcatctgtaagagagtgttgatttgttgtttcatagatgcttgggtattgtactgtaaaaaatggaggacttgttgagattgaccttttgacccgatgcaacttcaaatttgtgaaacagctctcgaattctcatagcttcttcactagttgctttacaatacataagagcatatgcgagattcttggtgctctattagctaccttgcaaccatgtatccaccctctcaactcatacttttgaagcaaagctgaaagaccttctgcacaaagaataaagatatacggagataatggatccccctggcgaatccctcggcttggtattataggccccatttcccgtcccccatgaactaccttgtaactagcagacgagacacactgttgtattaaattcctccaattggttccgaacccaagctttgaaagtactgccttcaagaagttccactcgatgcggtcatatgctttactcatatcaagcttgagagccatgaaaccatccctacctttccgcttccgcttcaagtaatgcaagacttcaaaggaaaccataatgttatccgagatgagacgacccgaaataaaagcactttgagtctctgctactatgttgttcatcaacggtttcattcgattagccattaccttcgtgtgattatcttgtaaagctcattacagaggcaattggccgaaggtgtaaagactcggtttgaccgagtcaaatatttttatatatatataaaataataatt

SEQ ID NO: 183794 - DNA, 502 bp, Cannabis indica
atagttgagtgtcatgcactttagtaaaactaatcctataggttgaagcaattatatatatagactataaagattacaattatttctaattaatttatactaaaaaaaaatgctaattaatttctcggaacttgtgctcttgttgaaatcttttgtacacatgcatatggtcttttttttttgaaagctgcatatggcatttttaattattgttaaaataaacgaaaattttcaatctttcaataattgtgtaggtagtataaccatttgcaaaaaatgaaactcacagaaatccaacttcattctctgactagttttttttcatcttttttggaatatttgttggtagctagggtgcaaattaattaacatctagcttactaaaactgttttaagtataaggtgtaaaattaccactaattagagattattcttacattttttattcggggttgtgtaataattattttaaattatagagttttgttacaactatttcaat

SEQ ID NO: 183795 - DNA, 602 bp, Cannabis indica
acttgacaatatatattaatgagtgagactcagagtactttcagtaccacaattaatacaatgcccagtactgtctaatatagtaaataaaaatcttacacgtttatataactgttatctcaactaatctaaggtatataaaaggatcatctcatgaagtataatatattataatctctaaagtaaaatgattaaattttttttttctttttcttttaagtaaactaaaccatcggactgagagaaatacaaaagatataatctctactctagctagaaattaatcaacaattagccacaaattaaaattagagttgtactttgggtacgtaaaataggccttggctctaatatgtcatatatatttatatgtaacataggatatattcttcttcttatttgttgctagcttgttaattaggttaaaaaaccattcaaatatacaatagaaagagaagttcaaagacaaatttaaaaacaataatgaaagttttcccctattaattacttgggagttaatagtttcaaatgaaacttaagacatatatatatatttataaaggctgattacgtacgatgatggccaaggcggcctgtgggaa

SEQ ID NO: 183796 - DNA, 1215 bp, Cannabis indica
attgaaaagtaaaaccacccaatttgataattccaaaagccaaaaaacgttttcataaatgttccattcactacattaatatgcggttcatagtaaattaattatcaaaatcaaataaatttaagacgttctcataaggatatatatattttttaaaatgttaaatattaaataataataataataattgggtaaggtgaggtgaacaatgactaatatattaacgaagagcattgttattaggcactactagtacctagtactttctagacatgtcgtattgtgattgactagcaatattccctaaaaattattatatcaaactatattagacccgatacttagttaaaccaataacaatattgacatataggcagtcggcccaaatattgagcagctttggccatttcaaaatgccttattttttgaagacctaattttttttaaaaaaggaaacatatttttttcttttttattattatatatacataaataaaaaattaataattaaaaatttatgaatgaaatccttaaaaaaaaaaaagttagtaataaaattgtagtattaatgtacacgttttttttttttttttggaagagtccaattctaaaaattttgcacaaaacttccaaaaatatttggaccgatcatgtcctgtacataggatgatactaaacgacactggtataatttagtatttcttattaagagcattgctattaggcatcagcggtgtctagtaccttctcaacatgtcgtattgcgattggctagcgatacttcttaaaaattattatattaaattatatgagacttgatacttagttggactaatagcaatattaacacataggaggatgctaagcacgaacatttctcttctcattaatgatggtagaaggaagatgtgcttaggtgagagtgtcaatgagagagagagagagagaattattattaaatataaaagctggaaattagagagagagtggtcatgggtgactccttctccttctgttgtgttctgtggtgcaaggcagggaatgggtcccacatagagtactagagtagtagtagtagtatttactatttagtgaggaatgggtcccacttttgttggcgggtaattttggcgggtaaccaaacaaacaccttcattcacggaattagaggtacgaacggaccaaccacactacccaataccccatttacaatta

SEQ ID NO: 183797 - DNA, 1255 bp, Cannabis indica
aatgaaaggatcttttacatccaaataagctaattctttaaccaaatgacatgttaagcacaacacataggctgtaagccaaaattagaaagagatgacccaaacacaccatttagcctacttaacataactacatgttataaaagataaattagtcatatctcactcaccatttatttcgcttttcatcaactatcagaaactctattgcttgtatcgtgggatcatcaatctcaattttgagaacagaattggagccagactggacagaaaaatgaaccaacattaatcagaactctgaagagtttgtgttaaaaataagccatttttgaaacaaatcatatgctggttaactgtactttggaaaatggacttctaagagctttgttcttgtatactttggttccttctggctgccgagaaggaagtacccactttctgaaaatagtaaaaaaaaggccaaaactaaataaaaaaaaactgaaattccaaaggttaaaattgcctattaaaagccatctaaagctgaacttactcttttttatcttgaattgccccccagtgaagaagcaaagagtcactactatacgagacttgaatgtttacttgagcgggagacccttgagtggaggcactaacaaccacctgctcgtatagaagaaaaaataacacaaaaatagttgtgttagcatggtgtctggatcaaattcagaagaaactccatttaacaactcactcaagaaagccttatcatcaaaatgtgcccagaataagcactgagtaactaaaacttacaatatatgtacctgcaattcagtgtttccatcgaggttgaatgtttctgcaagctgcttaaaggtaaatgatggtcaaacataaacaatacagaaaccaattcctcagactattaaaacaatgcaaacatgttagacataaataaactagtttaagaaatgaaaattaaacgccacagtttctaatcacttacaaacaaccaatgccacggccataacaataaataatttccaagacttaaaattcaactacactagctcaccaaatcagttcatcttcttatatcaaccaatcaaaaacttcagccattataacaaatctgagaataagaaaaaaaaaacatagccatacctcacgaagtttgaatccgtagctaaagcagcacgagggacagttgaacgccgtgatcccatgggtaattttgattttcgaatgaccaaactgtccctgaaaaagtcct

SEQ ID NO: 183798 - DNA, 604 bp, Cannabis indica
gagcaatgccagagaaaggtatgcctagacaatccagtataaacaaaaaaatgaacatgtattggctgtggaagaaagaaagctaaaacaaccacacacagaggaaactgtcgtcttatttaatgagaaaggtgtcgatcatgttatctatcctcagaatgatcctctagtcattgaagtgcaaatcaccaatatgacagtggctcaatccatgattaataatgcggcttccttcaacattcttttcaacatgacatatgaaaaaatgggacttcttcttatggacttaatcctttgcgcatagctagtgtacgagttttctagacagagtattactttgttaggacacttggtaccaaagtctcacgaaaccgaatggaaggaactgttagcctaaagcagtccgggtacattaagaaattattcaaaagttcaacatggaagatgcaaagaggacatccattctgttagggggatattttatttatcaacggtaaaatgtcctaaccaacgaagagaaagagaaatgaaggtgtacctatgcagtggttctaggatgtttgatgtacatgatggtgagcacaagactagacatagcttacgc

SEQ ID NO: 183799 - DNA, 569 bp, Cannabis indica
agcagatcagaccagaaacatgaaacttgctataatcgggtccgatcctctatcaatgcttgattcctgccaaaaacagattagattttctgattgtatcaagatacaatcgaaatcaataaggacaatgcaataatcaaagtttccctaaaaagacaactttccaaaatagaattgattctcttttaagaagtttccaaataaaggaaagttcagctgaaaagtgcaactttcctaacaaggaaaagaacaactataaaccgaataaacaaggtaagaaatcagtttatgaatgcacaagaatcttaccataaaagtaaaaaataattttgtcaactaacttactaaaaaatgaacttactatactccaataataataagtggtagctccattatatttttgttgtatggcgaatggttgtacattataggacaataataatatatgagtggtattccaatcgatctttcattgagataggggttcatgccttgatctttaaatttaattacaagctagggaccaagaaaaaggggcatgggaaataatatatacagtcattaagaag

SEQ ID NO: 183800 - DNA, 584 bp, Cannabis indica
ctcgacattacaatattgcatcttcatataataatttgtttcggtccaacaaattaaataccttttgattgatgacaataagtaatgattgaaaggaaattagctttaatattgttgaattatacatcgatcgatttttatagctaattactttgtctttttggatgatcaagatagattatagctatttgctatcttgatcaaactcaagtttattaggcaaccgaccattattggatagggaaaaggaataatatggtaactttatttatttatttcaagatataattaaattgtgttaatctattaataaagttaatttgaccatatatgttttgaccaaatattaataatttttaatatttcaaacatggaagaattaaaatgaatcaacttagtattaattatcttttcatgtgtataccttaaacttaaagttaacaaatgtgttttgtgttgtgtgtaccaaagaaaagaaaaaagtcagtggtgtagttgcgactgaccaaatgagtgaagcactttataagatttgtctaatgacatggttttgatgtttttgtaagaagaattgtagttgcatc

SEQ ID NO: 183801 - DNA, 889 bp, Cannabis indica
cagagatgggatgagctaagaaatattctacgtgttggtgcacacggaagcaaaataattgtaaccaccccattcaaggaggttgctgaaattacaggcaccatggaagcgtattgcttagacatgccttcggaggagcagtctttgcttttatttagaaaaatggcttttaaagaagaagaagaagagccttcggagaggtcttaccagaaagaaatcggaagggagattgtaaaaatgtgcacaggagatccttttgtgataaagatgttaggaagcctgtaagaacaagtagttcagaagaagagtggcgatcattctatcaaaatgaacttctacccaaaagggataaagaacctgctgaactgatgaagctgtgttacaagcatcttccttcaactttaaaacattgtttggcttactgtggcttatttccagacgatcacgagtataatgtccaaacagtcataaagtgtggatgtcacaaggctttattattgagtcactgactggtcaagatcaatctccagaggatgctggttatgattatgttttggaattactcagaagaggtttcttccaagtatctcaaatagacacaagggacagggtgatcaaatttcaaaaacaccatttagtgcctaatcttccgaaaatggtagcacggaaaaattatagaatgttgatatcaggtaatcttcctagaagatattaccatgtctccattaataaatacttcgtacacaaagtcgattttcgagaaattgaagcacgtaatgtgcgatcgattgttgtgacatttgagtcactacataaagaagagaggacacgaggtaatcgacttcttgatattacagtgtctagatttatatttatacggacactagat

SEQ ID NO: 183802 - DNA, 672 bp, Cannabis indica
aaacccactcgcgcgcatatcatcgtgacaattaaaataataatgctctggttggattcgggccagctcatctttaatctatctccactttcattttttcttattttccggataagtacagtacctccacttcatttacggaatataatctttatattatagaattaaaaaaaataaaattatatataaatatgagtattgatattaggtatcaatgctgcctagtattttctcgacatgtcacgttatgattggctaacgatattttctaaaaactattgtattaaattatgtgggactttaataacaatactcacaacataagaggaagttaattaagcaccactgctaccctttaatttccattactttttttaatttccgatagtatatatcttattgactttgatattgatagctctactctccttcatattggtacaaaattaatgagagactataaatcaacaaaaatattaataagagtatgagtacttttattttattttattttttttggggaaaaaattaaaaataccttatttaagtgcataaatatttttcatccaaaagtggttggtataattagaataaggattaatttgtagcataaatatttaaatttagtttttagaactctgtaggtatctaaccattaaatattaattacgt

SEQ ID NO: 183803 - DNA, 711 bp, Cannabis indica
agttggatttgggtctgaagccaaaatcagggatcgggttcgggtctgagctcagggccagggtctgttcgtgttccaagatttaggttggagtcagagttcaaaatattgattaagaaaaaaattatttaaaaaaatttaaaaagtaattcttttttgtttttaaaattttgattcttaattaaaaaattaaaaagtaaaaataattttatagaacatgattttagaaaatattttcacttttttaattttaaaaacaaaaaattaattaaaaaaatgttaccaaacactgtcatagtttgtaaaataattttaattaataaatattatttttataatcaaagtattaaatataattttatataacttattaaaattagaatttttatatacaactagatataaattaaagagtaacaaaataaagataaaaattaaataaaacataaaaagtaggtatacagtgtaatttaaaaaaaaaatcaaaatactataaaatgtaaaactaataacaataaacaattttaatattatatcataataattttttttaaaataaatataattacaatatagaattacaaactatatattttttatttagatataattataactattatttcttaattaaggcttaaaaaaatatatatctaactacaatttagagattattttatttataactgactcaaattgaaacttatttta

SEQ ID NO: 183804 - DNA, 690 bp, Cannabis indica
gttctcaaaattttttctcgggcgaggaggcggcccttatcaagccccccaccgccccatgaagtgcctttcatggaattgtcggggcctcgcaagagacccgacatcccaagccttgaaggtttgggtgaagaaatacaatccggattgtatttttttaatggaaacaaaagttcaagaagttaagatgaaagttttggccaggaatttgggatttgttaatgcggtttgtattagttctaaagggctatctggaggctcttgttttttctggaacaacaatataaatcttgttctcaattatgcgacagatggtttttttgaagccttagtgtgggattttcaatctcatatgcaatggaaattatatgcaatctatggcactccctatgctaaattaaaggagtgcttttggagtagtttggagaaggaggtgaatctcagtcaagtgccttgggtcttgattggtgatctcaactgtattggtaatcaagaggaaaaagataggaggttccaaagttactttagctgacacgagatggttgagaaattttacaaacatacgggttgcgtggatctcggttatcggaagtaaattcatggcaaaatcaacgttacaatagtggcttgattagagaaagacttgacagagctcttgctctgtgaattggcttactgaatatgctagtt

SEQ ID NO: 183805 - DNA, 644 bp, Cannabis indica
catcttcatcttattgataccaacttgtaacctattgatctcttcatcttcacatgtttaaataagaatgtatatgtaagtaattaatatgttgtgtttatatagatatttaacaaagattattacgtgggtaacgtttaaaagatttgataatattttttattttaaatgttattcattcaaagctgaaattacatatttacacgagaaaagatatataataaagagtggaatttagaaaaatgttaacgataaagtgtgtttgtattatttttttttaaggctaattagtaatttttccctcgaactttgacatgtactaaatcgtgccccttgaacttttttggccgttaaaaattccccctgaactattgagattgttaaatttaaggacttttgtctaattttagtaaaaaaattctaacatggatgaaagttcaaggggcatgatttagtacatatcaaagtttgaggggcatgatttggtagatatcaaagtctggggagcatggtttagtacataaacaatcactgaaaagtaaaattgaatgaaattagacaaaagtccttaaatttaacaatctcaatagttcaggggaatttctaacggccaaaaaagttcagggagaatttctaacggccaa

SEQ ID NO: 183806 - DNA, 601 bp, Cannabis indica
tgattaagatagatgacaaatagattagagggtaaaggttcaaatcccactaactacactttatgaaaaagcaatccagaaatagattttatgaattatgaacttctttattagtttcttcttttgatatggttataaaacctggagtgagggaaataatttgaaataaaacaaagttaatatctgcagtacatcctgataagacctcgtaaactgtttaaaacaacaaccagatctatttttacttttcttaatctaaatttttattttgaagaaattaaaaaagaaaacaaaaaacaaattatcccatgtaaacaaaatcactatataaaccaagaaacagtccttttacttttacatccaagattcaattttcaatgtctgtttggagtgagaagtagggaacataaaaatgtacattgatagagctaactaaatcaaacataaaggaaagaaaaaataaagtgaaacactaacaaaagaaaaagctcacattggtaaagtagttaagtcaaaaagggtcaatccggggatcatgctcacttgccattaccattccagtgcacagacaggtagggcacataacctataaaacaagatg

SEQ ID NO: 183807 - DNA, 718 bp, Cannabis indica
tttttttaattttaaaaaatttaaagtattacatatatatatatgtatatagtacttagcaaacatatatattgttacttttggttagtatatatcttgctaattattatataaacttgaattatttttagatattcatagtttactatttatctcaatatataaatatataaaaagacatggatttcaatatttaacctcagatataccaaatatatgtaattatgattatgaaagtttcattagttcattatattatataataaatgtaaaatcacaaatgatctcactcaataatataatattatttatttactcatcaaacttaaagaataatattgaaagaaccgtctttcgagtttatttagttgtgaaatgtaggtgctacttaagaatttagagaaacaacacctgatgatcctatgcaattattcttggtgtcatctcccaaaacatctccaccttattattattattattattattcataaaagacaaacttataatatatagtacagtagtctatatagttttattctttttttaaaaaaaaatagtataattttattcattgaaaaaaaaataaaagagcatatactcattgttgtgtggtgtactcatgacattcattcttgttttggttaatggttcaaaattcactacagcctttcttcaaagagattatgaaataacttgaaggctaatttactattatttt

SEQ ID NO: 183808 - DNA, 504 bp, Cannabis indica
aattgaaagacatgtttatcgcaagttgtaatcgagcaaaaattgtagtttgaaaaattgggattaaggaattaacttctacaggaagagttagagtaggacttaagtttaactaaagaaattcgccaaactcatgaaaatgttaaatttgcaaaataacaacattgaatttaggactataatggtcgttttatggttgcatatttagcgacctaacatgatcattttgctaattcattgagttaagatattatatttttccatttgcattcttataacataattattgaaaaaagaaatcaactaatagtctcttttaatctgcatattcttgattttttctttttctcaatcgtccaaagaaattaacctttgtatataagttgcatttaatctttttggtttctattaaattcttttgcttaatccttgaccctttcattctctttctttgctagccaatttagttggttgaagaagtaccttcttggagaagccggagcc

SEQ ID NO: 183809 - DNA, 557 bp, Cannabis indica
aaagatcattacatggtgtatgtataactatatatgcttagaaaaagaataaataaaggaaaaaagaggttaactagagagataaaataaacttacaagaatgttgagctttccttgaaaaattgaagaaacagtttctataagtttttccctttggtctctttgagaaacatcacaaactgaaccacttactttgaaacccttctttttccattcttccaaacacttatctaactcattttctttacgacaacacgtgtgaactatggctccaaattttgctagttcttccactatggcatgcctaaaagattaaattttgtattaatttagacttgtatataactactacaaccaaataattataagttaaccatatcatctataaatatttttatataacacatatgcataccctatgccacgagatccaccagtcacaagagctgttttcccctcaagactccatctctcgtccgtacagttcgtgttcttcgttgcagccatgtcccatctgttgatttttgttatcttttttcaactatggctttttctcg

SEQ ID NO: 183810 - DNA, 609 bp, Cannabis indica
aaatgctgtgtatcattgttgaaaaaaaaattcagttcataccttttttttggatttgagggggagctccagatctgttcaatacagatttacattgcttcaatctgaattttcgacgatcgtttgagtgatattgcactataaaaaccgaaatcaaatgttgaatttcagtttctccacggttgtcctgctcttttttttaaaaaaatttatgtttagatcgttggatttgatcgtttcctattgaaattcgacgggatttacagctgttttacgttcgatctggtttcattatggttgcgtggccgactgcatcgatggagcttcattcatcctctccgtttgtgacgtgcggctgaaggtaagggcaagtggtatttttgtaatattttccttttgggctgtacaaatgttcattgggccggcccacagtattgttgtaatatttttccctttttagaatattcctgtttttttcccttttttttatgtatatttgttaaagatttagtaaaaaaaaaaactcttatttattgtaaacaacttaataaactatgtataatgaattatgtgtgatttaaccattaataaaaaatttcaatttacttt

SEQ ID NO: 183811 - DNA, 628 bp, Cannabis indica
gagtaattatccccgaatttttcagtgtttgaagtaatattatttttcttattcttgtatcaaaacataaattctttcataattagtattcaccctattcaatatcttatttaataatatgcatgcttctatatttgtttatttattggtaataggttactactatcatttaattaaatagagggcttagacaaggcaaacctatttctccctatttctttcttgtgtgtgctgaagctttatctactgttattcgaaggtttgaggagaaaaaatggatacatgggtgcaaagtggcaaatggagctcctagtgtatctcatatgctttttgaggtgaccgtttcctatgttgtaaggctactgatggagaggttactcgtattcttcagttgctgagtttgtttgctacaactacgggacaacaagtgaattttgataagtcatctgttttttttcagtactgatacctccagttccatgagacagttcatctatgctaggttgggtatccatgaagcggctgaacatagtaaatatttgggactcccgagtactgttggaaaagacaaaaatgtggtttttggctacttgaaggataaagtgcagaatcggattcaatcttggga

SEQ ID NO: 183812 - DNA, 552 bp, Cannabis indica
cagggagtcgtaataaatgagatttaaatcaaaatcgtaacaataaatgcaattaatgacgccagaatttgcaataaatgtaaggaaagacaccagaatttaaagaggttcagtcccagatattggtaatagcctactccccttgtgttttattgatcaaggttgtaaaagtcaagaacatgctcttgattgcaaagaatgaaaagtgtttgtttctttctaagtgctcatattttccatgcacatttcaaaatatggtgtaaagttgttaaagaaaaaaggtaacgtcaaggtattttaaacaataaaataacataacatagcctaaatatttaaaaaaaaaaataataattttgaagttcgttaaatcaaaataagtaaccaaatatgtatgagataagaaaaattaggttgattttttttttaattaaaagtaaccagttgatatattatttacataaaaataaaatacaaaagattgtttttttaaaactttacaaaaattagaaatttctagaagcaagacttttttagtttttttcatttttcaat

SEQ ID NO: 183813 - DNA, 748 bp, Cannabis indica
acacaatctagaacttcatcccatcctactggttcaacattaaaaatctttctaaaataatctaacataatatcacctattacattatcccactatctcgagttcccctcagggtctttcaagctagaaatttgattattgcgccttttagtagaggctttagaatgaaaaaacttattgttttgatctcccgtttgtaaccacaattgctttgatctttgcctctaaaaaatttctctttggttaagaacgacaaaaagctcccttttagctttaaaaaataatttcttcccatcttcatctcttcaccttttgaattatttaagatcacgattacattgcttaatactagaaaagaattaccaaaaacatcctttccccaatactgtaaagctaaaaaaaaaattctctatttgttgaattcaaaaaggaaaagaaaaatccttaatgcaaatatacccaaaataaaaaaaaaaaaaaaaaaaaatccttaatttgcaatataggcacacttataatttcaaaaaacaaatttattttttgattttaaaaaaagggctatttacaaaaatatgggaaaataaagataagttttgatatatatggcataaaaacttaattacactaaatatgacatttttttaaaaaacttacaaatatgggaaaaagtcttgagtaatgccataaaaacttaaaatttgtgtttctttttatttatttttcttttttaaaaataaaatactaaaat

SEQ ID NO: 183814 - DNA, 636 bp, Cannabis indica
gtacatattatttttttaaattttaaattatacacatgacgctgatgtggcaactggttaattaattatatcatcattttgttgttatgtgtcaacaaaatttgacagaaagaccaatgaacaattaatggattatttttaaaaattaaaaaatataggggtacaataatacacattcatagtttagagataaaaaatcctaaaaaagacttagataaatgttatatgtttagtgtgaattaaaaaaaaaaaaaaataagacaaagtactgaatatatactaacaattaaaaagagatatcaaatgtgtaaattccaaaaatcctaattagtcaaagtacccctatatcaaatgtgaatttaaaaaaaaaaaaaataggcaaagtactgaatatatactaacaattaaaaagagatatcaaatgtgtaaattccaaaaaagtattaaaaaaatttggcagtgccctaaacatagaattagcgtccatgcagctagataattataatcataattttttttatttgatacatattaatatagttacaacaaatatccaacatattttttttttaaaatagaataatttaatgaaaagaaaatagtgtttttgtttgaattattatttcagcacaattg

SEQ ID NO: 183815 - DNA, 634 bp, Cannabis indica
tttcttcgggctatttttcttctttgtttagtttttttactttttattttttaattgggtttttttttttcttaactttgaacaatgggtttttacttttattatttgctataaatctgattgttgacctatgttatattatacattattttattaaagtatttctacattataacaactaacaaaaataatatcgttttattccaaccgcaagtataagaggttgccatagattttcttgtacgagcaggaacaacctggaatttttgggttcaatgaataaaaattattaaatccgataagaaatatcattattaacaccgtataattaactagatcatctataaatatgtcattatcgatctttattagatatatattgctaacataactcgttttaaatattcagactataacttccagaagaaaagtctaattttaccttcgacaattacgaatacaagtccaattttatctcaattataactaaaataatattaattacttttttacttttatgtttttttattagtatcatatattgtgtggcacaatcatacctacaccctagcaaaactcaatatttatacataaaaactctaatttccatttaacatgaagactttatacacat

SEQ ID NO: 183816 - DNA, 638 bp, Cannabis indica
gttttggtgaaatctgcatttttctgtgattttttcgtgaatacttgataaaagtactatttaaaggttagggacaaactttcgctgcaacccatcgaacccctaaagaactaacgtggtacaaattcttttcccaattttttgtcattttgacaattctgagaaccacatgtcatctataggaatcttatacctcaatctaccttaattaggttagtggttagttttttcttttttttttgaaaaaaggttcatttttgtctccttaccacccacaacccttaacccaagtaagaaaagatgtcactaaaggcattcctaacactacactacacaattaattcaaaaaaaaaaaaaaaacactacactacacaacacgtggtatttacataaatatttttttttgaactataaatatttacactacacaacacgtggtatttacaatattaacaacatcaaaagagagattatactccaaaaaaatacaatcaacatgatgctctaatcaatagaccgtttgacaaaacgtaagaaaatatttttaagttgtttacaattttcaaccacaccccaaaaataaatgacaaaaaattcaaatttctaacagctttaccaataccagaaaaataaattcg

SEQ ID NO: 183817 - DNA, 583 bp, Cannabis indica
aattattaatttgttgagcatgtgtcaaaatgaggagcaacttggtaaagcaatttcgacactattttctcttacacgctctccttagtcttaccatgctacactctttgccgacaaattggtgatcacacgaagaattaccaatgaagagtttagattactaaaaacacggtcctttgtgcccaagtagctagaaaataagcgcctagactaaagtctctaccaatccaaaatataggaaaatatacagaaataaaagtatgaagaacattattagtaagcataactagattcctctaggctctagtttggacaaactccaccatggagaaaagaatcctgcataaagtttaaacaatcagagaaaagaactatatcaagctagttctgagaggcaacggatatagcatttgttgtgaatcaatcaatgatttacgatgaaaaaacagtagatcaacaaacacacactcaagaacaaaactatcaaagaataacaagaaccagataataattaaagcagtaactcaagaaaaatataacactaagatttaacgagttcgaaccatgtgcaatactctacatc

SEQ ID NO: 183818 - DNA, 752 bp, Cannabis indica
agaactttcaaaacatgtcaacagacaagaccttcatcaattactctgaattttcaattcttctctcttaatttttaagtatacaatttttggtcaaaattgaaaaaagggttctcaaattttctctcttttttcttcacttttttttgtttttttttttttttggtatttgtaatatatatagagattttttactatttgttctaaataataacaaatttaaattttatttttttacaaaaaattattttgaactatgttttaccaaatattagaattaaaattctaaagttcaatttttttttttttaaataggatcaaaataccactatttataacaagacttatcctatttttttcaatccattacctacctacctatttaaactaaaaaaatttttggtgagatccaaatatattagtccattacttatttgttattttattattattattattattattattatttttacaaaaaaagttgagatctaaaataaatttttaaaaatataggaatgtagaatatatagggtccaaattccaaaatggtgtaacttttattataaatatgaaacatttaagttatatttaaaaaatactttaactttatgctcttaattgtaatattttgtaaaatactaagtacaaaataaattttttaaaacataaaagtccaaaatagtaattgatgaaaaacatataatttaaaaatagtaattgtctttttttttttttttttttttttttaa

SEQ ID NO: 183819 - DNA, 646 bp, Cannabis indica
gttaacgcctcataatttggattgcaggaggataggttaaccgtcgatgaagctttgcagcatccttatttcaaaatttctcccaaagaatgagatcttctcatcagaccgcataaaggtattagttttgcaattttttttaaaaataatatataataaaaaaatgaaaaatggggtgagagaggctcgaactctcgacctcaggatcactctttatagctatgagacctacgcgctagccaactgcgccaccaccccttcctttgttggtttggtaacttagcatacaaaacatagctcccaactttccagaaaagtcaaaaaaagtggttcaggtctatttggtactaaacttttttaccagtgacaacgttaactatgattacaatcgaaagaaacgaccaacttctaggctattaggctatgatgacaaggtatatatatattaattaagaccaacttaatggagattgatttccccaagttactgaaacgtgttgaggaaataattttttttctctcttttctaattctgcattctcttttaagtgagtcagattagttgaacgcattttagttatgccaagtttagtttgatccattgacgctagttagtaacattcttgatgaatatacaagctctgga

SEQ ID NO: 183820 - DNA, 662 bp, Cannabis indica
ggtaacatatacggtcctacagtccgtgtgaggctggtgagcctcaacgtcatcgttttctggaattgcctttcccatcactatccgcagaacaagccgcagagcattgaatgtgtttgtcacgcgctctatagaatgagagggatgatgtaggaagcgcgtggatgagtttgttagttagtgttagtgtttaatgtttttgatcgaaaaaaatatattagtaacactgttaagtgtaagcgaggtgactttatgcttctgcgggtgtaatttgttaaatgtttgcttttgctttatctggtaaatttaaggtcatagtagagttacaccatctttataaattgaattttaattagtttatttgtaccgtagtcttttttttttttttaattaaaacttagtaactatattagctagcaatcgttaataacaatagaacgcacttcgttggaacaatcattcacctgaagcacacgacctgaagagaaacaagaatttctagctaagacatgacccagcttgtttgcagatcgtttgacaaaacacaactcaacattatttaaagataagagaagagtacgaacattatgaacacaaattaaactatcagtttccaaaatcacttgcccccacgaatgacggtcaatccagcttaaagcttc

SEQ ID NO: 183821 - DNA, 551 bp, Cannabis indica
attactcatttatttaacattcactataatattttactttctattaattaacatggttattttttagccgccattggatgttggtcataggtataatattgggaataatcattttcttaaacccgcctaggaagccacccccatttatcaatattgaaaggatatgtttagagctttagattactatgtacaaacttacattcgtgatatgtttcaatatttaaattctattgaagtcataaaagaataaaaataagtatatactcatctttattgtaaatacaaacatataaaaataattttctttttattagttttaaatttttaatttgacagtttggcgacctatcccaatattgtgaggaagaacatctcgtggcgcttcgacaacagtggttaagtcaattgcttccttatttataaatattgatcagtagtattttattgtattttttttatacactagtaatttattatatgtagtatttttagagattttgtatataatgtaaaaatgttatgtattaatttaagttactaattattattgt

SEQ ID NO: 183822 - DNA, 615 bp, Cannabis indica
aaaagacaaggccttatgaaaatgacctacagaacaaaatcgacgatagaattcgtggacgtcagcttcgagacagtgaacaaaaaatgtttggaagaacaaataattgatttgataaaattagtgcggaaggaaagcaatctttggaagatgaagatccaaaactaattttacgtctacttttattattgtgctctataattataaatctaatgcaaaaattaatatatcatgtaatgctcatttaataatttaattaaaaatataaaataataataatgtaaatgtaaatataaaatttaatagtataataataataataatacaaatcatttaatagcaaagaatgttaactaaaattttatgataaaatattaaaattagcataatagtaagtataaaaatataatatttattgtgatgtaaattttctatcatgttatattgtgataaatttatatcacaatttggtacaccaataaaatagatttttaacaaaatgaattatattttacatttgtatgtttgaagattcttttataagcatcaatgatgaacatgtgtacaatttttatgaaaacttatttaattgggatgtttagtttttatatagtt

SEQ ID NO: 183823 - DNA, 580 bp, Cannabis indica
ctcaaagaatcaatcaaaagtggatcttaatatataccacctgtttagaattttttaacactcataaaatatacaatatcaagattaaattccatacacaaaatattacatattattaagtatataatcatagatctaaagcccttaataattaattcagtgatagatagactggatctttgagtaatgatcttccaagaatacaagacataagattctctaatttcttgacaggagaatacaagacataagattctctaatttcttgacgggagaagataagaataaagttgttcttgttttgtggggaccactaccattatataacctaatagattattaattttagtatttctaatttaacctcttaataaattagaaatatctcatcttcacatttagtttaggataaatactattttggaccctgtgttttacaaagttatcaattggaccatctgttttgttaaatgacaaaatgaaccctatatttttcaaaatagtacaaatagaaccctgagcctaatttttgacacttttttttttaatataaccaacttgaaaatatgaacagatacag

SEQ ID NO: 183824 - DNA, 686 bp, Cannabis indica
atttaggaggacaaatcctaactccaacatctccaattattgattgcactacatcagtcattccatcaggaaaataatccccaattgcatcttcaaactcaaaatcagaacccccaacacttgatccatcaatttagtcttctatgcacgttcagaagaagttggtcatcttttctttcgaatctcattcccttttttctccttatgaattgaagatttagttgctaatcttgccttcttcattgtcgatttttgcttcttagtcgtctgagctttgactcggggcctccccaattacaagcacagttttttaatattaattcaaaaaacataaaaaataataaaaaagctatatataaatatttatttaagtttaatactatataaatatatcatccttacaagtttaatacaaccaaaatttaaaataactaaaacaacaatatcaagttataaaaatagaaaaaatcatcatgaaaataaatacgcaaaacaactaagtattaaaaaattcaaaaaaaaaactagtaaaaaatgacaattaaaatatattttttattatatataaataactagtaatatatctttaattaatttaaattaacatctaataccaattcatatctacttttaatttttactcttttttctattaccctttaatttatactatttaaagtctatat

SEQ ID NO: 183825 - DNA, 832 bp, Cannabis indica
aaaacacaagttacatttggttagtgttttttaaaaacaatattaacctaaagtgaattttgttgttttcaaaattcttattttttataactttattttttgaaaactatttttaaaaaacaagaccaaaaagtcaaattgttttcaaaaataattttctatttttaaatacaataaacagttttctagttatgatgtcaaacatgcacatagatactttcatttttttattattattattttcttttatagaatattgctatgagcatcttgtagtagccaaactaattacaatttttgttttacaattaactagtgaggctatttatgtttttgatacttgaaattacaatttttgttttttgaaatttttattgtttgatgcttatttttattttttttattttaaaaataaaaatgtgcttggtaactttcatttataagtgaggttaaaaaaaaatagtcttttattaaaagaataatagctatttaaataaattttggaattaattattttttcaataattctcattttgaagttaacactttttttaatcaatttttttaattttaaaattaaaaaagtaaaaaaattttctaaaatcgtgtattataaaactgtttttactttttattttttaattaagaatctaaattttaaaaacaaaaaaaaaatacactttcaatatttttaaatatttttttaattaatattttgattctgatcccaacttagatcttgaaaaccgaacccaactccaaccccggacttggaccctcggtcctgaccttagacttgactccgaatctgatttaaataaaaccaataaat

SEQ ID NO: 183826 - DNA, 781 bp, Cannabis indica
atcgctattagtcaaactaagtatcgagtcccatgtaatttaatataatagcctttaggaagtatcggtagccatgcaatcgcaacacgacatgtcaaaaaagtattaagtactactgatacctaataacaatactctaatattaattatgtgtgattatatagcaataatgttttataaaagttcacactgaaattaatataaatcatacatatcacatttcaataataagtcatatcaatctttccacctttaattttctctctcattataaatccctataatgtgttgtaataaatcacgtcattaataagttattaattcattattaacactaataatgaactcagctaactaataatataataatatagtgaaacaaaatttggaattattatatacataataaattaaaagcaacaacacaaaggtatattctccatatcgaccgttggataacaaagaattctgttgttttttttttttgaataaataaacaaaacaatattattttcaactacttaaaaacccaacaagaattaaaataaaaaattaaaaaataattaattaaatgaaaatatataataaggtgatggggtttagatgagatgtctccagtgcaggttagtagaagtggttgctccgtcaatttgtctacccaaaaaaatcatgattagccatagaattttgagtattaaccatcatcattaaagttcacacacacatatatatatatatatatattatataatatatatatttattagattggagatctcat

SEQ ID NO: 183827 - DNA, 524 bp, Cannabis indica
cttcttggttgcaccttcctccactcatgagcgactgacgtcaacggtcgcggcctgccgcggctggatttacgccacctcaataatgggagcgacgggaactcgaacccagaagtcttcgacagcccccgaattggtagcccgggtgagaggtgttgaccccgacattgcggtgggtgtcgagttgggggtgtccaatggcgaccaggctgccgaagttggctcttttgctgacggcgtcatcgtaaggtcagctctagtacgtgctttcgttgaggctgaggatcggggggactcagtgacggtaggaattgaccggatgtgcgccatcgtcgacgacctggcggccggagtacggcgggcggaacgccagtgagtcagctatcgatccccagcccatcaatcgaagcgtttcatcttggaccgctaaccatccacatcctacgccctatgcatcctcgcgggcatcgtcgtcgcctatatcagtggtgggcgtcgctatcaggctcgtggcggtaagcaag

SEQ ID NO: 183828 - DNA, 532 bp, Cannabis indica
caagcctaaacacattataaaatgtaggcaatcatgccctatgatcaaatttaggaaattgtacaaagcatggttgatacaatcatgataatggtggccttttaccacaattatgagcctataaatatgtataaaaatggaataaaaatggaactttttcagaattctctgtaagaaaaaaatgctcatcaataacagtggctcgtggactaaggttcattaataacccaactacgtagaaagttctcattaattacttcgaacatctctaattaacagttgttgaaaatctcagtcaacattaatggtaaaaagaaacaaaacctaacaaaaagaacataattatgaaactgttatattttagggaaatttttaacaagctgtatattttagggggcatgatcagatagtgtcaaaagtttatggacaaaatgctaattatttatattataaccaaacataaaatatgatataaatgcaccaaagatgggcaaatgtttggtatgtgaaagggtgttcatcaaatcgctca

SEQ ID NO: 183829 - DNA, 917 bp, Cannabis indica
cacccacaaatttgtgggattctttcaaatgtcacgttcggtcctgtaatctcttaaaggtcgttcgttatacctacactttccaggcccaaacgtgaggagggtgtattaagagttagtcccacattgctaatgtgtggaaataaattgtgatatataagataaaagggctactcctcccattgccaattggttttgggatggaacctcattcatcttattcctcaaattctaacaaggaaagataattaaattattaccatgaagagagaaactgagaaaaacatgaagctacagagaaaagaatgatatacaaatttcacttttgtcagtatcaatcgtcaatcctttattgtaacattataatagaattattattcaaaataaaacatcaaaataaatttagatacaggttatatagataatcagtgtctacaaatcaaaatacagaactcacccgagagaaccaggaacgttgaagcttgaaaaaaaggaaataggttaggagttgacccctactttaatcggtatatgcttatttagtccccttggtcaaacaacaattataaattaataatatttttttttattattttatattcacttggataagaaaataaaagaaactgccatgtcatcaggtaacaggtaaaaaataaaaatattaattttaaaaaaattattaataaatataaatatcattcataagattaaatataatggtcaataattaaagacccatatatgggtaatacccattaagagcacacccatatatgtatatatatatatatctatatatattttaaataaaaatatattaatgtactatgtagttagatcaatatatagagaatggtgaagattaatatacatatctattattttttactttagtgtaggacatcacatttgat

SEQ ID NO: 183830 - DNA, 575 bp, Cannabis indica
ttaataaagaccaaacaagtcttgtagattattcgatattaatttgaccgatcctaaggtgaaattttaaactttggataatcttatcgtggaatttctaaattgttttatgtgttttctaagtgttcgcatgcatcatatttaaattctaaacttgatatttattttttatttatggtacttatattgtatttatatcctattgcttatttcccttgttatttatcttttatttcattttaataacgatataaaatggaacaacaatttaatattgacacataatcctattactatgtaactaaatttgatggtaacttccaatccgaatgaagaatcgaacttctcttgcaaaaagaaaatctatttcactttgtctctgttgaaactccctagaaagaaatgcgtgaacaatctagttacgcgcagtcaagagagcttaaaaaatttaatagatttttaaaagataattaataaaaatatttcaaaaatatataaatttaattggataacaattggacaataactgaagcggttatttattggatcgaatgtcatccaacaattaaatacgg

SEQ ID NO: 183831 - DNA, 608 bp, Cannabis indica
atgtatacaaaagaacaaaacaaaattactttatggccttttgcattgtcactctttctttctttcattcaataaaacagaagataaattaataaacacttacttttttctacagaatataaatcaactcaaaaatgaaatccaattttttgttgtatgattcgtatgcttactcatcagttttactactcaaccgagctcaaaattaaaacaaagaaaaagaaaaccgaagaaaacaggtcaggactaaagagcaaagacaaattcagatccaaaaaaaaaaaaaaaattaaaaaataaatctcaaatggtggtaaaagctccaaactttcctttttcctccattttcatataaaccaaacataccatgcaaaatgttaaaaaaaataatagcaatagacccctctctctccctcgcttttttttctatttttttccttcattaacaaactaatgattaaactatgatgcagtgttttctgcttcgccggatccataaaatcgaccagtttctgcaaaatcacgacctgggtcctcaaaggacgatgtaatcagccgtttgctggaacaattgttcgggtttaactgtctcctcgttcgtgggtagg

SEQ ID NO: 183832 - DNA, 691 bp, Cannabis indica
ataactggaattttttttttttttttgacgtgctataactggaaaattaaacaacctccaaaaagaaaaaataatttattatttttactgaataagtatttttgttaataacaaaatttaaagcgtaaaaataaaaaaaaaaaatactaatttttgaattattatatttttttttctatgtttagctcatacattataaatggcctaataggtgggaaattacccctacttaacttgccattgtcgagagtatactaatacttgtttaattttttttaaaaaaactttatcaatttgattaaattttgtatcatttgttatgatgtgattaattgttatatttttttttaaataatatataaaggcttaaaaattagatatttatattagaatctattttttattgtttttattttgtaaaagaaatggttactaatcccttttttttacttatttattttaaaaagtatacattatggtaaataataataaatatatttaacagatatatataacagatatttaacagaattctgatcttttgttactttcaaaaaaaaaattaaatttcaaatacactatcaaatataaaattcaaaatttttttttttaaaaaaaaaagtaaaaaaataaaaactaaagattttactttctttactaaagtatatcatatttctacatatctaaattt

SEQ ID NO: 183833 - DNA, 789 bp, Cannabis indica
atttttcctgaaagagaacatatcgtagtcaaaaattgacttgaaggttcagacttgattttgattacaaatggagcgtgttgagcatccaaatcttaaaaaatttcacccattgtatcttacaactccaaatccatgctaaatctataaaattcatcttatttaacatgttttctctcatttcaacccatataatgtattttactattaaaacctaaaacaaaaataaaacaagcgtaaacttgaataataccaaataaaattttatgtgtaaaacgtataaataccttttaaaataaactactaaaataaaaaaaaaataaaaacaaagcgtaaactaaaaatatacttttaaaataaactctaaaacgcataaaaataaatcttaacaattatagcgggatttgaacccttaccccaaataagaaaaatgtcattaaagtcatccttaccactagaccacacaacacgtggtaaagttgtaagcttgtaattgttgattacaaattggtcgaaaggttgcataatattttacaagtaagcaaaaactccaccagctttggtggggggcaaacaggcccacaaagaaagcaaaatgaagagtagtagtagacttctatccttcctacactggtcccccattccccaaagccaaagggaaagggtagctttaataagatagatagagagagcatataagcagtgagtagccctccacaaactcaatgaaagtgaattgaaagccacataggaccaaccaggttagctaatgactaatgtgtggatgtg

SEQ ID NO: 183834 - DNA, 578 bp, Cannabis indica
ctcattggttacttcttagtcattcaagcaaaagcttcagtcttaatgatagtgctgggattggctttacacattgttctttctttttgttatgtggagtctaattatttagctttagtttctgttgttcaaaagtgctctttcttttgacatgagctaggtttttttagatttttttgctactttgctttccagttttcctaaggcatccctagttcatgttcgtttctcatgaattagttgtgcatgcacttagggtgaattggcttagattgaggattatatatcttttcttattgatttgtattaaactcttggttgttgttaataagagtttaatttaccaaaaataaaaaaaaaaatatactaaaagttttttttcctatttaatatttaataaggtaatttgtggtcaaactacctaaatttgacatactgaatttttagggtaaaacccctcaaactttcaattttgttttgttctctacttttctatctatttaccatagtggactgccattgtgtaaagtacatgtgactaaatttttattggtccacttagtattaataacttaaat

SEQ ID NO: 183835 - DNA, 580 bp, Cannabis indica
gaaggtgtgtgtaattttttttatttgagctgtacatttatttatttggctaactgaaagtatttttgtaatattattattttttattattattaaaactgaaaaaatctttaggaaaaaatctaaaaaaagaaaaggaaaaatatgtaataaagaactaataaggtggtgatggtgggtggggcccatattatccagatagaatgtggggagccggactggaagagggaggtaggagtgggccgtggaatgggtcaatggttttccaagtccttaaccgttacaatgaaaacacctaaaagtccacaggtagtgggcccccaccttagttttcatttgatagaatgttcttctcctttcattctcttccacgttccacaatctcaatctcaatctcaatctttttgattttttgttcatcatatggtctatatagataaaaaagaaaatgttattctccaatcttttctttcccaaagaaataaaaggaaaaaagtgtttagcacgtaagattttagactagacttcttttaaatctagttcttattatatacaacccccaccaacaaaaaaactaaat

SEQ ID NO: 183836 - DNA, 1021 bp, Cannabis indica
agattttagtgatgtattttgaaggatggagtagagtaaagtttttgggtgtgctagagcatgtgatgtagtgtgtgtttagtttaattctttaaatattttaaagtttctctattatagagcatctaatataagtaatattccctaactgttaattaattagattaattattataagtaattgcggttaagtgcccatattattttaatttgtatacaattaactctatgttattttttttttgtcataataccccttaacttcacttctatatacaaatttaaggcattagttaaatttcaccattaaatatcaatgactttgccattttatgtacgtacgtagcatatatttttattggtctctaagtaattttaattgtttaaatattataaaaagtattctagaaagttggcatataatagtaaaatttaaccgacgtcttaaatttacataataaaaaaaaagcaaaattaagtatgtattgccaaaaaaatagataattattgtaaaatcgatacgcaaatatacacgatcgaatcaagtaatataatgataaagtagcacggatggatgtacttgatagggtgaggtggccctgacccccttaatttgttaaaaattatgtataatatatgtgtagttaatcacatatattccaaataaaagaaaaagctaataactatcaaaatattaacatataaggaaatatttataagacatataataaaatcattatgtactattatcattattttttgtgtgatttattagtgtaaatataattatgatgaatagatatttctaaatataattaaaaataaatcatttaaataatatattcaaattttagggagattataattttattctgtaatctttattataatttacaatttttttttattttataattgtgtctgttgtacttagttaatattatcggttaaatttttaaatttttttaaattagtttacaatgacgaaaataaagttcaaacaactatttaccacacatag

SEQ ID NO: 183837 - DNA, 504 bp, Cannabis indica
gcacagcctaatactgtttccttttgcagatatttgcacaatatggtcgagttgaagatgtttatctcatgcgtgatgagttgaagcaaagtcgcggtatgtgctctttctcttgctgtaattttaattttattcttggttttctttttgctgtgttacaatctcacaaagtgatttcaatttgtcgtgtctccttattcttttacggtgataactaatttaattgttaatcataattggaaataatcgtttctataacaagtgtgtgcatttgacatcatattcggatgctctattcattgtttggcgtttcctttatgaataatgattctgaaattgacttaagagtctattttcatttgtcatttgataaggtttagttgctcagatccttgtgtctgtattgtttcactcaatattatgtaactatcttttttaacattgaaggatgtggatttgttaagtactctcagagggagatggcattggcagctataaatgctc

SEQ ID NO: 183838 - DNA, 854 bp, Cannabis indica
atattaattaacttaaataatagcatacaatttaattaagatatatttttagatgccatcaagattagaattaaaaaaagtaagttaaataaatagttatttaatttcaaattgtttgatagaaaaaaatttaaaaataataaaaaaaataaaaatattactgttaatacttaaaaaaatacatatagttattttcatctaccacttaaaagatataataataaaattgttataggttcatttaatctcatagtttgagcatttaatacttatacaatgttagtaattgtactactaataattccttcagttgtaaagaacttattattaacaatcactaacaacgatttgatagtgaaccattaaagaatcaacaacgaaacaaaacaaattatgttacgagataaaactaaaataataaaattatatcataaatataaaattaaaatactcaaaactataacaataataaaatcgaattaacaataataaaatacaactccaactaagttgcagatgcttaaggaaagacggctggcgtaaccgggaaaaaaaaattaacctcctttaattataaatttaagataattttttatataaagttaatagttattgaaactatgtattaaataaaaaaaatataaatatataattgtagtagtttagtattggttttttttttcttttttttttttgtattaagtatggttttagtatggttttatttgctgctttggatttggggtttttgaatttcatatcatataattaatatgtatgtagatgtagattgagagatgagagagagagaaagggtatgaaactgaagttactgttactcccgcgacgccatt

SEQ ID NO: 183839 - DNA, 583 bp, Cannabis indica
cagtctcaaataacatctctttcaattcccgccaacttgatcacgcgaaccccgcgaattgcttcctttatcataatcagtcaagtcttatctgtatgctgatttcatgtcagcataagaatttcaattttgagacctttagaatatgggatatttgttgtgatcatagttttacttttgtagcacaatgatttacgagtctttttacatattgtcttttcacttcaaatcttcaaactgattcttaactaaatataactattggctcatacccttatagtgagctttgaactacaatggttgtcctcacaaaaaatgaacaagctttctctcaagctactttaggctactatggaatgatgacatatcaaaaaatagcataatgcataccataattgacactacaaaaaactgctacttttagtgataattttttagtcacaacataatttttttgtgactaaatgtgacttttagtcacaacaaaatattacttgtgactaaaacatagtatttagttacaagttgtcactaatttagttttagtcacaacgatattgtgactaaaaatacatttaatcac

SEQ ID NO: 183840 - DNA, 575 bp, Cannabis indica
gttattttcgataaatagttaacaaattctctgaaatttgtaactttcactgctcaggttttattttgtaatttaatattaatgtatcttatagataagtatttaaaaaattctctaaaacttgtaatatttttttgttcattcatttttgaccatttaacagagagaaattatagtaattagtaaaagatctaaaattatacgtaaatgttctcattttaagacttgtaaagaaataattcttttacacgctttattacttaaattatcttttgtcatataaaatttatgattgaaatgtataagaaaaaaaaattgtgtgtgttttgtctcaaattactcatgcgtgtataatttgagtaatgagcaattcattaagcaatagtaaatataacattataaaacagatctctcctttacttttttcgacaagaagcatacacatacacctaaaatgttacatatatttccactactgagactattatgcaacattttatcaaaaaaaaaaaaaaaaaaactattatgcaacataaataagggaaattaaattaaacattctactattttatttt

SEQ ID NO: 183841 - DNA, 527 bp, Cannabis indica
caagccaaccatatattgtgtgttcatatcaatttgttgtatttttgttgatcttgatttgtacatcttacttccttatgagtctcgataatacaattggtactatcaattccaagacaagtcgataagttttgatcgaactttatttatttttgtagaaatctttgtacctttgagtattctattttttattattaggcttaagattttcttgaaactttgtttcttattttctttcctaaatttgtattggatgcttagggcttcgcatcttgggctgctctaccttggctcacttgtagtacttgtggtatactctatcttatatggtctgactgcgaaggaagcacgttggctcggtgctaccacatcagctgctgttattattcttggtttgttagcttgctttctactttttttttccttagttgttttacttttcgtaatacgagtaatacaagctagagaaagagatgatatcttgagaatcgtacacaaaattcttatatatatatgtgtgtctgtgt

SEQ ID NO: 183842 - DNA, 778 bp, Cannabis indica
gatgtccaatactaacttagagaatcagccttaaaagaatgagctcccaagcataaatggctccctataatacataagagatatgaagttctctaaatgtagggagctctcctttttcgcttaatttttttagtaatattttaatctaaaacactactatttttttattattttattgaattaatttatatttgacaaatttaaatataaaattattattaaaatagttaaatattttaagcatggagctaaaataataaaaatattactctattttaattttttagctaaaatagctaaaaaatttgtccatgagacttgaagaagactataatgtccaatggtcatagcatagccaaactaatctaatctattgataatctatttgttttctaatctatttgcctactaagaccacattaataataaggaaaaagtaatatatgtatattgtataggatatataatagatagaatattatattctccttgctttccactctaagtaacttgaaaggatgatctaaaagtccaaaactattatattatacctataaccattatttccaagcaacatcatgtgactattatttgtctatgtgcatataaaatacgaagaaaatcataaaaactctttactctatatatctttcacctccttgcaatcatattttacagatctcaaactaaatcttataattttcccactaaacttttttgtttctcaaaatcaaaaaatatgcaggaaagtgcttacaactcagatcatggaactttg

SEQ ID NO: 183843 - DNA, 769 bp, Cannabis indica
ttgctgaccttattaacaatgctcgaagaataattaaggaaggaatattaagactaattaataagtgagaccttaattattttgaattaattaaaaacaaccaaaacgtaataagtatagacccaacacacttacacacacatatatatataggcctatttaattataattctaatattattaggattagtttaatttaactttgatttttagaacctgaactagtttaagtaatttgtttttaatttaaatttagatatgtaaaatataaagataaacttattagataagatttaataatatcgtaataaattcaaattattactaaaaactaaaaacaaagaaattaaattacacaacatatattctaaaaaatataggttttgtatttaaaagataattataatcttaatatcattaggattcatttaatttagatatttataatctaaactagtttaattacatttaaatttaaatatgcaataattgaaagagaaacttattagatgagatataataataataataataatattattattattattatttaaaaatgatataacattcttaatttaaaaaaaataaatgaaaattgctaaccttaattagacaatggtggaagaataagtaagaaatataagacttaagcgatcaatggattgcagagactttcaaactaaaatattatgaatttatgatcataaaactaaaacaccaaaatgtaatatacatatatatatataggtctatattaatcataatc

SEQ ID NO: 183844 - DNA, 624 bp, Cannabis indica
aaagtagtataaggtatatgtaaatataaataaagtaaaataaagatacaagaatttttatagaggttcagccccgagcaatccggtaatagtctaatcctcttgctttgtattgacttaagaacaaggaatgtaatgatcccttttcttagagctcttacaatgatatctctgaatatgaattcttagataagtttccccctgcacagtgagtatggatcactatttatagggctataaggtttgagggaagagtttcccttttgattacaattgatataattggaaagattgcatattaaataaagaatacactaatcaagggattcagatagcttgccatatctctctgatctgatcccaaaattataggaatttcttctgtgactgacgatgcgaaagctaaaactgctaagtgttagcgtgttgttcggattgctcactgcccggttaagaaggcttcgtctgagcgaatatatgtggtgctctgtttggcatatcccttgcgagaagccatataaagttgattccacgtgtcacaatcatgtgatgctacggcagagtacaaaaattgggataacatttgcccccaagtctgtacggaatttctgaagttgcatgtag

SEQ ID NO: 183845 - DNA, 609 bp, Cannabis indica
aaaccgcctctaaaggggatttttgtagtagtgttgattaattaaaaagtaaatttgaagttccttcatgctttaagatttttattattattattttcctttttttccaatctatttttaaagtatttgaatgctttcactcatctcacaatgtatattcacaagaaagatacctgaattcatagggacaaatcttaatacatgtaagtcaagttgaacattttttttttattaatttaaggttttaatggcattacttaatatatcacaatactaacaattgttagttctttgtatgtttctgtacaggaggctttaagagagctcttttgaaggacatacactattattgttcacaatctaacttctctaagagacttgtgagtattaccatactaagtctcactttcatatttaaattttaaagttaacaatcttgagtgtgaattaacattttagtattaaatttattacaattttataaccacataatcattgcttttaatacattaaaataacattttaagtataaatatttttctttctaaacaaaacacactatattccttaagcaaaaaacatagataaaaatctaaaaaaaaaatacaa

SEQ ID NO: 183846 - DNA, 652 bp, Cannabis indica
cttgaggggtgaccaccgtcatcattgggtgactctccaagacccaacttgagggggtgacaaccgtcatcgtttggtgaccccttgagactcaacttgaggggggtgacaaccatcatcgttgggtaaagataagggggaagataagggatggggattagttttattatttgaggggtaaatttggtactaaaaaagaggtagcatattttgttgaaagtttaatagaataacatataagaagaccatgcaacatatttaagcatggattgtcaaatttctcttttataaatctataataaattttaagagcaatgaaattgtatatcttattttgtaaaattatctttttatattccatatatgtaatcttgaaacaaagacaggtcagatgtcttcattttacttctttccttacactctatctaatttgtagttttttctatttttatttttatttttttaactatttaaactatttttatcaattaaactttatctctaatataattcaataagaaaatctaaaagacatgcaatttgatatttattatgttattaattgttaaaattatttgtattcttctaactatttgtattctttattatatctctttactctttttattgtatatataatgtctcaaaactc

SEQ ID NO: 183847 - DNA, 618 bp, Cannabis indica
ttaaaatattttataaaattttggaagcagcttagaataattagtatttttgatttctaaactttttacacttaaattgtgtacctataatatacggacttgttaataatacctttgaaatataacttcataggtagttatttcgtcacatttttatttaattttttgttatgaaataaataaagtcgtagataataattgataaattgatataaattaaatatatatatatatttttttttatctttttgacattaataaataatagaataaattatgtttttatataataatttatataacaaaaagatatttaatttatatttatttattaattattatttattgagttagtgattcgtttcatgataaaattaaatagaatataacaaaaagaccatattattataaaattttattttgggtaaatatcattttagatcctatattttgcaaaagttaccaattagactctctgttttgttaaatgataaaataaatcctgtattttttttcaaattgtgcaaatatgacattaaactgatttttttttatcaaaataaaacttaataataattcgatctagagatattagctagtaacacttgattgtaatgt

SEQ ID NO: 183848 - DNA, 750 bp, Cannabis indica
atacatctaaataaacaaaataccgtgtcttgcatgtaatttaatcaactatatatatatatatatattaaattactttggtgattaaattttttattaatttatgacttaaccaatttagtaatgaatgaatatgactctcttcttttttttttaataaataattaaaaaaaactatgagtaataattttaaaaagggaaaaataaatagatataaaaagtattgtttagaagaggagatgtgatgctttcctagaaaacgaaataattaaacaattgagaaaaacatataccaaatgtcgaaggtactgtggaagaaaatagtcacgagaggtaacgcaaccgcaatgaacagcgccattgaaactacacaactgcacttttgggcagccatttttgcttctgatcactctaataatattgaataatttatttaagagaaaccatgcatatacatgaaagatgaagaagaagaaatgtatggtattaaatgggcagccatagtcctattcgtatataaaaggaaattggggaccagatgagttgtggctacaatattgaaaaggtcaaagtaatagaaataaataattttcctccttcaccattgctatttttctattatatgttggagttgagtcaggattttgaatatgtttttgccctttgggtaggttttatttttttttaagaaattattttcaaacctaatcttttatataggtttaatatttttaaattaaaaaaaaactt

SEQ ID NO: 183849 - DNA, 557 bp, Cannabis indica
ctccttttcacacctgttcgccccatccgtttgatcacagaaatcgaatcgctacaaattatcaccgtacggtggtgtttgatcacagctgccttgcaccctttttggcctataaaagccaacacttttcctttgttgggttactttaaccattttgcgattttcaacccaaccaacacatttgaaattttttagaaacctccgacttcctactgctgttccttcgccgttgccagaccaaactttatcaccagacgccatcaactttttgcttatcatctttgtgtaagcatctgtacacattttctttgctttttctgcatgttagggcaaaataagaatggtgacattctcatttagctgtgcttgatttttgtgatacggtggttatggcagaggccatggtggtgcctccccaaaaaagggggcgtcaaatgaccactgtcgtatgttgttttatttgcatgcttactgttgttttctttggggctgaaaatgattttcttgtttgttggccatcgattgtttgaagctacttccacactctcctattcttc

SEQ ID NO: 183850 - DNA, 631 bp, Cannabis indica
tataattcaatatagtttcaattttagatacctgaaagtttaaaggagatttcatagaaaatatatatatatatatatatatatatatattaataaaataaaaaaaattagtggtaataataacaatatattgttgatattaccaaggactaagaactactactagtcatttacaaagtatatctataccctttcaaatttaatcacctattaattttattttatgtttgtctaaaacatatatattaaatacatgtatttagttagattctagctagctagcttgacttaaaacaaacaagtggccaataatagtaaattagtaattaattatcatatgatgttttgccaattgacctaatagttatgactcttaattagataagaattgctaaaaagatggtgtctaacattatttgagatttcatattattattggcataatataacatcaagtatatgtaaggtgttgcttcctatatatcttacgttaagaaaattgagttcactctatggaatgagattgtaagaaatttatctctctctgatttctgatctcataatttctaatatggcaatatttagagagcatcttaaaaaatttcgttaataccatccattgtaattaggg

SEQ ID NO: 183851 - DNA, 735 bp, Cannabis indica
aaatataaaaaataaataacactttaaatttgtaaatttgtaggattttacagttaaaatttgaactaccaattaaagtaatagttggatggtttagcttacaaaaaaaaaaaaactcatttttcttcaattgtcatttgagtgacagttactttcggttgagtgaggatggtttatattatatatacttggctccttcttttatgatgtggcttcacttgacttggctgtgagtgaaatggctttaaaacttttgtgtgggattttggttcttattgttgtttggtttatatatatcttggttccatgaacgtgttgactgcttgactttgatgcattattattattattattattattattattattattattattactattaaaggcttactattaggaagaggtcaacatcacatgccatgctttatttgacctataaggctttggttgttgaacacccaatgatatatccaacgattgttaatgttaattatttatgtactcttcttttatgtttttaagaaattcgaatcgattttcgtctcaaatttgatttattaggatgaacattaaaatcgaaagaaattaaaaaactctaaaatttagggaaaatgggtttttaggaaaggtataaatagaataacaaccaaaaaaatctaaaataagaaacacccacattctgcctcctaccttgaaatctactttaaaagaaaaaataaattgaaaagtatt

SEQ ID NO: 183852 - DNA, 518 bp, Cannabis indica
ttagtctttttttctttttgaaaattaactccccacaaaatgtttaaaaattttatactttaaaatatatatttatgtctaaacaaactcaacaggtttattgatttaattaatataagataataacgtttttttaaaaatgttatccgcaaatgtaattatatggtgaaattcttgtagtggttattttttaatattaaattatttaatattgattaaaatagatttttttttcacatcaccaaagttattacttaaatatgtacaaaacataaaatattcattttaaattctccaataataaaatagaataaattgttattatatatctcaaacaatacattaaaataaaataaataaaaattaataatggaaagagaaaaatgttatagaaaagaaagattgaatgtagttttaattagattagtataagataaagtataagctttgatttatttgttggataactatactatatgtaatttattttttttaaataaaaaattattttttaaata

SEQ ID NO: 183853 - DNA, 571 bp, Cannabis indica
attttttgtattatgtatgttatttttttgctttttttttgtgttatttttgatttttattttcatgttacttttatgttgttttcttatttgattttatgttgttttcgtgttatttttttggaaaaccataaaaaatgtaaaaaaattattctttaaaacgataaaaatttaaatattttacaaaaaataatgctttattgtaattattcctacttaaaaataggccccaataacaatgctattgtaaaagtgataactacagtggtggggtctgctctaatgtctccataaagaattctatcatagaaaataataataagaaaagtacttagaacgagtaaagacacaaaatatgcacaaaaatagtagatcgcattatatatttttgaaatgttgccttcttataattgttctactttttattattattattattattatcattattattagatgaatgtagtttttatgtttgagaaatgttaaggactctactaaatactataaaaagtgacataattttattcgttggtttcacaatttagtttatttaataaataacataaaa

SEQ ID NO: 183854 - DNA, 885 bp, Cannabis indica
atataattaattatttttcattattttacatcttatttattgaaacacaattgcaataataaactaaatatattacaaacttatttttttttttattaaatttagcacatatttaaaatctttcattagagatactattaacccaaaagtctactcaagaatattaaaataaccttgagaagactactacaaaatcagtgccacatacaaaaattactattattctactttcttcattttattattagtccattataaagtttggtaataatgatttaattttcaatatcactattacattaaacaaaatatgatattaaaagtttgggaaattttgtcatagagtaattgtttacaacactttatattaatgataattgttattgtaaatttttgagtaatttttttctttaaaagatatgtagtgtttgtttaaaagaaaaggattaatacaaaaaaaaaaaaaaagaatttaaataggaatttatatttgagtaatttgcgatataaatatctaagtttaacttccagttgtaaataaatacttaagtttaattttttgcgttaataatacctaagttataattttaggacttttattaggtacctaggttaaataaatagtcacgtggctaatccttgattggtaaaagtcattatattttattatttaaaaaaattaagttcaaatataccaataaaaaaatagacacgtggatataatggtttaacatataacatttaggtacttaaagttctaaaaatataatttaattattattactgtcaaaattaaacttaagtatttatttacaactaagaattaagcttaggtattatactgcaaattactcaatctttatattatagtttttaaatttattt

SEQ ID NO: 183855 - DNA, 522 bp, Cannabis indica
atacaataattaataactaataatgaacaataattaataaataataatgaaacaataattaataaataataaaaaataataatttataaataataataattaatacataataaaagaataataattattaattattaataaaacaataattagtaataaaacaatacttaataaataataaaaaataatatttaataattaataaaaaataaaaagtaatacaataattaattaaacaatacttaataaatcaaataaaaataaaataatacataaaacaataactaaataattaatatttaaataaaaactaaaaaaaaaaatagtgtccgatgggtccgattggcccgatagggtacccatcggaccctatcggtccaattggacatcacaagttgggaggtagttctagtccgatggtccgattggtagtgtgcatcggacccatgcatcggaccaatcggacccatgcttcgaaccatacagtcggaccatcgggcccatacagtcggacaccatcgg

SEQ ID NO: 183856 - DNA, 667 bp, Cannabis indica
attttcaataaaacaaaagataacaaaggttacatttggtaatatttttatatttagattttttaattacaaaaataaaagtaaaatttttgttttaaattttatttttgaaaaaaaatatgttctataacaatttttgttttttaattttttaaaaaaaaataaaaatgtgttctgtaaattttatttttatttttatttgttaattttatttaagttaggtttgaggtggggactgggggcgagtccaaatttggggccaggttcaagttttgtttccaagttctaagttggccgttggagtccaaaatattaattaaaaaaattttaaaagtgattttgttttttaaaatttagattcttaatttaaaaatttgaaaagtaaaaacagttttatagaatgaattttaaaaataaaaaactgattaaaaaattgttaccaaacgcatcctatattatttagtgatcataacaaataataacttcttatatattattggtcttgtttgctattcgaattttaaagtgtaaaagtactcaaaaaacttaaaaatgtaagaaattattatatgtaaaatgaaacatatatgatcgatttgaaaaagtagaataatacgaaaaaattgaatatatacgcatttaacaaaagagatcgaagtacctctag

SEQ ID NO: 183857 - DNA, 633 bp, Cannabis indica
ggacacgattttgtcccgttaatatatttaagggtacatattcctttaatgtaccatgaccgttaaatagattagttatttgatacgagggttggggttaatataagggtatatagaataaaatatattgataaccagttcactttttataataaaaaatcaataaattttaaaaagtaaaaactaacatgactaccatcaatctttttttgattgacgcggtgtcacgtgtgatcctttgattagctgaaaaatgagagctaagtggaatttttgagctgatgacaaatcagggcagacgaagcccagttgcgcctcaggcgcgtgcgtgacaagcccggaccacacggcgtcgtgcatgcgcgcgtgggtcaggcttaggggaaaaggaggagttgctcctggtgtcttctgccgcacgaacccgaaggtgccacgtggcacctatgtcggctggaagagaattttggcccatttgggcttttgtcttatctcaaaaattttcaatttttatagtttttgggtcacatttttgacaactttttattctttttcttttacaaatgctattcttctcaataaaactcaaacaaaattaaattcaaacaaaatatttccaacataaaatatatc

SEQ ID NO: 183858 - DNA, 707 bp, Cannabis indica
aagaaaatgcctgctttgtttatatagagattggagaatcatgggaggagtaatataaagagagtaagttttttatatatttttatttatttttaactttgtttatattttatataatactatatgtttatggttaaaaatgggatttactttagttgcaataattttttcttagcagtaccttttcttctactaacgatttgtcaacacaatctcctttgaatgtccaaattacataggtttttgagtggataattaatatatgcatattatttttgtgataaatgttccctttcttgagacactattctaacctagatatatattatctattaatattattttaaagaaaactttttgaagatttttttcattctgtatattatttcctatgctattatttaattgatgtaagttttgaatttgaatttgattagtttgatttttttttttgtagataacagtaacaaatattgggtataaattaaatttcttagagttttttacttcccttcctgattgacacggaactttaaatatattgtgttcttattttttgtgatttataatttttggcgaatttataatttagttattatgtgagttattggttattagagttataaaagttatataactttttgaaagtcatcgattattaaaattagtactcataaaatctactagaggcactaattacatttgac

SEQ ID NO: 183859 - DNA, 610 bp, Cannabis indica
tgatatcagggaattgtagcccgatactgttggtatctcatcccatgtaattgttgaagatattgctaataaaggaaagttaatggtggttgataacaccaatgtgccaggtgatatttttcaaaatgaggctttaatgattttggaaaataaaaggagaaggacacgtgtagatgaagacattaatggaagcatgggtgatgttgggccaaatatggtaactattttggggcccacaagcaacatatatgataactcgaccttggagaatcatgatgttattatgccaaaagttgatagtaactgcccaacaaactcgcatggggcgggctctggtctctaggccgccaagcattatgaatgttttgagttggaattgccgcaggcttgagaaccaacagacagttcaattccttaaagaggttgttctcataagaaattccaattttattttctgtgtgagaccaaaatgtaaataaaaaaaagagtcaaacgggtgggctgtatgctgggctatgaaggtatttttgtgttgaggtcctaaggtctagtggaggccttgcttttctctggacagacatggacgcagctctcgtcttggggtctcgca

SEQ ID NO: 183860 - DNA, 634 bp, Cannabis indica
attgaggttggaatggagtgttaatgatgctgttgttgatccaaaacatggagagggtgtgcttgaaatgctttcaccgaacacaacattgaaggagcttgagattaattactatccgggcaaaatatttccaaattgggttgggaataattcgtttagcaacattgttgaagtaactcttaatgggtgtaagcattgctcctatttgccaccctttgggcaacttcctttgctaaaacatctttctatctcaagttgcaattcggtagtgacggtgggtgctgaattttacgggaattgttctggaagaaagccatttccatcattggaaacattaaggtttagggagatgttatcatgggagcaatggaatctcaaaaaacttaaaattattaactgtcctaagtttgagggagttttgcctcacttccttccttcattaataagtattggaattagaggagataagcagtgtccattattaagtctcccaagattaccatgtatcacaaaaaatgaaaaatgtggaagttggagaattctgagtcattgtatgaggtaataaagccgaggaatcctgttccactctttctccacatttacccattaccctcctcttcagtctctaacttga

SEQ ID NO: 183861 - DNA, 544 bp, Cannabis indica
aagcttcaattatgcagtaatggtgatcaacaccaaaattacattaatcggaactgcatgatgatgaaacacacatgcgttacggaaaaatttagggagtagacttaaagcatttcttgtataaccataataagccttattttttaacttgagctagtgttagtttcaaattcacattattaaccaataaaatctgttgtaattcagttttgttagttttctgttattttaactgttttgcacctgccttgtatttcttttgcatataaataaatgccttaactcattattgagagttaagctttcaagctattctttctctgttctctactatattttctctctaaagtctttacttgttttctggttttttaccattactgttagcttgctaagcttctacacacatatttttcataaccataatttatatttatactaaaaagttttggatataatccactcaaaaatccatatggtacataattacagaagctttgttcccatgttctgatatatgtatatttcttaatgaaatcaatcg

SEQ ID NO: 183862 - DNA, 563 bp, Cannabis indica
ttctgctggccgctcttcctcaatccgggaggcgctgccgactatgagacgcgcaccccgtttcttttcgccgcgatcctgcccgtggtgttggcggtggtggtctcgcaactcagttcggacgggatcgacgtcaaggccctcgccatgattggtgtcctcaccgcatgtggggcagcgctacgcaccatcagcccgtcaatggcagggatctccttcgtcttcatcctcatgattgccggggcaagggtgttcggtgcggcgttcggtttcgtccttggcaccacgacaatgttcgcatccgccctgctcaccgcaggtttcgggccgtggctgccctaccaaatgatcgcctcggggttcgtcgggctgggagcggggctgctcccccgggcgcggggaagagccgaaatcgcctggctatgtggttggggattcgtgtcagccttcgtctacgggtggctgatggacttcgccttctggccctttaacctcggcaccagcacccagctatctttcgacccgcacgcatctccactgacgaacctgtggcatttcgtcta

SEQ ID NO: 183863 - DNA, 534 bp, Cannabis indica
attcgcagataaggtccaaagttttccactaaggaaagagggaagatttccagaagatcaccaatttcatcagcgataaactgagcgagttggggacttttacggccaaacggaattcgatggatttgaacccaaaaaggggtgtatcgaacagagtcaggagtcggagttggtgagacatccggatgggtgaagaccatcaagaacttgtcaaaatgccatggctgctcttcaagcacacggcgcctatctccatcacattggaaagaagcaagaaaaagcccagagtgatactcagaaatttgacagggaaagcgtagagtccaagcttcggtcatggctttttcaatccatgaaggtttagctggtttgggagataagagcttgaaaaacaggcagaaagcaatcggtatcagtagaggagtggatagagatgtgatcaaaatcatgaacgaggctatcttcatcatcaagagcggtaatggggtttgggtggtggaagaggaagccgatagcagagtggtaggtaagagt

SEQ ID NO: 183864 - DNA, 627 bp, Cannabis indica
gtaataaccacttacattacagtgattcgagctcgtcttgtggcattgaactttacatgttagggctaaccacattctttaggaccgtattgctctgataccatattgtaacgcccctatttcccgagacgtcacacttactagtccgtctaaaaccatttataataaaacaattaactaatttattgaaaataactaaaacatgagatctcattattttaaaacaaaacacttgattcatttataaatttttaaacaataacttttacaaaattgatcgagccataatctttaaagaaatattctcaaaccaaaacatcgtgacaatcccctaacatgtaatccatgcctcgagctcgccaccctcactgtatagttttacctgttggaaattattttaccaggatcttagatctactcacaagtatgtttattaacaccctaaatatgaactttctaaaacgatgaaataaacacatataaagtttaagaaaccttacattgggtgcagcggaatataatgactccttccattcagatatctagcccttgattcctttctatagcagagcattatcaatatctgaacctcgatctctttctctgaatctttgatgatgaaactcc

SEQ ID NO: 183865 - DNA, 593 bp, Cannabis indica
aaaaaacataaaaggctaagaactctgcaagatctttcaatgtataatgtatagatattccagtaacagtggcagggatttcagtgggctagaaatctaaggagaaaaacaaatttaataatgaatttatactttgggaattattttgtataaaatagtacactaataaaggaggttgttattagttggttgaagcttcatcactgttggaagatcatagtggagactgacagtacagccttttggtcttcaagctgtcccaaagtaatatggagatgatctctttcttatttggtcaaatagttcttgagtacgtgtaaggagtttgttgagtaattcttttttacattttctcaaacgttctaaaaattgagttaacagtcttgatgttatgtccatcgtatatttttggaggtgaatgcttcttttgaactgttatatgtttatttttaatgaagcttgaattttattaaaaaaaataaaattaaccttgtaattgccaaaattaagtgtgaaagaagatttccaatttgtgttcaaattacttagtaccgaaaaggcttaaaccttaaagcacgttgcctacttgaaat

SEQ ID NO: 183866 - DNA, 1091 bp, Cannabis indica
actcctatcacttcaggatagtttttattattttctaatcaaaattttaccccaacttccctacaaacctacacactatctacaaagaatacaaatctattacgtttgaaattatgtcttagtatgtgagtgtgtgatggtaatttaggtacaatactcataaaaaaaatatacatttaaataaattttatttgaaaattaattaagttaatataaaaaaaatgggtatttttcaacttctccctactaatttcatcaacaaaactgcagaggcttgagatttggactcttgtcgctcaaactataaggcctgtctctaatagagctgggctattattattcgatgggcatgggccttgacagagaaaggtttcaattttttagggaactttttcaagaatagccaatttttgatactttctttttcattttttatcatttttacaaccttacattttctttcttaaaagtatactttcctaaaaaaatttaattttatgacaaacaaaaatttatatatcaatgtataccaattgttttcttaaaaatatataccttactaactttaatatagactgtgatctaaataaatgcaacagagatttcaaacaaatatcaaatattatatactattatatgagtacatacaacaactaaattctcaacatatatcagatatataccaagcatatgcagtttacaaagtaattataacaaaatgtctctttaaggtaattttgcaataaaatatattgtttctactttctttaattaatcaaagcaaaagtagcatgccaaaaaaaaaaagtaagtgaaaatatggttgaggaatgagagttccatgaaaaaataaaaaaataaaaataaacacatatttggcgtgctttccataattggctcctaatcctaagtaataggttaatttgttttgcagggacattccaaagtgagaaagtgaagcaaatacaaaggatgatgataaatctcagctcaatgagcatgagtgaattcattgctatttaaggttttttacaaatgattacagccattggatacaaaggacagatggcagcagattaaacaaaaggata

SEQ ID NO: 183867 - DNA, 767 bp, Cannabis indica
  modified_base (655)..(655): a, c, t, g, unknown or other
ttttgacaaccaagtacttttagagtttaagaaagtaatgatggcgtaaataataaaatcataaacaagagatttttacgtgattcaggcattaactatccttagtccatgagtctattttattaggctcattggtcggtggctatttatacaaatacaaatacaatgaactttttctctgttccaccgttttcctcttgaataagaggacgcttagtaggaatattcaagagttaatagaagggttactgtaatgtgttgaattgatgaagaatcagtttccaatctaaaggtaaaggtccaaaaaaaggaatcccctttttgttgctatctgtgagatatttataggccaattctcttgcatgggctattgttggataggtcaccgtggggatgaaatcccaccattagattggtaggttgcgtatttcctatgtggcttataagggtgtcagatcatactggttgtactggctagacctcgaacgcgtgtcatcctagggtcattcttgttaaaatttccttttctcctagtcgttggaatgtttagctcagtacatgaggacatgcatgctttgcacgatagcgtgtcatggggggaaaacctctgacattgtatggaaaacaacttggtccctacggtctgtgcctgacncgtgtggataaagggtctcgtgcgtcgaagtcgtacctacgggactgggtgtgacgctatgggcatgggtcatgtagatcccacatcccctcgcggcaggtaaacagtctct

SEQ ID NO: 183868 - DNA, 795 bp, Cannabis indica
gaaaaaaaacaaacaacatatatatatatatatatatatatatatatatcatatcagaatctatcgatatcaagatcaatttagaatcttctaacatctaataaggttgccaaaggaccctaggtaactaattaaattctcccaacttaattgaaactaattttaaaaaaaaataaataatctatatgcttttctacttaattaataaataaaataaggtttaatttggaacgctttgggtactggggttgagcttaattaaattggactttttttaaaaaaaaaaaatcacattataaaaactcaattgaaaataattaagaatatcattgatattgaacacataatgtctaataattaaaatgtgaggaaaagtaacctttataaatatctctcaccaatttaatattaccgtatactattatgtatgattgatcaatcttacagggttggtctctgctgccagaagattgggttaaaatcaactgtgatgttaaagtcggaggtgaaactatgtatgttgttgcgattgcaagaaaccataacggatcagttttgtgggtggcagcaaaaaggctacacttctctgactcacttgctggagaagtcgcggcctgtcttttagctatggagacggcggtttctttgcatcatccttttgttttggtggagagcgattcagcgattgtaatcaagaacctaaaaagggataaccctacttagggggattgagaactatgtgcgtccctgcaaactcctctctacttttatgactaattgtaatttttcttctat

SEQ ID NO: 183869 - DNA, 685 bp, Cannabis indica
cattttttctaagattaatccttttattttattaaataacctagaaaataaaagacaagctgtagtatagagaacttgagagttctaaaagcttttcatgcaacatggaagatgagactgcgactcacttatttttagagtgttctttctccttggaatgtttggagaaggtgaaatcaaagctgaattggagaatggctgccactaaattagaaagaattgtaatgtggataaggagggcaaaattaagtaaagtgaagaaatcaatttttgttgttgtcattgcagcccttatctatgaaatttggcgcacaaggaaacaatgtttaatggcagaattctaatacaaatgtagagattgttattgttaaagtgaaaaacatagtgaaaaaaaaagaattacatgtatatggccaaaaaaagcaactagaagtgagaaagaatggtttgataccttgtaaaattttatagatatttagattgtcctacttggagaatgctattaggttgtataaaaagtttttgagcaatacacatacttgattcatacaaaaaaaaaaaaattaacctacatattattgtttgagttattagatttgtttattagttttatttggttagatgattaagaattaatatcaaaatagaaaacctagcacaatctatcaactctctctctctctct

SEQ ID NO: 183870 - DNA, 581 bp, Cannabis indica
gagactttgcatacgcagcacagcttgtgaactcaactgtgcctctccatgccttgcaatctgccattgagcttggagtttttgatatcatagccaaagctggtgatgcagccaagctctccgcgcaggacatcgtggcgcagatgcctaccaccaaccctgatgcgcctagaatgttagaccgcatcctcagaatgctggccagccactctgtacttgcatgttctctggagaatgaggatctaagggtgtactgtcttaatgatgtttccaagttatttgtcactaatgaagatggtgtttcattgggtccactgatgtctttgttgcaagataaggtcttcttggatagctggtcagtacttattattttttttttactatttaaaaacattggcgtatattggcatgttgtttagttcatgttttaagctttagaaactaattagactagttaatttacaaacaattaatcaacataattttagtgtaaacttgtatgccttcaatgaatgagcaggtcccagctgaaaggtgcaattcttgaaggaggaataccctttaatagggtccatggcatg

SEQ ID NO: 183871 - DNA, 643 bp, Cannabis indica
tactatatcatctttgttgatgatttcagtcggtttacatggatctttcccttaacagtcaaatctcaggcattctctatcaacctagagtttaaaaagcttgttgaaaaacagtttgaacttcccattaaaactgtccaatcggactggggaggtgagtacatgatttttgctaagtttcttacctaacatggcatctcatttcaacacccttgtccccatgaccatgagcaaaatggtagggtcgagagaaagcatcgacacatcacaaaaactggactcactctccttgctgaatctagtcttgacttaacacactggtggctagcttttcaacattctgtatatgtcattaaccggcttcctacacctgttattaacgatctctcaccatatgaatgtttatttcacaaggagcctgactacagctttctaagcccttcggatgtcttgtatccacacctaagccatatcaatctcataaactcgagattagatcagaaaggtgtacattcgtgggctattcgatgcagcacaaaggatattgtgcagaagtccaacggggagaacgtatattgctcgcaatgtcatttttaatgagcatgattttcccaacaacatgcatcagcacatcaacaggtac

SEQ ID NO: 183872 - DNA, 658 bp, Cannabis indica
catttataatagattgactttttatcattcacttacattgtgattttgtaatttctttgtgtgttttgacgattttttagggttcaacttttctcaagaatatcctccagtcatagtatctttcaattagacgtcttttttctttcactccattgtgattttttgttcatttttcagtgttcaacttttcttaagaatattctcataattagtgtatgcatcttctccagtcccaacaaaagggagttaacttggcatagtatctttcaatacacaactttttttctcactacattgtgattttttgtgaatatctttacatggggtgttcgacgatttttcagggttcaacttttttgaagaatattctcataatcagcgtttacattatctccagtcctagcaaaagggagttaacttggcatagtatcttccaatagatgactttttatctttcgctacattgtgattttttgttcatgtctttgcttggggtgtttttcgaattttcagggttcagtttttctaaagaatattctcatgattagtgtttgaatcttccccagtctcagcaaaaggaagttaaatagaggactttttatttttcactaatttgtgattttttgttcatttctttgattggggtgttcgacgaatt

SEQ ID NO: 183873 - DNA, 708 bp, Cannabis indica
cattgacaattacagtaagcttaccaaataaagcaccatcagggctccatataacccgattcactgaaacaccaggatccttcactaaggcagcctgaatttccaaatggacagagttatgcaccaagaggaatatgataaagaaaaaagagaaaacatgaaaataaaacggcacacacctgcagaggcactgaacatgcaccgagatcccaaactttgaagtttctcaaaaccaatcgttcccttgaaccaacttcccacaaccctatgtcacccacattggtgccaactgaagcatgaaagtgaaagtagaatatgaagaatcaatcaaatggtgcagactgaaaaagaccaacgatcatgtaaaaattattaagtaatatgaaatggagggttaagtgctaaattgaaagaccaaccaagaagtagagtctgctgaacagggtgaaagtccatgctcataggagatgaaccctgatttaaagtccttgtaacagttttgggcaagtcatcaggagcattaaaagcctgactatgaccatgtcccggaaatgttgtcagcacattaacaggtagattcacctgcataaatatacaagagttaggaaaaagtatagccaaatactactctttgttttgaaaagtttcactagctttgactcagttgcatcactcatcagaaattcccattggcctagttctttttga

SEQ ID NO: 183874 - DNA, 563 bp, Cannabis indica
gagaagtttacatgcttcaatctgttatcaaaaactcttgaaacaacctacacaaccataaaactaataattggtacaacgataattagttaatacaaaactctttcgttgcgtacctaatttagtaacataaaactaacaactggtattattatacccatatttcgagcaataatatggtattgacacgtgtaaaaaagctagaaaataaactagcacgaattataaagcaataaatatgttcaaacaactcccctcgaaaagtacagtcggttgaaatatttaaattgaccttttttaaaatggcgagctataaatagtaactactggttgatgagaccagcgagatgaacaacaaacaaataaggtccatctcgagatacactgaataaaaacaataaaatgactttggaaatggtagataacgaattattcaaagagcccacatctcattcacccacatactcttgagtatgttgaaagactaagggcaacattctcagcatggttcatctcgcaattgtcatactatgacaagtgtcttgcatctgcttcactcaaca

SEQ ID NO: 183875 - DNA, 590 bp, Cannabis indica
atattttacactcaattaatagcttaataacttaaaggtcttgagttcgaacccatgacctctccctttttctcatccctccctcaccactaagctagcattagtgacttctaaatactatgttttagttacaattaagtaacattttattgtgactaaaagttacatttagtcacaaaaaaaattatattatagctaaaaagttatcataaaaaagtagtaattttttatagtggcagaatccttgatttggacatagattaaagttttttaatctttttctttttatttcatttcatttcatgatgttggaagttgtagttatttagaattatttgtaaattttaaaaaattatgagatactaaaaataaagttttcttgaatgccaaagagataggtttctaccgttaacacttttttataggaatgtagtattgttcagaatgtgaagagtggtgaagaaagtaacatagggtaaatgtgtggtaagatatatggaatttaatctaaaaattaataggcaatggagagaatgagtagctcatatatttgtaatgtgaaactctttaacatttcttgaagatggtag

SEQ ID NO: 183876 - DNA, 605 bp, Cannabis indica
aatatcgctagtcaatcgcaagacgacacgtttaaaaggtgttaggcgccactggtgcctaatagcaatgctccaaaaaaaaagattaagtgtataaaaattaaaacaattttcgtggctaattgcttaataaataaagagaataatattgggtaagagacttggctacgaactagggatggattggagtagtactaaacttgctagaccgtcgcaagatgaatatgagagcttgcatataggagtgtaaatgggtcaggtcggatctcatccggctatgatccgacctgatccagatcatgtaaagatctgccccgccccgcctcgccccgccccgctagatcagatactttgatcggatcagatccgacccgacccgacttattcggatcggatcctaatccgacccgtactctttttttttaaaaaaaaatatattaacttataattatatatatccattctaattttgaattagtattattaaatacaacactatggtccgggttcggggctgggtcgggtccggtcctggtctcgagtcccgggtccggtcccgatcctagtctgggtcccaagtccgagttcgagttacgggtttaggt

SEQ ID NO: 183877 - DNA, 515 bp, Cannabis indica
catagtatttctccaaatacaagtaaactcttgttgtagattatcatatcagtaaaaccctgtgtctgataaatctaggaaactttattcacatagtcatgtttactttccaatgtgttgacgacacaataaacaggatcaagtatgtgaaaagggtttcagatgaatttatacattatgtacatataatcatgaaataaatcatgtgaaccatgcaacattaaatgttatttctgatctatattaataagtaaatctgattatattgaaatgagttttatttagggcataaaacccaacaatacactgtcaactcaggttaccaccaagcccacagtcagatccatcaaaatgacccaacaccttcggataacaaaccctctcatagatggtggaaatagttgtggacactccctttgcctcccaaactgaaacacttcttggcgtgcttgtcatgatatccttcctaccaatcgcaacctttttaaacgaaaaatcctccattctccacattg

SEQ ID NO: 183878 - DNA, 542 bp, Cannabis indica
tttgttttctatcgatctttcactccatcaaactctcactttcccgtctcccatcttttgtagatgaacccttgaattttttggagaggcagacaccatattgaccagacttactacaaattttatatgaagattatcatcggctctgtgcaagttcatcatcatccaacgatgatctgtcaaactctagttttgaagcctggggagataagtagttaacaacgctatccctagagcccgaggtgcaacatcactggtaccccaacctaataggtggagaaggatacaaacgcttcatctgagagttaaagaaaggttagaggcgttatttgcctactttttggacgtacagagtctagcccagtattgttgacactctgcgtaaaggtcgtgcaaccatatcttctaagggaactgtcgttgctgagtaaactgtaaccgttgctcagccaaaaattgaacctaaacttttctccaagcatagaataatgatgcgaacaaagcaaacaatgaggaaagcttcaaagagagacccacacttt

SEQ ID NO: 183879 - DNA, 583 bp, Cannabis indica
gcggattgggtctaccgaatgaagtattttgtattctgagtttttgttgcctaagacagcatgtaaagatgacttgtaatgttttgtgaaagtttttacgggatctcgaaacatgtatactcttttggaatgtttgtaaaattaaataattacaagttatattttcactatgtaatggatttaaagtttaaatttctgctcttaacactcccaattaaatttttaacaatattaaagtgaaatgttaattataatctcttagttactttctgcatttgaaatcacatgttgaatttttttttttcaaattttttatttttatagttatattcgttataattataatatcatcgatgtattttttttttaaaaaaaatctgaataagttaactgaaaaatagagattcaaatattttattgtaccataggtgttaaaaaaaattcaaacttattttacgacatgataaattattcaaaacatttaaaaaatttaaaaaattaatcttgtaactatggtgttaattaacaccgtcgaattaaaaaaaaagaagcttacatttaaaaatgtaatagatgtgtggga

SEQ ID NO: 183880 - DNA, 605 bp, Cannabis indica
gaaattttaaaaaaataattataattaagtgttaattttaaaaatattaattgttaaaattaaaattttaatccaagaccgataataaaaataattagagtttctgtaatttactatttaatgaaaaaaatatcttttttatatattatatgaaaaatatgtatatttaatattacttttatcgggataagttgaggattaatacatctcttttgtatccatcaatcaaaaatactctcatattatatttcattaaaatttatccacttttattagtggattgtctaatataccattgtcctccctttaagtgtagcacatgatttacattaacctaaggggtataatggggatatcatctataaaagtgggtatatcttaaagaatatgaaaatgaaggtaaaaattaaaacaaataaagtaaagtgggcatacaatacaattttctcacttttatctctctcttaacttaatttttttttttttatttctctctgagcttttggcttttttttttttttttatatgtaagagctgcaagaataaacattacaaacaacaccaaggagaaaaggaacactaaatgttccccttagttgtccctc

SEQ ID NO: 183881 - DNA, 736 bp, Cannabis indica
ggaaaaaccagtgttttctggtttgaaagttatcaactttgttcttttaaattaatatataattaattgttctttctttccatatatggaaagacttaaactatcgtaataccgtagaaccttatataaaaatattttatttaagaataatcttaatttattataaaaaaaatataagtctcaatttgagttaattataaataagaataaaaataattataaattttatgaaattttataatttttatttcaaatatagcttttttttacaaaaaaaaaaaaattaatgggaaaaattaaagaaaatgttgaaaaatatgagaaaattagataagggtaaccaagtatccttagggtaattagagataaccaataaccttatatacttatactgtttacttatggcgacgtttggtaatatttttattttttaattttaatcacaaaaatgaaagtaaaatttgtgtttatataattttatttttaaaaacaaaaatgttttctataaccacatttgttttttaattttaaaaacaagtgtgttttataacttttatttttatttttattttttattttatttaagtcgggtccacgttcaaatctggggttgggctgtggtccgagtttgggactggggccgggatcgaagtccggctcccaggtccaagtgttggaaaaaattctcattacaagagagaataggaggattacaatcaaaaatactcaaaaatac

SEQ ID NO: 183882 - DNA, 529 bp, Cannabis indica
gaattgtcacatagcaaagagtgtcactttaagactttccatctatatttggatcatacatcttttaaaaatgctactattaaagatactttaagatcttgagtgtggctaagactttataaacaagttgtatttctgtaatattaaacttaataggccgtataaatatttataaagtcaatccatcttatttttataatttatttactttattagttataactaaaaaaaagtcctcaatttttctttatcacacttgtttgattattttttttggtgggtggaacttggtttgtaattataaaatagttatgaaaatttttacaatgaagctctaaaaaggagtcaactgatgtacattttatttattttaatatctgagagaatattttagatttaatttttttatgaccgtccacgttatacgccgaaaattttttgaaattcaaaaactttaatacgcgaaaataaggttaaaacagtctattcacatgcttaataaaataaaagaatcttgagtgcaacatac

SEQ ID NO: 183883 - DNA, 682 bp, Cannabis indica
actctcacccaccatcaaccccaacccacgaaaacccttacccacgatcaaccccaacccgaaccaccctcacccacggcgtcgaccaccctcacccacgatcaaccccaacccgaaccaccctcacccatgaaaaccccaacccgaaccaccctcacccacgaatcccaaccccaacccgaacgacggtcgaagcccaggtcaccgtcggtcccatgaatcccaagccccctcatcaccgacggtcgaagcccacgaatcccaggccccctcttcaccgccgatccatcaaatcgaaaaaaaaagaaagaaaaaaagccccaggtccgatggtcggaccatgaggtccgaccaatcggacccatcggacccatggtccgaccatcggaccccctctctctttgtctctctcaaatcgaatgaaaaaaagaaagccccaggtccgatcgtgtgggatgccgagattagagagagaaagagagattgttgtgagagtttgaaggttatttttggggttttgagaaaaagtgtcatattttttttagtttaaaatgtattggtttaaaaataaatattttaattttttaagtatagaaaatcaaattttcccttgtagtttctgttgtggttccagtcattattgcaaccttgctactagtcgttagctgttatttccttggaa

SEQ ID NO: 183884 - DNA, 731 bp, Cannabis indica
attatgaatattaatactaacgaaagtgacgaaaaaataaaaaggatataataattttcttataaaaaatagaaaaaaataaattgattgggggtagaaagagagaaagaagggaagcatagatgatattaattattagactttagggtttgattatgataattaaaaataagattgtttacgtctatttatatacaattaggtatattaggttaattatagtatatataactttttatattaattaatatatttattaataaatattgatttatagctgtattccgttagttttctagttttttttttttgtttttttaaatattaaaaataggagaaaaagtttatttttcaataaaaatatgaatttaaaaaatagtaataaaataataagaaaataaaacaatatgagcatgatatttttaaatatcaacttttaaaaaaagaaaattaaaaaaaaaaaaaaccaacacacactaacaggtacgtgtatgttcttttagaaaaaattaaaaaatttaaagaaaagatagaattaaggaaaaaaaaaaaagaatttagagcattttgagaacgccacgtcaccacctaagtatacttctcctatgtatagatttcctatgtatatctatatctatctatatataaaataaatggccagaacagattcctccgagtcccatatttcattttcatcctccacttctacgaaaaagccccttttttcttcc

SEQ ID NO: 183885 - DNA, 790 bp, Cannabis indica
aacatatttatgagtcaaaaaactcaataagaaaagcacaaaacgtataacataatactgacttgtatctaggcgctcatacacctatttataaggcttcagatacattaagaatgttcctaacaaaagtacggtccttgtaccgcatgcactaactactcgtcccataatagtgttggtagggctgaaccgtacctcgagtaccactgagtactgtaccacatgcactacgtactcgtctggtactagtgttggtaacactatgtcataccctttgaacatcatatacttgtatcaatacactccgtaccacaaccgtactagtgttagtagtatacaaatcataaatacaaaatgcttaattataatacacgtacacatatacatatacatatcttatgctaatattacctcatttcctaattcaagtgtgtcggtcaacttgaatagaaattcatgcactgaacggaggtcctatgatataatatgcaaaaaaggtaaacaacttgctaaaacttttccgggcactaaacccaaactagaagtttccctatcgataaatagcatgataaaaccctaaaatatcaaggaaacacacgaaaaaaaatgagaatgcaaaatttctgaaaaatggtaggctgtttctctaaaaacgacacactatttttctaggtaatctccagtaaaaatatccttttctgctgcagaaaataaaacgttcaccataacaactacaaaactcgacccccaaaaaatctttcaaaaaactctcaaacgaacacttaatacg

SEQ ID NO: 183886 - DNA, 524 bp, Cannabis indica
cggggtcttgctatgtaggctagggtgactaatttgtattatttcttttctctccttatttgaaatttaattttctatgtctagtttccagaagtggaagccgattattgattttatatctttctccctttggaatatatacattcaatgctacaggtttctcttgcagcattgcttttactacatcccacaaattttgataagttgtatttttcgttttcatttagtttaaaatattttcaaaatttctcgagttctttttttcttttttgaggtggggtctcactctgtcacccaggctggagtacagtggcatgatcatagctgtattagtcagggttctctagaaggccaggactaataggacagatgtacatatgaaagggagtttattaaggagtatcgactcaaacaatcacaaggtgaagtcctacaataggccatctgcaagctaaggagcaagaagccagtctgagtcccaaaacctcaaaagagggaagctgacagtgcagtcttcagtctgt

SEQ ID NO: 183887 - DNA, 667 bp, Cannabis indica
tatattaagtctactgtataggagttatagtaaatgacataattaaatatacatttgtcaatatggctaacctctatattctcaatatggcgagatcgaacagtacaatatcctaaggaagtgtgcatctctaatcttagagtctccattaacattctcccgcttgcttctccatcctcgaaattctatctagaaggtggccgaagaattaaaactcaatgaatcttatcaccaccacccatacggagatccacattggagaagtctacaattccaaagctattatttatgatgtcattagatcgttgccaacatgcaattaaatgatgggtaaagatcatcttatcgttccttcaatcgtttaagaaattgttcaatggccaaagttctatatcatcaatgcgattgacatcaaaggagttgatcggctgatagatttgagtttgagagatggatagtatataacagtaaggaaggagaaaaattataattttattattataaaattataaaattagaaagtaattcgttttttttaattaataatatacaaggtggatggtagaggtagatgaaaagttagcggagataattaaaaaaatttattttgattaaaagactaattaatttttttttactaaaactatatttactgatttattacata

SEQ ID NO: 183888 - DNA, 616 bp, Cannabis indica
tcacatacacatttaaataatttaaatttacaacttaaaaatataactctgaactaactcaacaccacagccccaaaaatatatgagaacaccacaaaacttaactcaaaacctaggaaaataaagagaataaggagacctaattacctcaaggcttaacagctcctaaaccagattattcaactaggaaaagaggtgaaattgatgaagaaaacctcttgcttttattgggtttctagagtttgaaggagggaaggagagagagagaggattatctaggttttaggttttttttaatttttaacttaattctaatataaccaaactaataaagcaaaagaattaatcctgaaatataacctcttttttagcctagaaaagtcaaataagacaaaaaaaaaatctaaacccctccaaaagactattttgcccttcttaaaaccctaaagcttaaaatgaattctagtattattttggttattttttagctttcccgatttaaccgacctctcaacattctaaactagtccggtataattccaatacatcacaacttctaacgccgtgacatttctgaccactctgtcaagtttccacggtcgccaaacctaaaata

SEQ ID NO: 183889 - DNA, 1069 bp, Cannabis indica
caagtgctcataatcatcatcatcatcatcatcattatccaccaataaataatagcattaacattcaagagaatttagtaagaaagaaaggaaatggcggattgggggcctgttctaattgcggtggtgctgttcgtgttgctcatgccgggactgctgtgtcaggtgcctgggaacagtagagcagtcgatttctgcaacaggcagactagtggcctttccatgtttgttcactccattgtattttttggactcattgtttatcttttttattgctattggtgttcatatctatattggttaattatttttttttattctcatatctcatctacaatattatgtatttttgttctttattagtattgttatataattaataaattaaaaattataatttcttaaatataaaaagtttgtgtatgatttgatgatgatctcttgattttgttgacttaaaattaaaaatgtaagtaaaatacatttcttaatacgtttcttaatacgttgcatgtaggaaaaaaaaaaagtccaattaaaatgcttaaattattcttaaaaaaatatttttaaattttattttatttatccatacaaattcatatcttcaaaataagaaaaattatttgaaaatttaacaaaaatataaaattaattttaaaaattaaactaaaaaatattatgcttacttaaaaactcaaacttatactatttttacacaaattaaaattttaatatattttttatatctaaatagggttttaataaataataataaattttttaaattgtttaattagtttaaattaattcttaaacatttgaaataatattttatttttaagatttaaattatttttaaaatttaccaaaagaaatattaatatttttattttatttaaaggataagatttgagagttattaaatttaagtgataaattgctaatttataatatagattactaccaaaaaataaagtttcaaaactaaatttctgtaaattgtaaaagttacaaaaaaaaaaaaattaaataattaggtatagtgtaaaggacacgatcgtgataa

SEQ ID NO: 183890 - DNA, 950 bp, Cannabis indica
ataacaatactctatttttgtagtatataccaaattttacatcataataaatattactttttttgtttactcttttgctactcattataatgtaatttttatattttattttatatattaataggatttttatacactttcaattaaaatttaataattttgttgactttcttacacctttctataaaaataaaattaattttacccttatacaatggtaaaattttgatcaaatataatgtttgactcatttcttgatgtaaatttaacacaaattttgtaccattttttagagatggtctaactagttagttaaaaaaaaaattattaaaggtttgttgtagtttttcaaaatgggaacatcaatttctataattaaaattaacttatataataattaaatttatagctttccattgagtacatagatacataaactttcaataggcaacatatttagtattaaagaaagaaaaaaaattcatatctagtgtttatagacctaagaagtaattaattataatgagattgatcattcaaaaagattataatgaaattgaatcaagcaatatctagtgagtctcattcatcctagttgcaattctacacaatgacgttgaggagggtgaggaagctaaaagatcactctcgatctttgaaaattattcttcatattatattttagtttaaataaaaaaaatatactaagctaaattaggaaatctataatgtaatatatatgtactttttataattgatagagtaatttgtctcttatttccactagttgaggactttgataaagaattactttttgagagttactttgccacttgtaaaaatatattttaatagaaagatagtgtgttataggtttatcttttcttcttacccatacttttaaattgacatagtagaacccttagatatcaaagctactttgttttcaa

SEQ ID NO: 183891 - DNA, 867 bp, Cannabis indica
gaactgatacatactaaaaggttatcacagttccaaagaagaaaactataattaaaagacatttgtaacataccaaagcatgagctccaaatggcataactcccccaaaataaggctcagaatatgcatatgatccacaaccctgtttacaccaaatcatattttcacaaattcagacttttaatttcttgtgtgtatgaacatgcataaataggggataaaaagatacaattgagtggctggaaagctccagctgggtatgcggcacaagatactcattcaccggtggtggcggcggcggtggcggcgcagccgaagaaacttgctgctcctctccatattttccatctagccaagccagtagacatgtttataacacatgaagagagtaaataatcactaaacagtttaattagagcagagatatatttatactgaatactgaattttcacaataattaaggttgcaatatgtgctttaacacactaaattcacacttaaaataacaattattaatcacaaacatgcactcattttggaaaatcccaagtaagaaaaaaaaaacttcaaagtagtaattctatacctgattgtatcaagtctttatgatctggcctcatttttagaccccagacccagtaccttgattagcttgagaagaagaattggtggtttggttgggtaaatcagcatttaaagtagtgtttggtggagcaaagtcatcatagtgatagtggttgttgttcctccaaacaaggctttagaaatggtttggtgatgacctatacccattaccccaccaaggttgagaattattacctaatatttgtactgatccctaaattttgagtactagaaatatttag

SEQ ID NO: 183892 - DNA, 553 bp, Cannabis indica
aacgtcaaaaaaccagaaaaaaaaaatgcagaaaacaagcgctagatgggtcagaaaccagaaaaaaaaatgctatggtcgtgggttgtcttgggtgcttctcgtgggtcgtcgtgggtcgtcacgagtcatcatgggtcttctcggtcatgactcgtcttggtcggttggagctcgtgaacagtcggggcttgaaaggtttggggctggatgggaataacagagaggaggggggggggggggggaagttagacagagagagagtgtgagaagagagtttttgaattgtaaaggtaattttggggttttagggtgtttggagaatatttagagtattattttaaaagtagtatattaaaagaatagtctaaatttttaagtatattttaacaaattttcctttatataagggtatagggacattcacttttgtgcttagggactatttttttattttttgtatatagagaatttttaagttaattttttttatatgaggtatattataattatagtaagaaacctgcctattttcataaatatttaaataatt

SEQ ID NO: 183893 - DNA, 722 bp, Cannabis indica
gcgagaatttttttttaagttttttccttattttttcggtaattaatttttgaattttttggtatttttatgctgacgtggcacatcggtattttgcgacaaaaaaaattttgtttagaaagttattttttgtaaataaaatcaattttttggtataatattaaaaagatgcctaatataaaagctatatatttttctaaccctaaagcttatacacggcagccacatctctactcaaaaattaatttttttttttttcaaactttctcttgctacagccgaaacaatggtgggttttcaaaatttagggtagggttctaagaattttctggctcttctctacttgtttttaccggaaacactaaccccagaaaaataagtcttggtccaaacacactaaacccgaaaagaaaccaacccagaaaataaatctcactaagacaaaaacaatactttatcaaaaatacagagattaagattagaaatggtatagatgaagacaccaatttgatcttggagttcacctaatagttaccggctacttttccgtgttacctcagagcatgaatccattcatcaacaaaaggttacagaagttttaatcttgatttcacagtcgtagaacaatataataaaaaaattaaactaaattttttctagaatacttaataaattggggtatatcacaaatataccataatatagacatataagacaaatat

SEQ ID NO: 183894 - DNA, 591 bp, Cannabis indica
caaattattattatttcctgtagtatagaaagtattatagaaataatattttcttagtgtgttatttttttgactatttaataaaattagtcttatctaattagcaatatattttttagttttagttttatattatatattatatattatttatatagtttttagtcatatgataattttattttaatgtcacatagttaaatatttaattgaaatggtgtctttaattttcaaacaaaatatttttttcttttaataaaaaaccaacgaaaaaaataacacaatatatttatataaaagagtttaaaagtgatgatgtggcatcttatatttcttttcatagtatttttaccatttttgttgagagcttcaagttttgttgaatgaaaaaaaatataacaaactttgtaaaaaatttcacattatttagaaagtagtgtggttttcaatatcaatatatttatataaagaagaattcaaaaagtgatgatgtggtatctcatatttttttttatattaattttactattttgtgagagcttcaagttttgtctaatgaaaaaaaaaatactactaattttgtaaaaaaat

SEQ ID NO: 183895 - DNA, 609 bp, Cannabis indica
ttttttttttttttttctaaaaaaaaaggttttatgaatctcaactcatgagttgttaatattgaaaaaaagctcacatattggtgtgaatataaatctaatcaaaaaaagaaaaaagctcacgtacaaaatacaacaagttataatgttgatgtgttttgctctttgtcccattatatatatattgttattatttattatttttaaagtttgttatctttgctttttggtttctttcactttatttggtcaaaagctttgactcgatggatcagcaagagttgagccctatttaattatatatattgcatatataattataaaaagttcttgcaaatattcctttagctttctaatgttataatttacagaatttatagcatttaaaacttatgctattttaatatatatatatttatagcattgattaacatgattcctatttatatataaatatagtcagtaatatatatacatagggaagatttaaggtaggacctatagttttgtcctcataccatagggaagtaaaataaaccaatcaaaatatagaaaaaatgaaatgtaaatagaatcttttcaatgatgtgtatgagatcatgtccatac

SEQ ID NO: 183896 - DNA, 785 bp, Cannabis indica
caacgccatcgaatctgcgaagcttaacatgtacttccatatctcaacttgacctctcaacactgcgtcctccccatctgcttccatattatttattacttttcgttttttttttttgttgggggagaaaatcaatttggaagatggatagagtagtggatactgggtggaggggttatatgtagatgttctgagaatgtgtccgtgtagaaaagtgaaggtccttgtaataaaaaacaaataagaggagtgttaattacaatctcttagtcaactttgtgtccgaaattacatgtaggaatatttttatttaaattttttttcatagcagtttttgttataggtacagtatcattcttgtaaattttttaaaaatttttagtaatagtttacaatgttgaaaacaaaattcctgatattctagtttaccatgcgcgtttaaaaaactttaaaaatattttacgtacggtaaactattcaaaaaattttaaaaatttacatggatgatgttgtaagtataatgaatatcgccatgaaaagaaattgaaaaaaaaaaatattccaacaagtgttttcaagcacagagattgtaataggaggttaataatattattaatattagaaaaatgttaaaaggtacaataataatatgtatcttgtctaatgagtaattatatgcacataaaactcatacataaatttatgtatcaagtcattttttatgagtgtgagactctcatacatcaaaacaattgaagatattaatactattttgcaataaaaaa

SEQ ID NO: 183897 - DNA, 525 bp, Cannabis indica
ctttgatttctcctaactcccttgttattgtccttgacagtttcaatgcccatcttcttttttcttctggttttcctttgacttgctcaccaagcttcatcttcttcttttggagagtttcaatgagtctaggtagaactatacattcgcgtcatcgcttctcataatatcctctgcaacctcagcagggttcacctcaaccttcttgatcaactcaacttttccaaataaatggtgatttttcatctgaagatagttaaaagcaagagtcttaaacccaaatggtgtgcagtaagacatgttgatatattcatgtccattcggcctggtctcaacagggcagggtcaagtttgcccttgtaattgttgtaaacactattattctctcatctctacagcttgaccataacccatctatgaagaaactcaaccaagaacatagaaaacaaacacaaaacagagataggaataagcacagaaatgaggagtaaatgctatagcaattaaagtgaattaaacaaacat

SEQ ID NO: 183898 - DNA, 593 bp, Cannabis indica
taatctgatctagaggtgttatgataaaactgattacgtttattgtatctgttcgtgtataggaattgttttcaaattggttatattaaaaaattatcaaaaattgagctcagaattctatttatatactattttaatacaagattcattttatctttaaacaaagtccattcaatgacttttacaaaatacaaaatccaaaatagtattaagtcttttaaaaataccacatatttttttaataatatgcaaaaaaaaaaaaaaaatctaaggcccactcaaccttaaggctaatcttgtatctattttcttggatcaaacaaaaacaaagtcaaaatttaatttaattaagacaactacatgaaaaaattaaaaaaaaaaaaacaagtgtataaaataaatttttatataatattaatatattattttgaaatattttttaattcatttttatgttaattattgaattttaggacaatataacatttattattttagtcaaacctaaattaatttgacttaactaccataatcataaattgcaacaagtatcttttttttctttcttttcttttcatttttttttttttttg

SEQ ID NO: 183899 - DNA, 619 bp, Cannabis indica
aacaaatataactaaatactaattatagtgtcaatattcaatattccaatccacatgcttgcaaaaaaaaaaaatatatattccaatccccattctctcaatattttttacaattttctttatgaaaaatttaaataaaatattatttttgaaaattttcatacatttttacgtttaaagttatttttgttgttcataacaaaacaaaaaaatataagaaaactacataaaaataataaataaataacattcaaacaacataaaaaaaatatacaaataataaaaaatcaacaataaaatacaacataaaaatacataaaagactgtattttatgcaataaaattttaaaaaccgtacaaaattttaaaattccatacaacatatttttgtaattttttgttgttttttgtatttttttaaaataattctttttttttttttaatttattgtataatcacctttattagaaaaaagaaaaagaaatcaaactacgaaatagtaagaattctccctttcaaaatctagaaaaaataacaaaaagtacctgtttactcctcgttgccatagggtacctggataccctacctgatttttttcatatttttcaactttttctc

SEQ ID NO: 183900 - DNA, 514 bp, Cannabis indica
ataaaaaaatttaatttatattatagagttaggttaaataattaattaattaataaatattatatataataaatttttttttgaaaggttatagacgtgtatatatgagccatcatatatagattagtttttttttaaaaaaaaaataattatatataatatttattgcaaagtttcttatcttattttcataattttaataagttattactattcatatgaataatagttaaatttaacttttttttagttttattttaaagtttcctttcttgaacatatcatgaataaattaattactagtgtcatctaaataataatagggttaaaaaaatcctcctactaagataatgtactgttattccatgtccaaaaacttttagtggcatctataactattgtaacatatatattagaacactatacaagatcaagaataagttttactagttttgctttttttgtttattatattatatatatgtttaatcaaaatatgtctgacatgaagatt

SEQ ID NO: 183901 - DNA, 510 bp, Cannabis indica
gtggcattggccatagcccgatattcggcctcagctgatgaacgagaaacaataggctatttttttgacttccaagagacaagagaagagcctaaaaaacacaataaccagaaatagaataccttgtatcttggcagccaccccagtcctactacaaaaaatcttacttttagtcacaacgaaatttgtgaactaaaaataaaaaaaaattgtggctaattataaattattattattgtgttgtgactaaaaggtccatggtcaaaagtattaatcacaaaaatgacaatttgtagtgactaaatgtatttttaatcacaatacttgttgtgactaaaatcaaattagtgacaacttgtaactaaatactatgttttagtcacaagtaatattttgttgtgactaaaagtcacatttagttacaaacaaaatatgttgtagtactaaaaatttttacactaaaagtagtcagttttttgtagtgttcacatccgagaagaaagacacggg

SEQ ID NO: 183902 - DNA, 567 bp, Cannabis indica
tatttgattatttagaataaataatataatacaaattcggttatagatatttacatataataaccaattgaggaaatctctcaaccacttgagagaatatctcaactactttttaaattcaaatattatctaattaaactaattatttaattaactcaaaaatacaaaaccaattgggacaccctacactagggtaggcaccactcttgtcttaactaagacaatgatggtatcttttgtcctcattaactttttttttcctatttaattaatttgaggggtatggtgagggtatatatgggaggggtatggtgaggtatctaccatgtgtaggtcggtttggattgtctttctaaacaaagtttaattacttaggagaggtagggactcaacttgatcaatagacttgattttattgtgatgaataaaatttgacatattccaatattattgatttataaaatgtttgaaaagattcaaaactttaatatactatgttttcatgactgttctaggaggcactgagtgccaacttatatttttgtacaattatctatgcagtttatt

SEQ ID NO: 183903 - DNA, 619 bp, Cannabis indica
aaagcacaattatgcatgatactcgtgctattttaacaatatatatgagatttataaatgagaaaggtggtctagattagctatatctaaatcatatgtagaaaattataattatattagactttgaacccgacaaattaatatattaataagaaacaaattacaaaatgaatcgcgaaagtatacatcgagagaagtaagagtaattataatataactatacatatttttttatgatataaataagctcccacaaaataaaaattataaatccgtcactgaatatatatatttctttagaatctatatatctatgagtttgagggcataataattaattgtatagttactttcttaattaattataaagttctttgctataagttatatatatttatatatatatataagatttaatatttttaattttctaatctattttggaaatctttccaaaaccaaaatcactaataagaataattaaaatgtgaattatacaagataatcacaaaaagacacgaacctaaaacttcctttttgttagtttagttttttttttttttcttcagaattagtatatgtcatggcagagaaagagagaggatgatgatcagttggg

SEQ ID NO: 183904 - DNA, 533 bp, Cannabis indica
tttatagtgtccatatggatattcatgaggtgggtacgtagctaattaattctgaattcactactacaaaaaatatatttagcaacacttattcaataacacttggtaaatgagtgtcactaattcatttatttttgttattagacacacttaaatataaagtgttgctaaataatttatatgttaaaaactttaatatctagcaatatttattcaataacacttgataaataagtgttgctaattcatttattttttttattagacacacttaaaaataaagtgttgctaaaaagcttataaatttaaaactttaatattttaaaaatgcaatttaaaatcaataccaacacttttaaaaaagtgtacgtttttaataaaaatagaaaaaaaataaaaataaaatttgttatattattttagtggggtgtaacttctatcatttataaagataaatgtgagctaccaagaaaaatataaaaactacccactatttctctccccaaaccaccattgatatcaagcaattttct

SEQ ID NO: 183905 - DNA, 698 bp, Cannabis indica
ttattttttagcactttgttgttgttttttttttcattgttggacatataataattaatgtataataattttaaaaaataaaatatagcagcccatgattgaccctgtacatgttataataatataaattatagtggctgctaaaattatttttttatttttatttttaattttcaataaatttatgccgtgcgtgaattctctaatatctcaaataaattttagtttaatttttttttttcataatcacatatgttgtagctatttaggaccgtttgtaattttcaaaaaaatttaaataatttagaaattgtttggctgtgtttttagtttttagttttcaaaattgtattttttaaagagtgaatagaaaataattttttatcattttaaaattttaatagtgtttgactcaagttttttaaaattagttttaatattttttttactaaaaaaaattaatattctacaccataccatgatatgaacccatccaaccccagaccccaaatccaaacccgaacctggaccaagaaccaaacatgggctggcgttcgagtttggtttcggggtctgagtgagggacggggttcggggtctgggtctgggctcactacaacatttatcgttattagaggcggaggagtccgctggtaataatccattaatccgctggtaaagggtaatagcggcgggac

SEQ ID NO: 183906 - DNA, 651 bp, Cannabis indica
actgattctattactgaatatatagttttttttggttaggtattaattacagaatatagttaatttaacaataattagtgttttatttgttactataaatttatggtgtgtatcttttcgtattctttttttataagagatttctattagatttatccttaattcaattcttaacaagaattattgtctctatcttataacaaggatattgtcatattagttgggtacttactttttagtgacaacattttagtcacaacataaattttttgtaatgaaatatgacttttagtcataacaaaaaattacttgtaactaaaacatagtatttagttacaaattatcactaatttagtttaatcacaacaaatattgtgactaaaaacacatttagttacaacaaattgtaatttttgtgactaatactttaatccatggacctattagtcacaacacgataatgattatttataattagccacaatcttttttatctttagtcacaaattttgttgtaactaaaagtaagaatattttttgtacagtgagtgataaaaatagtttatgaatataaataaatccatactaaagaaagatagcaaacaaatacatttcagttattgaaatttttatattcagtaatagaatcag

SEQ ID NO: 183907 - DNA, 615 bp, Cannabis indica
gtttgtacttttgagctggtgcacactaggctaacaataaaagaagattaaaaggtctttattctattattcattaacgtaaaaaagtgaagggtattttattgccaacattacataaaatgtgatgtaaaagttatatttcgagggatattgttaatgagccgcatactataaggagcacaacttggtagtctaaaaagtttaggggcaaaaatgttaattattctaacttttttatagatttgcataatatgtcttgtcaaaaaaagattacaaaatattttaaagaaagagttaccatagtctcactgtggttgaattttataaaagaaatctgtacatgtgacatcattgaatttgtgcctgtgaaatacagcatatttttattctcttgtaaaggcaatgatgttctatttgctttgttcttcaatgaataaagcatttgatttttttcttctagtatcttgctttatttgtaagtgttttgtcttgtggggcgtatatttataccaatggaccatgtagtacatatggttatggattcttagaaaaattttgtaaaccaaaacataaagcttgttcaaaagcttgatctgactgaaatgtctcaactgt

SEQ ID NO: 183908 - DNA, 1002 bp, Cannabis indica
ttatggttgaatgaactgcaaatgagaaaaagactactaataaatgatactgttttagttagcagaagctagtaaatgaagaattttgctcacactttaataaacttttaatcaaatcatacagaagcttgtcgtgaaatttagcagcacataaatgatatgtgtcaaattgggcattacactttgattccattttcttgtattcagactacacaagtaccaaaagaaaaactgcacaagtaccacatgatcaagaaaatatatattcataaaatgtttctaatgagacctttaaaggagattcaaattttcttgtaactacatggaaggaaaactcaatttcaaattcagattagcaacaagaggtatttatatagtagataaattcaatataaaatttaaagaaacatttttcattaaaaaaaaagataaaataaattaaaagttaacaattagggtatgacttaagtaaacaaaaaagtaactgtttacaccaaaagtagtcttgatgacatgaacatcaatatttggcatgtgacaagaaaagatgacatctcggagttgagtagtctcgagtcatagcaagtcgacctgggaggagtgcctagtgttacgtgcagtctatgatggcacgttacaagctaagtgatgcccacaagttggccaagtggtggtcaaagtggtggcgcatgttgtggtgcatgcaggtggcatgctgatgcttagtttgtatgcagtggcattttcgtaaatatcttcaatattgtccggatcgggacgggacttggtattcgccatttatttgggtctacaaatagaatggtgcaatcggtttggcgaaactaggtgatttggtatatggtgcttcccatatgtctacagagcaaaaatcatctatgttcctggtagaaggctaaaagctcagaatgctctttaagggggtaccctggtgtcagctctccaccaccccttgcaccttggtgctaagtgagctactactag

SEQ ID NO: 183909 - DNA, 618 bp, Cannabis indica
aacttgaagcggagataaagagagtgaaagaggcgtcgttggagcaagataagatcaacggtggaggaggtaatcaaggagcaacatcgaccgttgatcttcttgaggaggaaatgtgggagcgattctacggtgcaggtttctggagaagtccttcacagagagaaaatgaattataacgtcgtcgtttcgaataatttttgtttttgttttcagttaatatgttgtcgtaatgtaaatatgccttttgagagaaagaattgtcgtttaggttgatggctcacggagagaaccgtgtgccttcccgcaggtaattttaacgcggtagaaaaaagaattacagtgtatatgttgtggaaaaaagatatatttgggtggagattttgacaaagaaacaaaagtgggaattatgttgaagattgggtgttataattagtggtttctcattgtacaaaatttttatgtatgtccacttagagtgataacaacttggctggtgttggataatttctaattccattttctaatttttttttcttttatagggtaattatgtttaagctactatttgttacgagttgatatatgatgcaggataaatatgacaaaatactatac

SEQ ID NO: 183910 - DNA, 624 bp, Cannabis indica
aatgagttttatttagggcataaaacccaacagagggatctaagtaagcggtgtgaataccatggtcatattggtcataccataaaagagtgtcgtcagttgaaagatgagataggaagtctcatatcgcaaggacatcttcatcgatatataaagggacaggaagatgcctatgatctgttcgatctacccaataactcgagcaactgaagattataccctcttccacgagaagaagggacacattggttatctcgagagggagagggtcgcaagagtacaaaggcagttactccgataaaagcaaacttgtaaaagaattgcgacttgagtatatactggctcgctatgattgacataagtggacgtcaactagtggcagtcgaagatagaactaaaaccaggattactccacctggaactccggtatatgtgagggatcgaccctgaatattgaaacgattgtgggtgaatgttggcgattgaccctggacatcaaaacttgttttatcaaaaccggatgttcctggaagattgataaaatatacaattgaattggggaagttattttgagattaatgattataaatcacattactgatggtatatttttgaaatttccag

SEQ ID NO: 183911 - DNA, 768 bp, Cannabis indica
agtaatgttttacctcagaaagaacttctttaattgttgacgatcaatatgctataaattatctattgttttaatctaaataatcaacgatcctttatatattgtctacattgaataaagactaaaactaccatactacccttcaatatattttatccttaaaacagttggcttcctatagtatacgactcgttaataatggtgatgtttggtaacacttttatttttaaatttttgtttttgaaaaacaaaaatgtgtcttacaaccactttatttttttaattttaaaacaaaaaccaaaagtgtgttctgtagttttcatttgttgattttatttaagttgggtctgggtccggttttggggcaggggctagggttggagtccaggtctggggcaggggcaggggttagggctggggtttggggctaaaatcctagtttggggtgaggtacgggttaagggccgggtccgaggctagggtctggggtctagagccagggtcgggttcaggttcgcttttgggttcgagatctagggtcggggtttaggtctagggtcgagtccaaggctggattctggggtcggggtttaagtccgggctaggaatttgggtctaggtctgggttcgggttcatgtctaggcttgggggtcagggttcgggtctaggggttgaggtctaggggccggagtctgggggtcaggggttttaggtctaggggttgagtctaggggtcgaggtctgggggccggtgttcgggtttagga

SEQ ID NO: 183912 - DNA, 628 bp, Cannabis indica
caagaccatgatcttcaataacaacagcaacaacatcataaccacgaagttttaagctctcataagctgaaatagttccagaaataccacccaggcgaccatctccaactagaattgcaggtaaacgaaaaggtctgccagtaaaggaaactaattacgcaaaatgtacgatatttgaatcaaaataaagaacatttcccattaacaaaagtagaattaaaaaaaaaaggcacctatacaagtcacactgaagagtcccagaaggccctggactggcaatcccaccagcagtctcaacaacacaaaaagcattcatcttttcctccgaaaacccacaattcaaacgcctcctcaaaatcccaaccaaatccgagtcttccaccatcccattctctctcccagcagccaaatgtggcgaaaccgcttctctccacgcaaacatcgtctcacacatcaattccgaatgctcaccgtcttcctccccaggaattctgcattctctgtagctagattccaaatcaagcattccaccaccatccccaacttctccgccaggcatgcagccacacggaggacaggaggccttagacacgatcagtagctagatagagcgggagagggtttgtcg

SEQ ID NO: 183913 - DNA, 885 bp, Cannabis indica
acataagaattgtcattatcggataaccaaggttctcccaacacatgaatatccaggccattacctattttccaccggaccccttttcgaaccaagtcctgagcttccaacacacttcgccaaacataacttggattattacccaattttgccgtaagatagttaccattagcaaaataacgagctctgaaaattttgaacaccaaagaatccttccgagtaagcaaacgccaaccttgttttccaagaagggcaaggttaaactctctaagacttcgaaaccccatccctccaacacttttatgatgtgtcatcttttcccacgaatgccaatgaatccctgactcttttcctttcgatgttttccaccaaaatttagccatatgttgctccatgtcacggcttatgtcaagtggtaacaaaaacacactcatggcatagctaggaagtgcttgagtgacagttttgattagaatttccttccccgctttcgatagatacttggaatcccaactttgaacttttttcctcaccctttctttcaaatagccaaagaccgctgttttgtttctccccaatgtacttggaagccccaagtatttactattatcatccgcaacaatcatttggagcagaccacacagttgttgtcttctcccttcacctgtattggtactaaagaagattgaagatttacccaaattgacttttgtcccgatgccatttcaaacttcctaagcaactcctgtatacaaacagcctcttccagggtagccttgcagtacaagtagctatcatcagcaaacaacatatgtgaaaacccgacggagccccactttgctactttgcagccatgcaatctgcccataagttcatatttgttga

SEQ ID NO: 183914 - DNA, 591 bp, Cannabis indica
agaaaactgccgccttaaaacgccgcctagaggagggcacagttagcaaaacgctgaattaaagcatgatagcagccgaccaactagggaggcgcaggggactaacactcaaaaattaacctgaacatggagtgagaagaccacgaggcaggcctcgtggctcacgcaccaagagataagaaaatgtccaagaaggacaacctagggaaaattagattccccctaaaaatcagaatgatcagccagaaccctctcataaaaatgagaatgggaggcaaccagaaactgatgaacaagaaattcctcatgaaaatgaggtaagatcttaggactcaacctggagaacgtaggtcacctgcgagaaatcataagcattcttcctgaacccattagagagagggctcgatacagaccctaatgggggaaatacggacaaaccgacattcaaggggaaagaatagagcgtgaggaagcaagtgtgacctcagggcgctcaaggaccatagtcaatcaactcaaagagaaaaagtaactcgacgagctaatgattgagaaagcatgggaccagtaaatccgagagtcactcgagga

SEQ ID NO: 183915 - DNA, 520 bp, Cannabis indica
acaatattttagagctatataaatatatctaacaatattacttgttccaaggataacaaatagtaaagtctttggttttattatctttcatacaagcgcctgtggaacttattttccaaatgtagtgcttgcattttttgcattttttgtcatctctttcacaatcaaatatgttgaagaaatggtcgatctgacttttgggccattgaaagttacagaagaagagtgtggtgcataggagattgggatggaatactatctcgtaggagctattgtaagggacgacatgtgtaccaagatcatcgtccttggacttgcaatgaagggtcaaatcgcttggatcagaatccagaccgttgattatcactacatgcgtttttggttgaaaaataccatgctctcacatttgttgttttgcatgataaaaaacaaaaggaaatgcaacaaagcactagctgaagtagtccttgtgctttgtgtgacatagagaaaaaggtttaagagagtagaactactcata

SEQ ID NO: 183916 - DNA, 567 bp, Cannabis indica
agaaaaaatctaacatgaatgaaagttcaaaggtcatgatttaatacatatcaaagcttgaggggcatgatttggtagatatcaaagtctgggaggatggttttatacataaacattcactgaaaaaataaaattaaatgaaattagacaaaaatctttagatttaacaatccaatatgaataatagttatgatttaaattattattagtattagtcttttttttaaaaaatacatatataattttttttaaaaaaaatagtaagtaataaattggatatgtgaaatgggaaggtattgtcaaatcaaaagcatggtatattttattggagaatttgataaacaaattaaagatccttatgataaggtattataatatatattatataactagctagagagggatcatgcatgacttgcaattgtcttatgtatttgacatgtcgggaataaatgatgggaaattggccctacaaaaatcattcaatatcttttccaaaaataactaataataataattaaattatttaataattttatataattaagcatatatatatatatatat

SEQ ID NO: 183917 - DNA, 637 bp, Cannabis indica
aatacactgttggaacgtagttttcggcgtgttaaacttttccaaattcttaaaattttgtaggatgtcttaaataactataacatacatgaccatgaaaaaaaatttgactaaaaaattatttcgggtgctaaaacagataagggtacatcaatatattcattttaagggggtgcattgtagaatttccctaaatatattttagaacatcttaaaataattcatagtgtaaaaaatctatttgccgttagttttggaacaaaagaaaaggaagacgatgaatggcgagattaataagctgaaaaagattttgaaagagctatctttgttacaacaaccaggtgtgtggactgaaattcaaaggacggagaaggcacttaatggtttgcttgacaaagaggagacgtattggaagcagaggagccgtgctatgtggttgaaatggggagatcaaaataccaagtactttcatcataaggcctcgacaagacggaaaaagaatgacattaaaggcctgttgatagcggcggtatttggcaagatgataagattatggtgcagaaaaattgtggaggattatatcaacagttgttactgcttcgaatgttacggtgaggagatggaagaggtgtggggg

SEQ ID NO: 183918 - DNA, 1165 bp, Cannabis indica
gaaggctcaaatgcattacatttatttattttattttaaaatttaatattcttaatataaaaaattatatattacttgttttttttaaaaaaataagagagatgcaatactaaattaccatagctgagtgaaccggtgtagtatatggaacatgattatcgaattgaagtgccaatatcatgtgaaaattgttaatgagaacacgttttttttaaacaagtagcatttagtttctgatgttaagaatattaagttttaaaataaaataaaaataaatgtaatgcatctgaacccttcacgtgtccatatttatgagttaacggaagtactcgtagtaacggtgtaagagaattgtaacattaggtatttttgccaccaaaaataaacattaggtatttaagtgtataaaatcggaaacattaagtatttatgccgcaatttacccgatatatttatataaactaaatacaattaaatctaacaataattagtaagaaattatatacttattgttgtttgcaagaaattggttactaaaagtggcaatttcctggcagtagggccggccctgggcataggcgggctaggcctgtgcttagagcccaaaaaaaaatcttttccttttaaaattatacaatttttttggtgattttaaaaaataccactttttttttttaaattaagggctcaaaaataattttttttcttatggcccactaaatttcaaggcgaaatttgattttttatgcttacatttggttaaaattttttttctaaacaaataataactaatatttgcaagatatgacaacttttatgatatccctaaaatacccccatttacaccatcggaccaaccatcggacccatcggaccacccatcagactaccatcggaccaaatctgctaccaatttttttttttatgtttttgtacatacaaaagtagcatcaggtgaccatcggatcaccatcggaccccatcggactaccaatttttttttttttattattttttatttttttttaatgtttttgtcactaaaaaaatatagaaaatttgagaggggtatttttgagttttagataaagtggtcatatattttcaatgatgatatgtattagtttagaaataaaatattaagtatatgtaagtatagaaaatc

SEQ ID NO: 183919 - DNA, 563 bp, Cannabis indica
aacaatcattccttcacaacctccccaaactctgccaacaacaaccaaatcaggaagaaccataaaacctcctgctcatttaaccgattacaattgtgccacttccagcacacaacaccctattaccaactacctatcatacaagaacttttctcctcagttcagggctgctgcccttgccatctcccacctcattgaaccaagctcttttgcacaagcctgcaaaataaaagtttggaacacagccatggacacagaaatagacgctctcgaagcaaatgaaacatggattgttgttccccttcccccgggacaacacacaatcagtaacaaatgggtttatcgcattaaactcaatcctgatggctcggttgaacgatgcaaagcacgtctcgttgccaaaggatatactcaacaacaaggtgttgattatttcgaaacttacgctcccgtagctaagttcaacacactcaaattactcctctctcttgctgccattaaccaatggcaccttcaccatatggacataaacaacgcatttcttcatggtgatctccgtgaag

SEQ ID NO: 183920 - DNA, 634 bp, Cannabis indica
atcaaaacaacaacaaaaaataacacacaaataacaaaaaataacaacaaattaacaagagtacaacataaaaagactgtattttctgtaaataaaatcaaaaaaattgtaaaaatgtttaaaattccataaaaccgtatttttgtaattttttttattgtttttgtgtatttgtgaaaatcattaactatttctaagatgttatatagatttctatatgtatggtgatcaggctctgcccttggtacaggtggcttaagcctatgcctagagctcacccaataaattctttttaaaattacattttttttattaattatgaaaaataacatattttttttttctaaataagagcctaaaatattgttttttcctatgacgattatatttcaaggccggccctgatggtgattgagtaatttggcaactaatttttgcaatagatgccaaacaatacacaatcttgataattcatcttcttaatttttttgtaattgaatgatcaattgaaagtatcatttattcctatatttgctttgtttcttgtgctgtgcccttttaagcttttacattcttttaatctcatcacaacctatataatatatataataaaaaaaccaataatggtgaagac

SEQ ID NO: 183921 - DNA, 975 bp, Cannabis indica
atgggacttccttgaagctatgatgtcttgtttggggtatgaagatgattggatcaccaagatcatgaattgtgtgcgctctgtgtcttactccattcttatcaatggttcggctaaagggaaggttgtgcctgtaagaggcttacgacaaggagatcccctctccccttttctctttctcatttgctcggaaggtctttcttgcttaattaatgaagctgaaagggcagggaaaatacatggtctgaaatttggagcaatggatcaaaggctatctcaccttctttatgcagataacagtttggttttcatggaggcaacactagaggagggacaagcactaaaagaagtgttagaatgttatgctaggttatccggtcaatgtataaacctggataaatctaacttatgtgtgggatgcaaaattaagaggccaaggcggaggatttggctggccaacttggggttacactggttaaacatcatactaaatatttgggcatgccaacttttgttggaaagaacaaaaaataggtctttggcaaaattagggatcgggttgaagctaaacttcaaggttggaaaatgggtctcttttctcaagcggagagagaaattttaataaaagcggtcattcaagctcttccttgttatgtgatgagttgtttcagatttaccaaaggcataattcaagaaattgagagcatggttgctcggttctggtggggctcttcatccaaaaaacataagattcattgggggaattggggaaaattatgcaagctgaaggaacaaggtggaatcggtttcagagatttggaagacttcaatcaagccctcttggctaagcaaggatggaaattaatcacaatgcctgattgccttctagcccgtgtgatgaaagctctctacttccctaatggaaacttctttgaggccgaattgggtcacgtatggatcggctatttggaaaaa

SEQ ID NO: 183922 - DNA, 962 bp, Cannabis indica
attgtgcaattaaatatttattacaaaatttaagttatttattatttaaattaataaattttgagaaatcagtattctaaagtttttgcatttgattaaaattcatataattaaattgtactaatttatatttttatacaaatttattattattataaatatttgagatattatatggtcataaatgcctaatcaattacatattatagactttatatttaatttattatcatataataattatgctattttatttacttttgtaaatttattattagtataattacttaagatttatatgatttaaatgctatatataaattctataaatagtgctagatatattaagaatatattcaaatattaagatatgttcaatattttatttaacacattaattttataaaaatttcatgaaatattcataatatgagtaaaatgtgaataaaacataagcaattatgtggtttgacataagaaaatgtgaaactgggataaatgctcatatttagaatagtttttaataatttttggacgaccacacttgaaaagctaataatactgagtgactattatattaaaaacgaaattatttataggtagaacatatacctaatgtctaagtgaaaatataatttttaataatgagggagtagccacaacatctttaattatataaaattatatattaattaaaaattcaccttaatggacctaacttataattaataatatagatgtaataattttactccacaaatattttattatatttatataattaataaaaataacatgttaaattaaattctcttaatttatccagagtgagttatggggatttaatttaatagtgttatcacaaatttaattaagatagataataaacttatatttttctaaactaaatgattgattaaatctatcataaggttcatcaaattttattaaatttaaaattt

SEQ ID NO: 183923 - DNA, 545 bp, Cannabis indica
atcctttaaaggttctccttgttgtcttttaacttcgacaaggtcttccagctgcgattgtattagtccggaggataagaaatgggtgtagaattctcgagaaaattcattccaagaattcaatcatcttggcgccagcttgaagtaccactatcgagtttttttcgacatggttgttgggaggatctgacactacacatcaccagtattatttgggagatcaagttgcatctcaaagtacttgatgtgtgctagtgggtcctctcgttcggtattcatcttccatactggcattttgaacttaggcaagggcaaggcattgatgtatgttgagaatggtgaaccccttgacctatcaaattaaagacctaaaggtttcaggccaactaggcccttgatcatgtgtctcatttaacccaactgcgctagcacagaaggatccgatgcagtaggggcctaggtgattggccttcttagatgggcagcataagtgaatgggccaaagactggccgaccataccctgagaaagggtatgctcaaggct

SEQ ID NO: 183924 - DNA, 709 bp, Cannabis indica
ttttacaagccagctaatgtcaccattctgaaagggaaatctgaggagagcaaacgtcatgaaagctcaactgacacaaaactctctgcaaattaagcaattatcccctgtcaaatcacctcagcccaaagaggagaacttgaaggtatctaaccaaaacaaaccttcaagtatatccctaaaagtcgtcgaggagtagggaaaaagctttgacacttttgacactgatcattcgatgacagccttgatgataagcttactttaccactaaggaaatcgatcagtcactaccgaggtaaaaagcaaattttaatttcctttggtaaagatatcaagaaaataaaagggactgttactctcaataaaaagtcctccacttctgtaactccaaaaaccttcaaaacagagaagaaaaagtttcatttcaagaagcaaaaaggagtcacaatccatcgaaatagtgattgtttaaaagcttcttttgaaccagatgagtcaacagaggaggaaaaaaaaaatttcgcagcgacgatgttcctacaccttccccacaggtgtcagtatttgatagacttgaagcaagcacatccaccccatgaatgtcagcattcgaaagacttgctttcccaagtgctccacagtcaaagggaaccaaaaagcaaaaacaatgggtgctaaaacaaaagaaatctttgagaattactattca

SEQ ID NO: 183925 - DNA, 715 bp, Cannabis indica
ctatgtagtcattttaagtattattaaataatttgatgttgttattaaatatgtatgagaatatataaagcaattttctcgggtcagactcattgacagaatatacattaattaataataactttgaagcacttctaagcacacactgacttgctaaaaaagatttgttaaaagcaaattatcagtttccttattaattgatttttttttttaatcccaacatgtatatatataaatatatctcatgcatgaaattataaagattgtgaaaatcgtattgtgtagcctgtaaaggcttaaaaacacacctagtagtagtataaccaagaacaaagctagaaacaaaatttaagtgaaagcaattatttatattatttttttagtgtgacctaaattttaatgaaagttacaaagttaaaactaatacataattgtcttaatataatttttagtgtaatgtcattctacttattttaggacacttatatcagatactttaaaatagagaacctttaaaatgtttaaagaatcaaactaaaaaaacactacatcgaatactttaaattcttttttcatattaaagtttctttaaaatttactatttgtgctttatgttatatattttattaattgttttgggtttgaataatttttttttatatattttgaaataattaaaattttaaaaaatattaggttttagtaataaatttta

SEQ ID NO: 183926 - DNA, 911 bp, Cannabis indica
attaaaataaaaagaaaaactatgtaaatattttatataaagaaatttaaatttataatattataaatatttttaactttattattatttattttatattttaaattgaaatagttgtaataaggaattgattgctttctattttaattatggtaaattgattcacacgctatatttttcgtaaaatttagtaataaaaaaattttatatcaaatttacgaatccaatctatatatagacatactcaaatttggttatgtgagttttggttaagaatataataaattacaatatatacattatcagatgtattacctaattaaaaaaaattaaaaaatttaaaaaaataatgtatacatagtcacgacacaataatgtagcagtagctttttttttaagatcaaaatttcaaactccatttcaaaaattaaaaaaattacattacctaattaaaaaaaattaaatatacatggatcttatacttaacatcacctaattgaacctaattatacgtgcatcgcacgtaacaatcaacctaatatatataagatatatctatagtagggattattattttgtccttaggtgaggaagtttttatagccattgataatagatctcatggttataaataggtaagtgtataataatacctaacactggcactgtattgtataatttcttatattattttaataatatttaataaataaaaaatgtattaaaagaagactaattaggatttttgcccctgaactttgacatgtaccaaatcatacctcctgaatttttaagatcgttaaaaaacgccccctgaactaatgaaattgttggatttaaaggactttttcctaattttagtaaaaaagtctaacatggatgaaagttcagggaccataatttagtacatg

SEQ ID NO: 183927 - DNA, 765 bp, Cannabis indica
ctttttggatagagataaaaaaaaatgctcgggatacttcttcattatttgtaagaaccccaagttcacaatatgtgaacctgggcgttgggtgcactcaaaaatgcaagtgctctgattctaattctagaacctcaaatatgtttgtgacagctcttatttatgttaagtacaaagtttgagcaatttgcattaagacagacccgaaaactaaaccctagttgggatgtcaacttgggcattgggtgaaaatcctaggcccccttaattgactttcagatgttgtcttgtcccttttaagtcttgaggccttggacttcgatttttcttgtgttcttggtttaaaatattaaagatagtgagttggaaacaacttggcaggatccaagcacccattctgaagttcctggagtcaacctgggcacagggctagggaccccacccaggtcaactattataactcaaaactaactcaactccgggatgtttccttttctgtcacttgttggtgtccacattgtcaaggcaagttttcgtgtaagcaaatataacatgagctcaatttaccaagttattacaaattgaaacttaacaagtttacatgctaatgctttcaaaataataaacatataagacaaatcctaaataataaatgtttctataatgagatttatgataaatgactgtgtgagattttgtctatgacatgttattcgctaatgtatgatcatgtatcaatcaactataatgaatattatttaaaat

SEQ ID NO: 183928 - DNA, 906 bp, Cannabis indica
taatgataataaaaacatcaatgtggcagtgaatagaaatgctcgattattttttaaattttgtattttcattttcatggaaaatttctcaaattttaattataaatttatcctatataattaaggaattatttcacaaaaacattaaaaaaaaaaacaaaaaaaaattacaaaagtacaatttcacaatatttttatgattttttttttattttattttaaagaatatatgttctttttatattgttatctgtatgttaattttttgttgttatttattgttatttagatattatttttatgttagtttatttagtattcttgttattttgttatattttatatagaaaaattagtaaaaaataataaaaaaaaaaatacttttaaaacataaaaatgtaatatttttacaaatagtgtaattaactagggtttcatggacacacaaatatagcattttatttttgctaaataaatataacatttgtagaaacatataaaatatacacaaataattcagaaaaataattaatttacctcatcatcaaatgaagcctgaaaagattgaggatttttctcatcatcaagagcaggcttattagtctgattatcatctccatcgccattctcagaattgtccttcttctcagcattgaagttatcatcagtagtaatagttttctcttcttcttcttcttctacctttgtaaccttttcttgatcattatcattgtctatcttcaacaaatcttccttgtgtaactccggtgccggaacgggggcatcggcttcatctccctttgtctttggaaaacttccacaattacccatgttgagtaatagagctactgtttgtttcccgagaaaatattatatataagaaaaagaagagaatgaccctcttat

SEQ ID NO: 183929 - DNA, 880 bp, Cannabis indica
ctccttggacattgtacaagagcatcaatatgttcagtagagtagcttttaacagtaacatcccaattgctatttcatatccataagagtccaccactactcccacacaataaacatgaaagctataagaaaaattgatatgtcttggaataccttcttcccaattaccacaaagcttagtctgcgacaggttgaccaagcttggtgaatacttgggcacaatagtccacaatgcatttactgcactagggttcctcagaccccgtacattctagcataagatactcaatgcggctgccgaatattaattaattaaaatttgtagtataatctcatttactgtcgtatattagttaatgaaaatttgtggtataatctctttttagaaattatttggatttgatatttaatacatataggcattatatacatgtggatattttaatataatgtatttaatttatatgatttgttctcattaagagtatatttatcaaatttttataaaaatattatttttgttataaagtaatttaaaataaagagtaacagaagaaaatgaagatgaagagagatattgaaagtgaaatactttatttcaatggagtgattatttatttatacaaaaatgtgaaacatataataagaaaactaaaaaaaataaattataattacaataaaaaattagattagaatatttgaacatccatatatatattatttataatactcacccttagatattataataactatctcattaataacatgcccagaaaacctagtaggataaaacttaggtctaaagggaaaaatagtagcagtgtgtattaaacatctctcattttggtcattcatggagatcttctaatcgacgaac

SEQ ID NO: 183930 - DNA, 482 bp, Cannabis indica
tacgagatcaacatcaattgttgtgatcttacatacggctattcataaaatagttgattcaatctaatctgtacgatttaatctgattcaaaatttaaaattcgtacttgtgcggattggatattaccgatccaatccaatctatatatatttataaaaaaataacattttaatgtaaagaaaataataatttaaaaatctaatacatataatacaattatattttaaaacttaataaatcaaatgtatattccatttttatatatataatttttttctatatacaatttaaagtaaaattaaacatttttatatacatacaaatattttcttctttgaattgctataatttgttttattttgttgctagttatgtaaaaaaaatatttttttttcataatattaagtaatttaatattaaaaagcaaccgatccaatctgcacttttacaaattgaattagattaaatttgaactattgta

SEQ ID NO: 183931 - DNA, 570 bp, Cannabis indica
atagcaagtgagagagtggaaaaagtttttagggtttaaatttgaaatgattatgctttcccccaaatgtctaaaggtctcacttcacattaagaaccacatgggaaaaatgtgtaaccgtcaaacacgatgttcaatgcatgattttcaaggaaaaaacaattatgacaaaagatttgaaaggacagagagagaattttcttcgagtaggcacattgctttagagtacggaccatcgagatcagaatacatgtcatttaatcgtgcaaggagtgaagccaagaagttcccgtacaaccagaagttcccatacgaacttgggagcaaataatttccaaaaattactctagtaacgtggcatggaataatgtatcacgtgtcaagtattgaagatactagacggatgtaagacaatcgagaagactgcccagaaaacgttgagcagagtatatgccaaatagagccatctaacatcaaacgttagctggatgaggcatgctgagcagcatttcgaacaactaagaagacacttctaggatgaatattcgatcaacaacctcacagacaaaa

SEQ ID NO: 183932 - DNA, 507 bp, Cannabis indica
atttcctcttcctctccctcactggcttaggaatgaaatcctttggatagagcccatattcacaaagttatcctcggaggtcaaccgaatgatattccggtcttcccccggcagtcgagcaagcttttgagctctatccctaagagcaagggtgaggggagggcggtgatatgttggaatctactggagccgagtatgggtgatgcctgcgccatccaccaaaaagtactcatcaacaaaacgtccaattttattgatggctgcatcatcaatgcccgtcaaccacttgaagtctggttgagagaaatagaagtaccccgacctgcctttcatgggggtggacttaaaatcaaagaaccagctgacctcgtgaggagaaggcatatcccacttctgggaggcgtaaaggacaaaaagggcagacagatacttaatgcccttaggagtgaactgggctggacagaggccgaaatagtccgccacattcttaaattattgatgcaaagg

SEQ ID NO: 183933 - DNA, 614 bp, Cannabis indica
ttagctacccccacaatgtatgaataatcatatcatgttgctcaggttacatatattcataaatattataaccaaacaaggtcgaacactttattattgggatacaaaaatgaataatatagaaacaaaatgaatgattcttttaaagatgcacattggaaaagcattgatttaataatttcttttaaaaaaagaaagctatgcactcatgaacagcacataaaagcttttcaaagagtgcgcaatttaaggaaataagtagtagcagtaagtactctcaaaagtttgtactatactaaagtctaaagagttctacccaacaaaaaaaaaaaaaaatacagattatttattttaagcttaagttactgtcattactcttctctttctacctttttttttcactaatatttaggcttgtaaaggtatatttgtgacaccttttgctttccttatccttcacaaacttctaactaaagttatgctaacataaaagatttaacagagaaaaaagggttctcatgtgtgcatgaaagatataaagtggtccatagttctaaccatgtgattagttcctacattagctcttagctttgatatagtttctcccaaatact

SEQ ID NO: 183934 - DNA, 769 bp, Cannabis indica
aatgctaagtaaaacttttcacaaataactaaaagtataaaaggtgtattttcaaaaaaagtataaaagatgactacagtagggatcgaaccttcaacctcaagtccaacataagctatgcttaccatctgtgctggatgcttttcatgtaattatcgagttaaatatttatatattatatgtttttatatgtatatacattaattttgattttttcggggcctccaaaattgtggggcctggggccaaggccccggctgccccaccctctggccggccctgctcaaaatatattctaacatttgttttcggggttcataacacccttctaaaaaatctaatttcttttaattaattgttaaaaaaaaattaaattttatattatagcaataacatattaactatgttaacataagaaaaaaataatagaataaataattttttatatatgcaatttaatacttattttattttatggggtttttaatttttacattttaaagttttttttttttttttttattttatatattgttatttgtaggatatctcaatacaaatatctacataaaaacgtacatatcatagcaatcagaaaaatttaaaatttgcaacccaaactaaataattatcgagcaattcaaaattagtaaaaaaaaaaaaaataagtaatataaaaataattaataacaataattaaaaaaaactaaccatttaataaaagaaattaatagttgagtcttgcctattggcatgtgtttggtttttc

SEQ ID NO: 183935 - DNA, 569 bp, Cannabis indica
atgatctttcaacttttgattttacattaaatattaattaaataaatattataactaataaatagaaacaactttatagaattgattattatactaattacttattaatattaaacctattgtatgtgtcaatctatatctatatatctatataattctattattagggtagttgacatagcatcttatataagtttttttgtattttctttgctttcttattttttctatttttcaaaaatcttttcttaatactttttccatttaatcatttattatttaataatataacatgtttaattagtgacctttcattttcatacactaatactataactcctttcattatttaataatgtagaatgtttaattagggacctttcattttcataacactaatattataactcctttcatattttactattatcataattatattttacaactattccatttcacctcttaattatcaaatataaaattagaagaagtgatattaaaaaactatttatatattctttatatacgttttcttatgtatgagatgagataaactattagagtgg

SEQ ID NO: 183936 - DNA, 804 bp, Cannabis indica
gaacataaagttttgtgtagtgcttactgttccatttctcatagcttgaagttgaatagaccacaaggctcaaatctacttggaatggcaataaaatcagaacctgcaatcattacatgagccaatgggacattgaattttgttatggctctaactttcttaggatatttcttctctacttcaacatcattttctccaaatacttttcccagttccctggaaacaaaatcaattcattaattcttcttctttttttttttctattctaaatggtaagtaaaagtaataatgattattatgcacttacaagaatgattatttgaacatcttcatcaatgatttgatcaatggcttccacaagaatatctggacctttttgttcttctaatctaccaacaaaacatatcactggtattttggtgtccacaggtaacccaacttctgcttgtagagtttcttttaatacaggctttgcatcaaacacctaatattcaaaaataatgaaaaaaagaatcagaatctaatagaatctcgtgttcaaaaaaagagatatttgtggagaaagtacctaaattattatctttatagcacttaaatatttaaattatcaattaacggcgaaaatactaaagtagttatgtttgctgacctctaacctgaacccaaactctagacctagatttgcctcggacccaaatcccactctcagatcccgaacctaaatccgccataaaccttgaattattcctgacccctgacccgaccccaagcttgaaagaggaaattacactctatgtccctttt

SEQ ID NO: 183937 - DNA, 662 bp, Cannabis indica
cagcataatcagtgttagagattaaagagttttagggagttttcatgtctaacattgttggacattaaaaaaaaatagtaatcacgtccagcaatgtttgaaaaaatacaataaaggggacgttatatgtttagaaattcaattaaataattattttttttattttcaatgcatgattcacgcccagcattgctgaatgcaacatgtgcaccatgttttggctttgcttgacgtgagtctaaaagacaaaaaaaatgaatcaagcgtgaatggatgtcaattgaggaccagtttggcacagttgtgctataaaaaaattaagttgtaactgtgcgatgagaaaaagcagctacaacataactgtagaaaaaagatgagcagagtatttagtaaataattatttttttaaagtaatgtgagttgttaagattctattataatgataataataatgataatgttataatctaattcattataatcacaaatatataaaagcttatgttatataaaaattcgatttttttaatatatttctaagtattttttcctaaaagtataaagttatgtgcgtttgataaaaataaaattatagtatttttaaattaaataagaaaactcaaacatataaaaaaactatatagagtgttaatattaaaaat

SEQ ID NO: 183938 - DNA, 530 bp, Cannabis indica
gtttagatttatatttattagacgcgtaatatagctacatacacatgtttttagttataactggcttaaggtatctagggcccacttagtttagggacttaaaaaaattctctttaaaaaagaataatctacacaaactattttttttataatacttttagataattttgcgttcaaatatatatttctttttacatttttacgacgtcttatataaataacacgaaaacaataaaaaatcacatgaaagtagtaaaaaaaattaaaaataatatacaaataataaaaaattctctaacaatcaaggttataattttctaaattcttatagtttgttagacattattataattttctaaatgaattaatgatttttttttacaaaaaaaggaacaaataactaaagtctatatgaattgacgactttttggaccacttgtctcttaggaggggtcccaaattcccaatatagcttcattattattattattattattattattattattattattattattattattatt

SEQ ID NO: 183939 - DNA, 915 bp, Cannabis indica
  modified_base (78)..(78): a, c, t, g, unknown or other
tccttaaaaatttaaaaatactttcaccactacaccaatagagaatataatttatataaatatatttaattgatttanataaatatatttaataaaataatttaaattcgtgttcatttatgttcattggtataagtttatacaaaaatattatgaatgtgtatctataataagtttcatgaatatatacaatctaaaaaaaaaaataaattaaaaacggttgcatagtcagaggaatcaataaagtatataatttaaaaatctttctaataattttagttaaaataataatatttattacatagtttgtaaaactatatggtataacaataatatttttaacatgtcaaaaaaaacggtaaagtataatattttaaacagtcaagaaaaatagtagattatattattttattagtcataacaatatctacaacaacaataagcatgatattaaaacgttgtggttgaaagtactagactttccacggcacactatttaactacgtacatttaaaaaatattattaaattattattaaaacacatttgaaatgacattgaaatacattgttattgcagtagatcctactattataattaaggataaagattcttacatatataattatagataaagaatatttagtgttttgttattttcaaagttgatgatttaaaacaattaatgaatccgcgtttagtatattatcaacacatgcattacacttttaattttgttcaatataaaattcaaagttgaattgatatagagcgaagatagaaataaaatgtaagtggagtgattatgtattttttttatttattgtggtatattttctaaaattttaaattagtaaattaattagaattacatttaataaaaatgttaaaaataatagctataatgatgttaaag

SEQ ID NO: 183940 - DNA, 537 bp, Cannabis indica
gtcccttgaaactctctttctctctcatttttatattcctttcaaattttccaaaatgcttataaatagaaccacacaatcccattctcaaaacatcatcacaaacacaactaccaaattttttctctctcaattcacacattttctctttagagttttttctttatcaagagagaaaatggagtcaaagtcaacaatggtatttttgatggttgtgatgatgatggtgttctcagccattcctatggcctcagcagcagattcaccagccccaagcccaacttcagatgcggcccaattcattccagccttctttgcatcttttctagctttggctttgggcttcgtcttctaagcccatcatgaaattattaattaattatcaccatttttcaattatattatttttttgcaatttagataatttttttttatcttttgtgattaatatttcttgatatggatatggtggaatttatttgtacttaatttcttttgttgtttgtgtattgtaatatatcagattatcttttgtat

SEQ ID NO: 183941 - DNA, 654 bp, Cannabis indica
attaattatgattttttattgggcacatgaaaaaggattattggacatcaatcggctgaatagagtatatgaatttttaaatccgggtgcgattaccaccaaagcatgggttaacagtaaccgttgtcaagcacaagtcactcgtatgactaggatgaacaatccaaataaatgggctattgtcccctacaacaatcggtatatgtatatttaaaatgaataatttaagtatttataactcttcataatatttattaatatgtatgaacaattttacacatatttgtttgtacaggaaaatatttcactaaatgcttgtactcatccaaccaagtacgtaaatggtggcgtaattggattcaggaaataacgacgtaccggacgatttgaaattcatcatttccacgcaagttctatatctaacatcccaatatgtaagaagaagagagttgatgccttgtttgaggagcgcagggatcctcgccatatacctcgaattgattaagccagttgttcaccaccattatcataatcattattttcctttttttttcttttttattatattttgatccttctcccctctcaaagacaatttacttatatttttttttaaaggggagtacattttgtagcccgtcccaaggcccctat

SEQ ID NO: 183942 - DNA, 596 bp, Cannabis indica
cagactctaattcaaagttttgtaacttttgggtataaaaattaccatttctgagtgaaatttctatttttgttccctcaatcggacgtagtcaatataatgaacctattttttatttcgttggtcagaccaattctcattttcttctctcctaccttttgtagaagaaccccggtaagttttttgtaggcaaacaccatatcgaccatgatctacttcaactgttgtacgaggatcatccttgcctttgtgccaatccatcgtcgtcaagtgacaacctttctaactctagctttgaggactgggatgtaagtagtgagcgaacactttccccagaacctaaggtgcaacacaatttttctcccacgcagatctaaggtcaatgttacggtcgcttcaattgggaactcaagaaggggtggagcactatctttcatctgacttgacatacatagtctgttcagacatcgctaatactttgcccaagggccgcccaaccccctgctggtgcaggtaaactgttgccacgtttgtcgtgactatcctgaggcacacaaacaaaagtttcgtccaggcatgaaatgatggcttagacc

SEQ ID NO: 183943 - DNA, 656 bp, Cannabis indica
ggaagaagtgtaaggttgagaattgaacagaattattgacaaaatttgtaatgtcttgctaaattatgcaccgtatctagaactggaatctctaatcacgaatcataaatttattattatgttaattaattgtttttggttttattgaaagaagatttttgttgacgtctcacctttcttattattctattaacaactttttgtccccaaatactagtgctaatttctaattagttattgttaaagaagatgtcaaaatcaattctaaaggaaatttcacaatcctacacaattgatcttacttttctcatttttcaaattgtcggcaagtgtttcaaaattttaattatatttcacattttttttaagaaaaaaaaattaaattaaaaggtaacaaatacaagaaaattgatcttaaccataatcaataaccggtctttttcaattcatgatgatttgtatctacataaccacttggcatgaaacttgaaggttttttgagatttcacaattcacaaactctcattcttcccacaaaagaaaaacaataaaactaaaacttaatcaacatctaaattccaaacagaatgaacacacataatatctacacctacaaaataacaacaatttgggaagagtaaaggaaaaacaaaaat

SEQ ID NO: 183944 - DNA, 767 bp, Cannabis indica
aaaaaaaattaagagaaaaaatgggtagcatatatagtccgatgaggtccgatggtcacctgatgctacttttttttttatgtacaaaaacataaaaaaaataataaaaaaaattgatagcagatatgattcgatgggtccgatatggggtccaattggtttgattgtgtccgatgtggggtccgattgtgtaaatgagggtgatgtaaatgggggtattttaggaattttataaaaattatcatatcctacaaatattagttattatgtgtttagaaaataaattttaaccaaatgtaagcataaaaaatcaaatttctctttccaaattggtatatgttataatttttcttcctatttatttcctcaaatttaatttgtcctataaatatttaagtttaattttaagttgtaaataaatatttaaatttaatttttaacggtaataatacttaagttattataaaactatataactacccgataaatattacctgttattttgttattgatatatttaaattattttttttaaactacaactaccaaatgttaaaaaaataaattagtcattaagcattagttgtatctaaacacaactaccaaatgttaaaaaaataaattagagcacatgattttgtaagggacatgataaggtgctttactggttggtaagcatgcttaatggaatataatatgatatctacatgggcaaagtgacagattataatgaagtattgactgactgtattggcaaattttaaaac

SEQ ID NO: 183945 - DNA, 797 bp, Cannabis indica
aatatcctacttgtaaatgcttgctaaaagcaacttaagcttagagttagattagtagtggtggtccaagctagaataaaactcaagatatatttggtataaatttaagtctttgactttaaattttagattccaaataaaaatataaaatttcagtttccaaaatacaatacagtataactttcacaagtttaatatccattttccgtcaatggatctgaactgtatgttaatgtatggattatgagttttgtattctatgaccagaatccacttggactattctaagaactcattattgtaactaaacctaattcatcaaaagaccacaatcacataatatatatctatagcatttgtatcttgttcatagtagttttgacaagattaatctctgtaaagaatcaatatgctaatatccacttgaaagtaggatcatcggtattcaaacatatgaatgtacattcaggggtggagtaatatgagttgtcgttaaattcttaaaaatgatcattttatatttttacattatgaaaaaagaattttgaaaatgtttgtagaaatttcatgaattttctagtaatgttgtagaaacattaaggtaaagtggttagatatcttacaaaactgatagtggtggaggtaaaatatttaaagtgggtatagtggtcaaggtttctaaaaaaaagtcaaatttaaagttgtaaacgtttaaaattgtaattctaaaacttaaccctctaaaacgaaatttacagtatttacataattgaagttaaaaagtaaaagtaacgtat

SEQ ID NO: 183946 - DNA, 620 bp, Cannabis indica
gttttctagttgactgaagcctttgatgagcaggcccagtccaactagggttatgtagctaagtcccctccctaactctataaatacatattgtctcatcacaattgtatactttttgataatcagataaataaactgcttctgatttagagatctagggaggaagacttagttgatagtattgcactatcaaattgaagtaattgctatggatcaatcaggtacgcatacctaattattatatattattattgtgttctatgttatatacaaattgatcttggggtttatattaatttttctaacattatcaccattatgggcctataataccccaatgaagtatagaaaggggatcggttggaaaattctctataataaacactctcattaatacagtgactcgtggaataaggctcattattgtcccaaccacgtaaaaatcatatcttctagcattcattaattactccatacaactctaattattggttgccgaaacctcagtcacaatgtggtattataaataatgtctaaataaactagtattactataaacattaattataataacatggtaaacacacatttgaatttttatttattttttattatttttt

SEQ ID NO: 183947 - DNA, 543 bp, Cannabis indica
tttgctgccaaccgcatcctcttaccacaccttcaattaaagaaacgtgaacaacaaatcttaattataataacttaaaaaaaaaaaaaaaaaaaaagtgaaattgaagtagaaaacatattgaaattgagtagttcctaatccttacctgatagaataccctggagagaatcaattactatggatattgcaagcaaaggagtcaaggaagcaaacaacttcaatatttcagaactgtcactgaataaaccagcccagatgttgtgtccgaatcctaaaagccaaaattaatatcaaggaaagaactccacaaagtttcaaggtaacaatcattgcactcttagctctgtccggacgccctgcccctaactcattcgataccctgtgctgttgtagcaacaatacaaaaaatgagataaaagaaatgtttgaatttgaaagattaatgtaagtttgatttatccctctcaaggaatctaagtgttaaatgtggtatagttcctctaaatgaaaaaagtctctaaaaaatcattcttgaaaaag

SEQ ID NO: 183948 - DNA, 561 bp, Cannabis indica
tacagtatctatgattagaaaacaaagatcttccaaagattttcatgataaatacctcctttattttgcttctattagattttttgctatttctttcataccctctacccccatcctcctgagcttcaagtcataacatgcctaatgaatggcactaacactgttacccccatagggctgacttaagacctaaaaagattcagggttatataggtagtggacttttgagaaactagcatgggagactcaaattctcatcccacaccatttctggctgaagcctgaatgcccttttcggagcacagaacctgttgttacacatggagaatttaggtttataaaggcagacccttctgggagaaagaacattgacataatcacactcaattagaaatgacttttatctgggcatgagcttttgattatggaaaaactgaattattgagcacctcaagtcacaggatggaacacatctcaatttcttcatatataacatgggaataatgataaatataataaaataacaatgacactgatattattgagtcttcgaagggttcc

SEQ ID NO: 183949 - DNA, 1184 bp, Cannabis indica
ttaaggtgaggttggcaccggttttgtaaacaacccggtaatagtgagattggcactttaacaatccgagaaagaggttaatagtcctcgggggtgcgaaactattgtaagaggtttggaaataccttggtgaaaatttcccggttgtaagggttagtcaagcccgttaacttggctcgatattggaactcaaagctaggtccatagctttgaagaccaaggacgtaggtggcatagttctaccgaaccttgtaaaaatcgagagtttgcattttctaatccttaaactctttactttacaagtttaattatttgtcttaatatattgcttgccatactacttgcttttacttgattaattgactaattgcataattttgtgttaaaagttttaattttccgaaattagtttaaatttccaattcacccccctcttggaaacatatcttgggctaacataattggtcatgtttttgacaaattcccttcttttttggaaaaattagatgaagatcttcatcccgatcttccttatggtccctggatggaaggatcgtctttgcccaagtctagttatgacagatatcgccaagatttctcaaaggaggggccatggcctttcataactcgtcttgctcgaaatactatcaatcccataatcaatcatccgagacacttgcctgctactcctgttcgtgttactaatactgaaaaaggcaaaggagttttggagtctactcagatctttgaaactgctaataagagtttccaacatttgcaattgattagccctctacatcggttggtgactacaaatctgatctggcttcctcttctggatcgagagacactgttattgataagcatgatacccataataccactaatcattccttaaagcagcccattccttgcactaaatcgtgcaatattgtgtctcaaaccaaaaaagtcatggatttacattccactaccatctctccccatactcttcctcaagaatttccaccagtagcccccactccacccatccctattgccacttatcctcctcccactatacctatatcaaatacttctgttcctatccccatgaatataccaccagcttacttacacatatccaactcatcaccacttatgtcccaaatgtctgatgctcctgctgcaatgacagtcactgt

SEQ ID NO: 183950 - DNA, 617 bp, Cannabis indica
ctatttgcttggagcggtgaaggatgaatcttctctctgaaagaaggtcctcccaaaagaaaaggttttctctcttttcttgtgtttttcggggggtatctacaggccaacttatttgcatgtgctaccttagatggatcatcgttggggcgaaattcgactgttggattggtaggtggcatttttcccatatgacatttaagggcttcagatcgcacaggttgggcctaatacgcatgtcatcccatggcttctcctttttgagtttcccttatccctattcgttggatcatttgtttaggtacacaaggacacgcatgctctatacaatagcatgtcgtgggagacaatgtcatacctgaaaaaagcctggtcactaggcccgtagtctgacacgtataggcaaagctttgtgggctaaaggcgtagcccggcttaacatgtctcaaaaatgccttggtccctctgggaaaaatccatactcttctcgaaaagtgatggctttggttcctggaatagaggggagactttgggctctacagataccctccgtgtattagcagtcaggaacgtccctccgcaaaaaactcttcccgcgaagctcgtatgcctttttt

SEQ ID NO: 183951 - DNA, 712 bp, Cannabis indica
accagctccaatggcggaaatcacttcaccagaaaggatcactctgttttccccttacaagatggccaactttaatctctctcacaggtaattcacccgatcaagcttggtttcagtgtttttttgtttagcttctttaacccgatcgatctggggaggagtagggagtgtttaattatgttttctgggtttagagatctgtattttgaggaatttgtccttgtgagaattcggagtaattatgagattctgttattgttggtagggtggtgcttgcgcccatgactagatgcagagctttgaatggaatccctggaccggctttggctgagtactacacgcaaagatccacccaaggtggattcctcatcactgaagggactctggtctccaacacagcggccgggtaggtttcttaatttgtctccactgtaaggagttttttcttttaattgttcagtattagattgggaaccacgctgttcaaattgagtttaagacttaagtagatttagcctcttttccacgagtattgctatgagaatgacttcttatcttaaatcttaatggctgctcgtggcttagattatttaccctatgttttaatttacagtatcagtaccacaatgagtctcaatgatgataaagttgccataaggtacgaagagagtttgagtatttgtctttttggaaataagaacttggaccctat

SEQ ID NO: 183952 - DNA, 863 bp, Cannabis indica
ttaaaagaaaaatattaattaattaatatattaatattcattagaaaaaattaaaatttataattttaatatgttaatatagttaaaatatgtagaaagtatttaatttttttataaacaaaattaactttaaactaaataaaccataaaataaataatttaaaattgacaaattttagagagtcaactcattatctttataatttgcattttacatataaggagtattgaaaaaataaaaacccaaaatctaataagtaaaataaatttagagaaatagtttaaaaaataaatatatcttcaaatatacaaaacaataaaatctctcatatatgtatatatatttatatgtatgagattagttattaagtaaatatgttacagcaactgggcttccgatttacttgcgctgcatctgggatcaaaccagaaaactcccaagattaatacaccaaagccggttctgcattggcaacctcctccaaaggattttttttcttataaatactgatgcttctctggtggtgggtcagcctgggtacagtctaagtgttgtgataagatatttggagggatcgttagtggtggcggaaattgaattcactcctggttgcatctcggtcctgctggcagagcggctgccattttgcttggccttcaattagctctccgttggtctatcttcaaagctaaagtgagctctgatagtcacaccattatccaagcttttcgacagaatgctaataccataggattggggacaattggtgcagaaagctattcacatgcgagatttcatttttagtgttttagattttttttatttgtttgcttagaaattgtaatatgtggctaatagtcta

SEQ ID NO: 183953 - DNA, 508 bp, Cannabis indica
ggttacgatggagagaatagaacctgaactcccttcgatccaagccgaagaggatgtccctgaggtttttcttgatacctgcgaaaacctggaatctaattttgtcgaagagagtccgattgcgaagtcgaatgtgctgaagccagggagctgggccgatgaagctgagagagacgattttaatgccaaagccagggatgtttggagtaaattcaaagccaatcaggtttgtactccctctactcgactggattttactgaacctatgaaaataggggatcaaattgttgctcaattggatttggatgaggttgaatctgaggctttgttgtggaaaaattcaattgtttgcattgtattaggggctaatcctccttttagggtttttgaagggtttatcaagaggatttgggggaatttgggaattgagaggatagctaggatgaattcgggattcactttggtgagtttcagggatgaagaaaccagggatcttattcttgaaact

SEQ ID NO: 183954 - DNA, 528 bp, Cannabis indica
agagaacaatagttcttcatcttgtcttcaacttcaactatatattttcttctaagggggctttaattaccactatattatgaatctgcttcacgcaaagattttctttattaccccactcctcaatcttctttggtctacaaatgtccttccatttgaagtagccttctagagaaacgtcctagctacatatgtcattgatcctcttgaacactctttttgggaagcatacaatcattaattttaacccaataagtatatatgtaaggaaataaggacatatatatttgattagaattgatccacctgcatgccaccaaatgagagttttaaaaccatcttttcaaccatcccttcaaagtcttaactcacatttcctaggcaactccaaataacgaaaaggaatagacccttctgaaaaccagaaactctaaaattcttgcacctcattctcagctatatgccaattggcaaatagcctctaacttgctattgttgacttgcaatcaacaagtttgagcaaagagc

SEQ ID NO: 183955 - DNA, 505 bp, Cannabis indica
atagttttaacagtgaacactacactgtacttctatgccaagtatggaatttcgtaaaaagtttctcgactgtagcccagccataggccaatggacaggtagaagccgtaaataaaattctaaaaacaacgttgaagaagaaacttcaggcatgcaaagctcattatcaagaagagcgttccgcgagtttctttgggtctataggaccacgaagagaactctaacgggacacacgccatatgtgatggcttacaggtgtgaagtagtaatcccaatagaggcaacattcccctttcatcgatgagatacctacaacactttctagaaacctattcctgttccaagaattgttgggcctaatcgaggtaacttcgagaataatgacaggttcaactcaaaatgtacaaaggcaagatctcctagcactttaactccaaagtcaagaatcgtatatttgatgttggagacctcttcttgagagagtattcccagctgtgcaaaaact

SEQ ID NO: 183956 - DNA, 660 bp, Cannabis indica
tgattgatttgattatgtacaactgtagaagcagacaagtacaatggtgcactgtattaacagtgaacttattacaattcgaaatggtattatcaggacaacttgactcatctaagtgggaagtggtggtgagattgcattgcagagtatacggggaattcttggatgctcctagcacatacaatccatctctaactggtcctttcagaagaattgccccagttgacttgtccttgacaaaacaacaactcttgtgaaattcaagaaagatatcattatcattagtgagtttagagacactaactaaattctttttcatttgagggactttaaggacagaatttagatgaaggacattagagtgataagatggtaaggatgtagagccaacatgagtaattagaagcttcttaccatcacctatagcaacagcttcagtcccattgtaagccgtggtggagtcaagaggttcagacccagttgacacatgagccgtggcccctgtatcagcaaaccaaatatggtcatcaccaaaatcaggtaaaatagcagaggaatatacctgagggtcattatccatgtccacttcagtaacataggctcgaggattggcagctcctggtttagggggaacctaatttttatcaaaacggtagtggc

SEQ ID NO: 183957 - DNA, 599 bp, Cannabis indica
ttaccagcacaataccaacttttgtcatcgcaaaaatgtgctggcaaaagtgacatctcttgtagtgattttttaaaatacctcatcaaagccttattttttttattttaactcacgcttttacattacaccgtacatcaatttcattatattttatattatttctttctttatatcatttaaatattatattttatatttaacacattattttatattttttacattatttctttctctagatcatttaaatattatattttataatatcttttattttatataaacaagaatgttaaaaatattaaatggaaaaaatagaaagatgagagagaaattattaaaataatatcttaagaatgaatagtgttttgcaaagtaacactattcataatgtataattttgaattattttatctcgcttgatagatcctactttaataatacacattctttatatttttatcttttgaactattttgaaaaatattacagtgagtgttttactttaagtagaaagtggccagagaaaaaatgaaagtgaatttatataaataataaaaaagtaaccaaatagattatgagtaaaaaaattaatt

SEQ ID NO: 183958 - DNA, 938 bp, Cannabis indica
ttaagtatttaatatatatatatatatctatctttatatattaaaagtgcttatctaacgacaattattggtttaacgtttgtttatttttattctgttaactttaacggagaccatcacttcttttaattaatgctattcaaaaccaaaatacatattgcaattcctatttcttccctaacaaaactatattgcgattttcaatccctgtaattctccattcccacaagaaatcaaaactgttttatgtgatttttcatccccacttattgtgattcttctttcttctcccaaatccaaatttcaatccttaaagccccaatggtccaattggtctagagtctctcatcgttgaatcttctactgcttcgtgttctcaactcaatattgtccttactgtggcttggttcctatcgaaatgtccagaatgcattgatctccatcctaaagcaatgattttggagttctttcgttttattcggacttcattctataaatcgttttggccacaatcatttggtacaaatgtgattgcttcattctttgcaaaatttttgggatatgtatgcaaaatggcaaaattgtcgttggattttgcaactgatatagctgagttggcaggcgaggttgtggttttggctatctttaatggtggaggaggacatttgggtatttctagggctttttgattgtcatgtttcagaactttcctccaattttggcttccgacgctgagaaattgatttcatcacaaagttcaccttttagttcaagccaaatttcaaatcaaatggtgggaatttcatgttcaatgagaaaaaggccgtggagagtttgcagaagcaagagattctttcaaattgattctaaaatttttggtaaaagtctatattgatgataatacagcgtctagacagcgaagaagtttaggtagggtt

SEQ ID NO: 183959 - DNA, 505 bp, Cannabis indica
atcaatgtcaggcagtaatccagagtccactgaatcactttcctgtacagtcccagtctgaaggtgctagtattacattctgtcacttgtaatcatggtgttgagaggtaaggcaaaggcaattcaggtgaagacaactgaggaagatcgcagatggacaagaatctctcctcctgacagcagattcttctaactccggacaatgacacaggccctggaccttgtcccattattgaaataattggctttcagaccgagctccagcttgctcattgtaaacctttctctgctgttactacctcaaaagtgcctgaatggccactatctgtcctcactaacgtgcagttctcactctctgccttcacttacgctgttgccaggcaccctacttcttagcttggctacttctactcattgtttcagactcagctcacataacagtctctctaggctatacctgctgaccaaccatgaccagctcctccccaggttctattcatgttcc

SEQ ID NO: 183960 - DNA, 558 bp, Cannabis indica
cacattacaccaagttcatttctatctctaacaacttactctaatgcagattgggcaagctgtatagataatagacactcaacaggtggctacttagtattcctatgtgacaatcttgttagttggtctgccaaaaaataacatgttacacgatcaagtacagaaagtgaatttagggccttagcaaatgtagcagcagagattcaatggctcaaatatttctcttagaactacaagtttccttgcctcattgtgtaatcatttggattgatgatcaaagtgctacaacattggctgccaacccagttttttatgctcaatcaaaacatatagagattgatcttcactttgtcagagatcaaattgtggccaagaaactttcagttcgttatgttcctgccttggatcaagttgatgatgccttgataaaagctctcaccacaaattgtttctatacctaaagtccaaactcaaaatgggaattaccccgtttcgttttacggggggtatgttaggatagataactaaataatagttttctgttacatgtaagcgatt

SEQ ID NO: 183961 - DNA, 545 bp, Cannabis indica
atacatcttataaatataaaattataactcttattttcataacctaattgacttcttcttagacaaattagaaaataaaagagaggttttttataatttttgaaaacccttcttcttctccaaatttcgtgccccatagtgaagagtatttgcccgcacatttcaagtcaatactcaaatatagtgtggaagattgtgaagaatttcaacaataaaagaagattcatgtttagatccatatcatgctctgtgatagaaaggatcaagggttagaaatctaaacagaaggagacattatattctgctgccaccaatgtaaggttttctataactttatatgtgtttaatttattattttaggaaattcatatttaaggtgttagattatacttttacaattaacatacatgttagtaaatctagatcctagtaaaataaattaccaacacattgatcctagtcaaatgaaaattgaataccttaaatcaaatatgcttgcccacgaaaaaattgaaaaaaattagtggcatcaatagatggcgaag

SEQ ID NO: 183962 - DNA, 529 bp, Cannabis indica
ggtctttgtaataataataagggatattggcggctaaaccacctgaactttaaatttttaacacttaaccataaaaattaaaatttgacggtaaaacctactgaagccccattctatttttctctttacacttctgtcaaaaaatctcagttaagtgctacgtggactgccacgtgtacacgtatgtacacatgtcaaatttttattggtccacttaatattaattttaaaaaataattataaatatttaaaaaattaaaaaattagaaaacaaataattttaaaaaaatagttttttttaaactttttttttttttctttttacttcttctttctttcttaaaactttctttaaagcttaatttctctagccctcctcccaggccctctctttctatctctcgtctcggcacccaagatctcgtcgaagctggagcttaagcacccaagccctcaccgaagcacccaggccctcgctgaactcccctcgctgaactcgaacctgtcctctctttctctctctcaatct

SEQ ID NO: 183963 - DNA, 532 bp, Cannabis indica
aagtggggttttcatatctactaccactctcgtgtcctttttttgtaataagaaactattttagcttctgggtactctctgattctgagaaattcgcttgatgaaagtgagtgacgatggttttgtgaaggtccacatctgtattttcatggctggttttggaatcattgtggagatatgaaagtgggttttggagttaagagagagaggagagattttttttaaggggtattttccttttaatattttgcatagttgatacttaaagtgagagaaagtgagtggaagagaggtttgaagatgaagctatagtaaattcttgggattgctttcttaaaagagaaaaagacaagtttctggtttctgagtcttaaaggttggtgcttgaggttgtttttactttcttttcttactctcagcttcagaatatgaaaaagtgtttccttttttctaatcatccttattaactgtgtttcttataaattagatgctatgtatatttatatatgcctatttgtataactaggctatc

SEQ ID NO: 183964 - DNA, 605 bp, Cannabis indica
ctttgcattaagggtctaatgttctatagggtagaaggtgtcaactaggcccactgatggggtaaaatataatatttattgactttgggccaattgggcgaggcccaattcacgaagagcatatgtacaagcggggaccatttgaggatgtaagatggcggttaaagtagggaacaaaccctgacaaggtggggccctttgtctggacggttacgtgtactcttgttaatttattgttgatttttttttttgttattgttttgatgttattttcatgttccttttatatagtttttttattattttcgtgttgtttctatgaaaaactgtaaaaatgtaaaaaaaaaaaaaaaaaacttcttcaaatgtaaaaatataatcttttttataaaaaatagtatcttatgtaattatcccttaaaaaataatatattaaatgtagcaaatatggtgagaagatatatataaatcttcctaaattattattttctagtatatttaattattgaaaatgaggtattttgaaatggtgaggtttaaggtgtgtgtgatttgtaataccattaaaatctcacacattctggtacaagataaaagagtcttgg

SEQ ID NO: 183965 - DNA, 641 bp, Cannabis indica
aggtaaaaaaacacaaaacaacaaaaaaaaaaaaatagacaaagatacggtctgtacggaagttttaatattttacagtttttagatttattacataaatatggtattttatgttatattcttgttatttttcatgtatttttttttatttgtatattatttttatgttatttgatattgtttgttgatgtttgacgttgtttcttgttatttcatatagtctttttgtgtgttttatatgatactgtaaaaaatataaaagaaaaactttaaacgtaaaatgtaaaatttacaaaattggtgctttatataattatccttaaaaaaatacactacaacaattttcttcatttgcggcaaaattataagcggcgggccatatgcgccgctaataaaggcagtattagcggtggattccaaattttaccgctaatgtcattttattttttaataaacaaattattaaccatttttagtttttgttaaaaaaaattattagcggcggaggtccgcaactaattgtatgagcggcagggcccgccgctattagtctgccgctaataagtgggctggaaaatttccgcccattcagttcaaacattttaaaatacctattagcggcaggcctcaccgcaaataag

SEQ ID NO: 183966 - DNA, 691 bp, Cannabis indica
ggacgaccgccggttgtcagtcagcatactgacatatttgattttttacaattaataataataataataatatattttaatttccttaaacaaatatgatatggacatatgtttagatcaagttgtaacctttcccaattcaaaaataattgtaataacctttcttgttccagctgttgttgataagaaaatatcctagaaagggtaagaaaaccaaactaagggcaacattactaaaagtattaaaacaaaattgataactcaaaataatatctgtttttgttgatgtatatctcttccattgaacagctagcttgatcattaatataataaattaagtcaatcaagttgaataatctccactatgaatgtgtgcgtataccagtacagtacgtgtgtgtttatacctctttaaacatttccgccttaatttatattttgctatgtatatattgtaatatgtatattatttgactatgattaaaattgtagaatttgctataatatgttgtatgaccagctgatactaattactatttaaaaaaatatccacaattcaaacacgagtactttcactctatatacagcagttaatggagcttattttttttactataatatataacagttaaaatttgatgtaagttatgtttttattaatgttaaatatagtttactgtaaaaaaaaaaa

SEQ ID NO: 183967 - DNA, 930 bp, Cannabis indica
atatatatactaactatagattttatcataaaaatataactaaaatgtaagtgattttattacatattttatctcctatttatgttgtatttgtattattttaattttacaaacataggacttgatatgaaataaaagtagataattatccatgtataaaagattgtattaattctcatacgaaactaaaaaaaaaatcaatataaacatgatgtaaaattaaattattaatatttttttagaaaagaaaattattgcatttgaaaaatataaacactttatataatatacacttctaataggatatattaattaaaaaatgttttagtaaacactattatgttaaaaaaaatgatgtaattatatctaatatataaattttatactaagagttgcacatgcaacaaataaaaatattttatgcttctgtatccactaatattcagggacagatacacttatagacttgtgggaccccagtaaaaaaaatgcataaaaaattaaatatttttctttttatttgataattatagcacaaaaaattttaaaaaagaaaacctataaaaataaataaattaaatgaagtaaacataaaaaaaaaattaataacaatatttatataaagaaaattagtaaagaattaatatgaggtggcattctaatttttttttatctattttatttaaatttcagtgaatttagttcatttgactcatagtaagtttttttttcctttgtgaaaatttcacattatgagtaattgttaacttaatcttgcctaattagttattatttaaaagtcgactaatattatttttaatagtacatctataaatttataatttatttattagcaatatctatagttttttaagagttggattaataaggtttctcaatagtatacatatattattattattttaggga

SEQ ID NO: 183968 - DNA, 800 bp, Cannabis indica
aaatagttagtaattttataaagaaaaataattatgtttacgacttaatatttaaaaataattttttttttcagtaattatactctcaatctttataaccaacgtatgagaattagagagtgtaattaaaatctcaaattatatactagtgttgaaattttgtgaaattttacaaaaatgagaagtgaagtatgtgagtgaatagagtcccacatcggatagaaacacttcattagaggtgtatataatgtgcaaatttggaacttaggttggggccccaagggtacccaattttgtgtacatgggtgaggactcacacaccagacatccacacacacgggctttgccattcgtccaagctggcgggcgggtgtactgtcactttatttttttggagaaaatttatttattatattattattttttatttaattaattaaaataattttaaacatgtttaattaattagtaagacgatttctcactctgtatttttaataacattcacatgatcgttcacacgatcccaacgatcagaaaaatgactttcttcccattacttcattctgtgcgtttctatataatgcatcagaaccaacaggagaaagacatcatttctcacaaaaaaatatatatgatacatatatgattataatacatatatattctaagcagtagtacgattattgggtgtgatattttgaaagttctctatcgtgcaataaagctccgatacagtgtaatcaactgggttgttttatcttcggaacgatgaggctgatagtgttcctgcacagtta

SEQ ID NO: 183969 - DNA, 579 bp, Cannabis indica
ttggaggttggattgccatggctgttacttttggtttaactaagcttgttggttctactggactataggaattaagttatcatttttaatatattattattacatatatagatatacatcatatatacataaagattgaaaaaatcggttttacatgaccaatatggtagtgatgggactatatatataattagaatgaattaattaattgttaaaaaaaaaaaaaaaaatagaaatgaggtaaataatgtcacatgatatagtgggtgattattggcctattagttcctatatgtgatgtgccactatatatatatttatatatattatgatgcatcatcacatatagtaatgaataacaacataacgtgtcatgtacgtatagtgtgtgtctttggtacaagtgtatgagtattgatttaattatcattacttaattgatataccataaggttgtaaactttaatacgtgtaataataattttataacagatttcttcttgtattatttctttatatttgcttttaatttgtcaatatatatgtatatatttcgatccagttattggtgccaaaaaa

SEQ ID NO: 183970 - DNA, 549 bp, Cannabis indica
cttttccgaatttcgagttttaagccattatacaaccccaaggaccaaggacctgtcctctctctatctaatctatacccttataattattaacatttaataatacaattattatcatcaaaaatttatagtacacactctgcaaaatattgtttcaatatagatttttagtcaaatattttaagaccacatggaagttttcaaaaatttactttgtcaaaaataaatttaaataattatttacttcttatataataaaaaataattgtgggtgcaactaaaatattacttgaaattgttctcaattttttttaaaattaacatattattgtaaaactgtttagggaaagtgtattgtagaattagagaaattaccataactgtagtgaaatgacattttaagaagtgtatagtggaattaccctatcattattactactataaatgcaacagagcctagaactgagtgaacgtaaccccattgcgcacgttaggagattcagtaaataccagaccaaatagagtcggcaaagcgaacactttaataac

SEQ ID NO: 183971 - DNA, 569 bp, Cannabis indica
tcaagagcttaaaaagtgggacacaaattacaatagcatttttggaggaagttgtggaacctgaaaataaccagcaaaatgcaaactttggcatccatccactatctctttacctgctagaagtcatctataaatgatataggtgcacttttattcaatttgtcgattatgtcttggcgaacctaaaaccggtttagatatattattttagtgctcatttgtttaagaattttggaataaggctcatgtgaggaaaccaataggaagttggggggtgtttgctgactggtcctttcatatatgtagatgaaatcaaaagaaatgacgaggagaatatgcttgttatgttgggcggtttggcgaatttgaattgaagtggtgtggaacaagattaatcctttggtacataatgtgatacattggcaactactacacttgatcaatggttaatagtacaaagtaaagacactaatctgttttaaaattggacatttgactcatattatggttgtactgtggataaccagtcagaagaacgattaaggtcaacgttgatgatgtattttttg

SEQ ID NO: 183972 - DNA, 538 bp, Cannabis indica
tttattcgatcgtccttcgacaaatatatatgatttgtgatttgctagtagctagctagattagttgcacatgcatacgtataatcatcttcaatttgaattgtggcccatataaatgcgcaccattcattcatttgtagaaaacaataactctctctgaaaagcatttatgaacctatgtcccagctcaattagttttgttgattcattactcaaataaatgagcttgggtaattgggtacggcaggtttttgtaatttgttagaattttaactgcattccatctcaaaatatattagtaacaagagcagtaatcgccatcaatctaactagtaatgtgagattctttaacatacccttcaagacggtgattatttttgctcaccggccaatcttcaacgacacaattacaagtgtatatttggctcactagcagttcttttggcacgttttcttggactgaagcacttggctcacatacactttttcgcatcactattcccaaaattcgaaagtcagtttttttggctggctcata

SEQ ID NO: 183973 - DNA, 642 bp, Cannabis indica
aagtagtacatatgttccatgcaactttagcctaaatacattaaagtttaacagaagtttaggtcagattgaaaattgtttcttacacataatgtttataagtaacaacagagagaggagcaaggatattataccacagaaaagggaaaacttatatctttgaacacagctttcacagcaagcaaagaagaagaaggcagttgtgggagacaaaccacatgcctgaccaagcgggtatggctacccgtcttggatataaattataattcaatatacttgacaacacgtccaccttaagtttttggattctaaaaaatgacttttcacattggcataaactgtttgaaatcaatcactttgggtaaaaaacaaaatacacctatatccatcatttccccattcaaaatccaaactgtgatatccacactcagtcatgcaatctataacaagaatagcaaaatcgatttggattgtgaagctaaaattcaatgtaccaatataacacgttttacaccatgataataatagatcaacttgaaacaaaccaaaaagaaaacatgattatcagctagcttcttcctaaatcccccatacattggtcttgcaactaaagctcaaattaaataacaatagtcaaaacag

SEQ ID NO: 183974 - DNA, 552 bp, Cannabis indica
tacatataatacaatacactactatacaatacaatataatacaatacactacaataaccacgatgactaaatgagctcttaattacatactttattttcacaatacaaaaacactagttagttgactaacaaaattttaattttggtgactaatattttagtcacgataaaatatgcctaattgcacccagtgacatcattccacattctataaaatatataaaggtaaatataactttcttgctaaacttatttattattgtaattgtgttgagaattggaatcatgcatgcatgttggttaccttcacttcattatattaatctacaaagccaaaggcatcatcatgattaggaagacttctctttcagtagctacctagctctctcaaccgcaaaaactttaaatttctttctacaatccacgtaagtactatatatataaatatatattatataaaaattccttgtcctttaaatcatcatcatcatcttatctaaattattattaaactaatgatcaagaaacaatatgcaccgactcttcttcata

SEQ ID NO: 183975 - DNA, 560 bp, Cannabis indica
aaaataaaaagattttaacaaaactaatatagatataccataatgtttaaataatttgcttctaattctaaaaaaaaaaattaaaataaggacattaatttactaacatagtcttattatttagggtcatttgctatatttttttgaaatgaggacataaactaacatactcctatgatttggggccatttactataatttcccttaaatataattaatgatggttagctattgtatatatagttaactaaaatagttatgtgtgacgtcgtcgttttaagctgtaaagacatatatggtttataacaatgctttggtggcctatttttggcaccactattataaaaaagggcattgatgtctattatttttactgtcctattattattagtgtaattaaatagtgagttctttataatttaataagataattttaagaaatattactaacaaatcataaagtgacatctatagaaggtactggacactgatgtttaataacaatgctcatttaagatatatggtatatatttatttttgtagttgtgagtgtgattgta

SEQ ID NO: 183976 - DNA, 605 bp, Cannabis indica
attttttaatttatggtatgagttatttggatagttttaatatgacttgaattttgattgcaatttaagttattatattggttgctatgtgaatctccgtaaaattacaaaaaaactattgtgaagtgtaaaaataaaaaacaaatatttaaaaaaaatcatgttctataattttttttttttacttttaaattttttaattgagataaaaacaaaaaaattactttcaaaattttcttacaatttttttttatcaatattttatcttggaacacagacccagacccaaaacgagattcaaaccctaatcctaaccctaatttatactcatatcccgacccaaacctcgaacccaaataatttacacccaatcctgaaccccagactccgaacccaaacctacctttattaagaaaaatcaaactgtgaaattaattactaatattcttatatatattgctttcaaaaaaaaaaaaaattaataatgatcttatattgaataaaaagtaaggtatgcatataataagttaaatgataaattatccccatagcaattctaagaggaccccatgcagttataataattctgattttttttagtcagt

SEQ ID NO: 183977 - DNA, 628 bp, Cannabis indica
acctgtggcataacaggcaagtctgtaggaaattcggtggaatcgagattgtactgttgtgggacattggttggcactggttgagtatcacaaatctcaaccaactttttcctacaaaaaatttgaataaaccgttagatttgaatagaaatgaaaatatagaatgagtttattaaagatataaaatcacttacatacagttattgtgtgtgtacatcgcgccatttgttatccttgcagtggaactatgcaaaagtgtccacagcacgggaaagttctcccgtctggggatcaacatatctttatataatataaaaaaattagaaaaatattcttttgaaaaatatgaattttttgacaaattaatatgttgaaaacatcataccccgctcacaatgtggccaactatggtcttagatcctcatccaccttgaatcttcatctgtccttggttttttgcattttgttcggctcttgcctataatttaaagtaatttatgttagcgaaatgagcgaaaattataagctaaatggatattcaattttgcaacttttcattttatacctgctattttgggaattttccagtatgtgataacctctgcccacacctccagtgtcaccatat

SEQ ID NO: 183978 - DNA, 793 bp, Cannabis indica
atttattagattttgccatttactttttttaaaaagtggacatttactaacttagtttctaaatttaggaccattttacatctcaacccttataacaatataattttaggtgaaggttgactaagagtttttaattatcactcatcttaaacaaaaaaaaaaaaacaatagaagccaagccacaaagtgttgttaagaaactcaaaatgcccaaatgtataagctatctaggcccaccaatccccaaatctaatttagtagcttatattaaaaaatacctcttttatttatcaattaactaattctacatctaattttatatttaattaaaacatacctctttttatatgtattgtacccaatataccctgacataaggaagtcacatggagagtatattgaggtgacataggtaaaattggtaaagtgttttaaaaaaaagagataaaaatgataggcttttgaaaagagggtaaaaataaaagagtataatataatttgcacttaaattacacacaatttatacatataatgctataatggcatgtaatcagtatggtccaatataattttaagtaaggattgtataatttttaattatatggttgagattaattgtaagtatatgtaattttaatgagtatgccacaattatatattattcatattagggtaatttgcgtactaaattctctcaatttttgaagttttggcacgattaatctcctagattagaaaaattagggctaaactctcaactttcataatcgttttgctttatactcctgttgcg

SEQ ID NO: 183979 - DNA, 592 bp, Cannabis indica
ggaaggttgtctccatctttcaaatatctgatgttgtatgctctttctgtttttcctctattgagagtagcctacatttgttctgggagtgtaattatgcaagaacaatttggttcggttgcaattggagcatgagaactaatgtcactacggtttcaaattgggaggagtggttacagtggttttcaaagacggataacaggccaaccaacctggatctcaatcagttcttgggaggagctgctctaatttttgagagtatttggaaagagaggaactcacttgtccatgagaggaagtcaactccaataaaggtacaaatcgattacatcaatagtagacttcgagaattggtcacaatccatgagccaggctgcctctccaactctaaatagaaaccacctcctgaaggatgggtggcttgcaactctgatgttgctattgggaactctcagtcaacgagggtggctgtctttcaagatgccactggagccattctcaacatcctctcgttccgaacgaaccactgtgaccctttgcctaggtaaggtttctgctatctacgaaggagctgcagctgctgtcaagcttg

SEQ ID NO: 183980 - DNA, 569 bp, Cannabis indica
atcttaccttgattctgaattcaggtgtgttgatcaacttgaatagaaattgctgctcgatgatttataggcccctaagtcacaacatttgtcaaaattgataagtgatacgctaaattacttttcgggaacataaaatcaaaattaaaagtttccctatcgatggatagtgtgaaaatatactaaatatcctaaaacacaaaaaactaggattccaaaactactataaccagtaagccagatttccaaaatagataattggtttttagggttttgcctggggaaacagttaatcgattctacaaggctgcccaaccagttaattggtttcttgtagaaaaccctaaaaacttcactaacaactcaattttaccacaaatcgtatcaaactcttcaaaccacctaattaggccacaacaaatatatttcaagcaataaaaacaattataaagcccctaaaatgaaatcttccattaagggaaaaagtttgagctcaaaagctcaaacctcctaagctccatacaagcaaattaaaatcactcaatctagcatcaaaaactcaaaaacag

SEQ ID NO: 183981 - DNA, 618 bp, Cannabis indica
aatgaaaggatcagaagcagcccaatatgatgaagaggcccaacaagcatttgatacccctgctgctgactaagcagagtatatcctctaataccgttgcactgatttggagaggattctgctttaacaatattcataatagtggaccccatagagaatatttttgtaacaatataatcttccagtatcttctttccatgtatataaatatagcctttatggcagtgtaaatattgagctgtgaaaatcaatatagtaatatacagaaaagtttcctttactctgttttccacctttcaagcttgataactctaggaattagagttattttcacattttttaactaaaatttgcttagttcttaagtttttaattaatttagtaagctttgaattattattgaatttatttgctttttttttgtaattttatatgtttttgtgtgttttgtaattattttattataatatgttatgtggtatttatttttaatttaattttaattttctaattaattttatgtatttttaggtgtatttggaagaaaaagattgggattaaattgaagaaatattggagaaatggagccaaaagtgtaattttcaaagaaaatcagat

SEQ ID NO: 183982 - DNA, 526 bp, Cannabis indica
aattttatgacaaaattaagaaacaattaataaatacaaaattcaatatgaaatgaattagttacaagtattaagatttaatgaacattttgctaaatcagataaatttaaaatataatcatagtatataaacaccttaattcactatctatgttccctaacaaaaaaagagattatttcacaaacacacaaaaataaataaaaaaaaattaacaaaaatacgattttatagaattttaaatatttttacgtattttttgatgttatttacagaaaatacggtcttttaatgttgtactcttgttcattcgttgttgtattttttgttatttgtatgtttattttttgttgttactttgatattatttagttgttaattccatgttccttttatgtagctttcgtgttatttttataaaaatcgtaaaaatataaaaaattactttaaaataaaatataattttttaaaaaaatagtgtgatatataattattccaaaattgaaccactactcatttccatttatg

SEQ ID NO: 183983 - DNA, 464 bp, Cannabis indica
acttcagagcagctcagtgcataccatcgtttgctaaaggatgggaggtatgttgctacagtacatgcacatgttttagttcttcagacgttacatggttgcattgggtagaaatgagtttgtttttttttttttttttttttaagtaagaacaaaaaaatttaattgttgtgggtttcttaggttatccaatgccttagaaatgcttgaagatatggaaaaaaggggtttgttggacatgaacaaggtgaggcattatagctgttaattatctttcctttatgtagaatacccaaatttattggatcccctgctttcaggtctaccatgcaaggttctttaaaacctgcaaattcaaaaaggctgttaaagaagcttttcgtttcctcaaactgatccctaccccaacattgagtgcatataacattgcttatgtctgtctgtgcgacttcacaagattcgga

SEQ ID NO: 183984 - DNA, 564 bp, Cannabis indica
gatttttggcctgcttggactaccgtcaccggagatgttaagtcggtgctgcacgggagaaggcaaaaagagagtgtcggctagtaaaaattaggatttttctattttagtttttattttattttgaaaaatgtttaaaatggtggttttcgtggctgattgacaacattgggggctggggtggctagggtcgactaggaatgttggatggttgggatgtggttgggggtcaggggtgtgcatgaatcgatccaatccaatgagaaccgaccgatccaatgacaatcaaccgccaaacattagatatccaattgtgatcggatcagattgaatgttatttttaaatatctaattagatcggatcgaatgttagatgtagtgtctaaaaatccaatatatccaacatccaatcaaactaattagtactttcatttagtttggatgagtaattatatttgtattgttatacgtaaaatctatatgtatatatgaaaattaatattaaaattttactatttatttcttggatttgatggatccagtccaatccaatacatacttgac

SEQ ID NO: 183985 - DNA, 526 bp, Cannabis indica
ccgcttctgagctagagaaaaaattcatccaacaaggattgatcattgctcgatcaatttttgaataaattctctcctctggcttttgtttgttattccaggtgagaaatgccccagaatatttcagatcttcaaggttgcattgtgaaatacaatccttaaatctctgagaaggtatagcatgagctcttctaccaattctctcattcacaaagagaatctcattaaaatctccccacaccagccatggatctgcaatgttaatggccaagccctccaattcagaccataattcttcccttcttttttcatcattaaagccatacacacaagtaacttgaaaattccccactctctgtttcggaataacagtacaatgtataagttgactcgtgcggagaccaatgtcgatagagtaaacatttggttgccaagcaactattattctccctttatcaagccaagggttatatagtgaaacacaaccttgaaaaagacttgtaataaaactcacccatatcttatc

SEQ ID NO: 183986 - DNA, 584 bp, Cannabis indica
attttggaaaatacaattttattattaaaggttgtgtatattgtcaataaaatctctacatgaaccttgttgtgatgaagttattataaaagaatttacctgagttgattcatattccatttctcataataaatacttatatgcaaattttgtatgggttctaagtatatgtaactaaactattaaaatatgcattttttttattttttctacattcaaagattaattttaacatagaataattacataatatattattttttataatttttttacatttttaattttatttttacataaaattaaaggatagttacataatgttcttcacactaaaaatcttgtgtcttagcattttttagctcacaataaatacacatttttatattattaataataaacttttaatacatattttttaagtataattttaccattagttattcaataaataatttgtattattaataatacatctaataatatttactatttattcataattactaccactaaaatagttattctatatattagtagtacaatattaatatttagtacattgtcaatgaaaataaatagat

SEQ ID NO: 183987 - DNA, 543 bp, Cannabis indica
gatacgatcagggttttcgcgatcaggatattaaagggacgttcgcctttttcgcccgatagaaatcatatacatcatatacttcttgataaaggtttaaatcatgcttctatagtattggtatgtgtatcagccaatatagtcatcgtaagcgcggtatatttcggccggggcctgggtaatgccatccttttattttccgtttttgctttaacctttttaaccatgggtatcctgtacgctacgttgccgcgccggaaactcgttcttcaacgtcagattatctccagtttgaaggctaaaaaggccaactctaaagttatcgatctttctaccaagcagcacatttctatagagaaggtacagggctaattattctgttcagcgggcttcttatatttattgcattttgttagctttgccacacttcaaaaatataatatatgcaagatcaaatcgataagattgtagccacggcagaagagagtatgaaaaaaagcaattcgcaccttgaagctgaactcgtgaaaaatcagggcaggc

SEQ ID NO: 183988 - DNA, 654 bp, Cannabis indica
agacaaaaaagtggagtagtatttattttttggattgttggttacaactctgaatccttattttagggagagttgttttgtttatgatttgtgaacttttccatttaaacagttatatattttatgtgttagtatgctttcatgcagggggagtattttctatactctattatttttgcttctaacacttgatgtaggttttcttctaataaaatattttgtcaatcaaaagtgctaaagggggagaatgttaattctattttttgcatctttcatttgacaaaaatattttataatatatttatttaattcggctgaggtgtgtatttaaatttaatatttttgtattaattgatttttatatggaatgaaagttgtctaatttttctatttatggaaaataagacataaaggataagttggatgactcatcctatttctatctatctagttatgctaatgatcttgtgtgagtttcctaatatgtttgatcagtatttcttgtgaaaaaaaaattgaagcaagtacttccttttctctaaaaggaaaactacacacttactgctcacgattctataggggtacagattcgaaaaattcctaggtctgattaaagaactagttttagggaattgtctagtgcatgtggtatgc

SEQ ID NO: 183989 - DNA, 544 bp, Cannabis indica
aaagttgttgacaaacttgacggcgctctttactgagttctttacttttttggagagggatattttgccatggcccatacgctcagagaagtaattgacaaacctgttgatgaggatgagggtgtcgtagcctatggctccgagctttgccagccagcggctatgttgcattaccacgtcgaatacgtcgccatggaatatccatacgcgtgagccattcaccttgagcgagagtttattggtgatcttgagcgatcccatctggaagcctttgaacttgcgcaacatttcgtcatgattgccgggaatgaaatagaccggtacctccttggcaataaggccgataaggtgctttacgaccgtcatgtgcgtagcaggccagtatcgcttgctgaattgccagacgtcgatgatatcgccgttgagtactaccgccttgggtttaatgcttttgaggtattggaggagctcctttgcgtgacatccgtaagtacccaggtgaaatgtctgaaaagtaccacgatgtctacttctctttttcgcc

SEQ ID NO: 183990 - DNA, 3237 bp, Cannabis indica
gattgagaaagatcttgagtggttaagtacatactcatgtatacctaatgtccaaatttgaacgatgcattgcttcttgcatactctctgacatatccatgggatctatatcaacaaaatcatttgaatggttcgtattgtagcttcctccaaatctatctttttttacagagcttgcatcagcattagcaaagagaacccccaaatcggaagatcttcccccaacctaatcaataaaaaagttgtaaggaaaagctagaagcactgaatcaatatatattaaggactaaatgaaactatgctctctctctcttgagtatccaaccaaatgattgtatatcaattactagaaattcaaattgtatcctatcatctaagtatctctgcagtagacaggtagaataaaagggaagagtgagaaaagaagagaagagagaaactttgatgaattcattaacaatctgcccatgtttgacatagctatacgaaatagattactttctaaatttacacctatgaaatagattagtaatattcccatccatatactttcctatctttaacccggtctttagtactcactttgtgcataaactaccacctagctatttccacttcaataaatgaaattcataccttattacctccagccattctagaatcactgatgtcttgttcagaagtctcaatgacagcaccagatctcactggtgcaatttctgcagaactagaagatgattcaagatctattactgaatttctatttacaggagagagagaaatcggtcttgaaatttgagattgctttccatctgaggactggaacgctatgacttggatcctgccaacctgaaattcaataaaatgggacccatgtacactttcatggtgctactaagctactttactaataaaattaataataaataatttcaacaaaccttgaatgaatcctcactgaaacaggaaaaaatcagtccaataaacccagagtcaaggagttggtacattccctgagtacgcacatctacgagcagaaggcagttgtaaatattagtcttcattactaaacaaaaataacatgtctaaaaaattgcaatcgtatcagcgcagttaacagccttttgtaacatttgtattgctctttttagcttaaattttcacatcagatcttgcacaatcaaattgaaatgaaataattctattgagaaacactcaccaacgtgagaaggaagaacggtaatatgaggatgtgaatggtaccacccaatcactctagttgttcttcctgttgaagttgtcattctgtgctaaataaagtcaaagaaaaacaatgtgaccaaaaagcaaaggcaaagagagctagttatacaaccttaaaatatcagatgtaataagcctgcatgagaccattatgttaagagagtaaactcattaaaatctagggtcaagccccatactttttaggtgtggaagaaaactaattacttcgaagtctagaaacctagaaacaggggattaggtgttaggagaaaatcacaaaaaagggggtaacctaaaaaaatgagacagaaactctcttaacattgtgcatcaataatgataatacactatcctgtattcctgtgtaatacatacaaaaaaataggatgctaagaaaatgaccattgtaataatagtagctagtattaaatgaaagcaataaggatatttcagcttgagctgaagcagcagccagctgttcaggattggtctccacacgatcctttcttctatcagatcgagtttgtggtgaggctccccaaattagtgcaattacattcccattcttgtactacactcacaaaaaccagatatgaaatattgataataaaaaatcccaaggtcaaaattttttcaaggaaaattaaaactacttgaaatatgttaaaaaaggataatacaaaataagatggaagcatcgtctaaataccatagttttaattccagacaagtcataccaagaaatcatgtacatcaagtatgggcacacataatttagcgctttaagatactagttggtttccttgcatacataaattgcagtcatctttcaagtgcctaatcttctggtgtttgctcttcatagcaagacaaacaaggaatctgcgagacctatatgcatactcgtacatattcatacataaaaatgcacacacatacacacctgtatatcagtacataaactaaaattttcaagtttcaaatagcgttaacaaacttcaaaactaagttacacaatatgaccagtaaatttgagaactaggtagaactgaaataaagaaataggagaaccactaaacttaacacccaccgattctgaaacacagataatttcaagaacccacatccactactataatcaaacatgtgtgagtattgacttaattgaatccactttcgaaactactaggaaattaacatgcaactaaaaagcaatagaggcacattgcttaacccccaatccaatccagcaaggacgctacggtttctgagaaccgcaataccctaaagcacaaattagggcaacccaaaatccgttgcatgaaaatagttacaaaactccattcagaaatgtaaccgaaaagattcaagatcgaaatttttgaaaaaatccttcaagaaataatgttgagacagaatgaacaaaaagataggggaattgaaagaagaaaaaaacctcgatatcaccaagaagaagtcccatgatctcttcggtctcggtagacaatgcatgagttagacaagtcaaccagacgtcctcggacattttcacacatgttaaagacatcctattcctcttctttctcaggttttggttacgaactttgtaccaaatctacttgtactcgtactctctctttctgtttctgtagaaacaagaaaccatcaaagcaactgtgctaagagctgtggttgaggatggagtgtggagagggatctgagttgtaagaaagccagaccacaccaaccaacaaagctcctcagtctcagtctcagtctcagacagaccccttgccctttgccccaaaattattacttttcttaaatctaatatgacccctcaaacctcattttcttgtatcagaccctccaaaattactagaaattactataaacaatcctcgtattttatttttatttttcttaatatgtatgtatttcttttctttctttcttttttttttctttttttac

SEQ ID NO: 183991 - DNA, 4530 bp, Cannabis indica
acaacagaaaaaccaagaaaataaaaatgtcacgtgacagattgagatgatccttaacatcccccctcaaacgaaaaggtagtctcagacatcttgagtttggagtcgaaggtacaggaatctttctgttgacagagatttggtgagaagatcagcaatctggtcaatggcagggacataccgaactgaaagttgtttagcaagaatgtgttctcgaacaaaatggaggtcgatctcaatatgtttggaccgagcatgaaacacaggattggctgcaatagcagcagcactttggttgtccacccaaagtattgggcaatgagaagtggagatctgaagttcggaaaggagagacatgagccatttgatctcggcagcagcattagcaagagatctgaattcgctttcagaactagatcgagcaaccacattttgtttcttggcagaccaagagaccaagtttcctccaaaaaatattgcatagcccccagtactctttctatcatctaagcacggcccagtcagcatcagagtaaccctcaagtgttaaagaagaggcaggggtgatgtgaagaccataagaaatggttcccttgagatatctcataagctttttgcatgcctcccagtgagtagaagtgggagcatgaataaattggcttagcttatttattataaaagccacatcaggtctagtcaaggtgagatattgtagagcacccaatgtgcttctatagagagttacatcagcaaagggttctccttctttgagagatagtttaacacttgagctggagggatttggacttggtttcgcaccttccatgtggagtttgacaagcaaatccgtaatgtattttgtttgggagaggtacatgccactagcatttctgtgtatttcaacacctaggaagtaatgaaccggtcctaagtcttttaaagaaaaagacttatgaagatctgagatgaacttgttgatgagcatggtgttaggacctgtgacaaggaaatcatcaacatagaccaataagatgagcaagttgttaccagtaccataggtgtataaagatgtatcggatttggaggctgagaatccccattcaagcaaagtatctttcaaggtctgattccaagctcttggagcttgtttaaggccatagagagccttatgtagttgacaaacatgatgaggttttgattcatccacaaatccctcgggttgttgcatgtacacaacttctttgaggctgccattcagaaacgcattactgatgtctaattgtttaaccagccaatttaaagacacagccatgctaagaacaattcggactgtagttggcttaaccacgggtgagaaagtctcttcatagtcaatccctggcgtttggagatatccctttgccaccaatctcgatttgagtctatccacagttccatcagcatttagcttaactttatgtaaccatttattcccaataactaccatatcaggagagtaagggactaaggaccaagtaccagcatttttaagggcagtaacttcatgttgcatagactttaaccactgaggatgttgaagagcagcagtcgtggaagctggttcagaagggattaaagcctcattgagtggatatttggtggccaagtgagctttcggtttgaatataccattgagtgatctggtacgcatggcatgagtcctcccagaggtattgtgacctgcaatatgaggggctgtaggtaaatttggttctgaggtgggtacaaggtcatttgtaggagatgggatatcggtagatgtgatatggggagaagggattaattggttatgttgtggagggtcaggtggaggtatagcaagggtaggtgactgtggtacagtaggtaatggtgtcaggttaggtggggagatagtggggttgttgaagttgacagggcatgactcagaaggtatgggaggtgtagtcattgtcacaggtacattaatagtattagtaacaggtctagtattgtggtcaaaagtttgaaaagtggaagagggaaaaggactagagtgaggtacctggtgttgagtttgagccgattgtgcagcagggaaatgcacctcattgaagacaacatgtcgagagatgaagaccttgccattaggatgctcacaaatataacctttgtgttgagttgaataccccagaaatatgcattcgtcagatctttgctcaagtttgtgagcattgtacgcacgtaaatgaggataacaactacagccaaatggcttcaggatgttgtagtcaggagccttaccaaagagacattcataggggctgctatattttaaaacaggtgtgggaagcctgtttatggtgaagacagcagaagccatggcgtgccaccaatattccattccaagaccggcatgagctaagaaagttaaaccggtttctgtgatgtgcctatgtttgcgttcagcccgtccattttgctcacttgtgcgaggacacgggtgttgaaagtgaatgccttggtcagataaaaaacgagcaaacggtcgatattcccctccccaatcagcttgaacactcttgattggcaagtcaaattgtttttcgacaaggcttttgaacttgatgaacacatcaaaggcttgtcctttggttgttaaaggaaaaatccaacaataccggctatagtcatccaagaagtgaacataatacttgaatccttctttagatgtgatgtgtgaagggccccataagtccgtatgaatgagagccaagggctttgtggctctactgttggagtttgggaatggtaatttatggcttttaccttgatgacaagctttgcagaattgtaaagaggcaatagagccactgtgggaaataagtggcaagattttggccaaagtgttattagctgggtgtccaagtttgcaatgccaattgtttatatcattagatttagaaacttgaaaaacttgacaattggaattataagtggagtaagaataatctgtttttattgcttttctgcattattacacaagttcacagactgattacagatacaattcagcttgtcattagtaattgaagcatcagtaagatgacattcgatagtagggccatttggatcaccgagttgatataagcctcctttagctttccctttgagaagaactgtccctgtgagtttgtccttaacaaaacaacaggatttatgaaattcaagaaacacatcgttgtcgttagttaattgagacacactgataaggttctttttcatggaagggacatgaaggatagaatgtaattgtattggctgagattgggaacgagatggaagggaagagtgaccaatattagagataacaagtttcttaccattgcctatggccatggtttcgatccctgtgtaaggagccgtagtgtccaaattctgagttcccatagcaacatgattggtggctcccgaatccacataccacgactcatcatcaccaagttcaggaaccatgttggtgagaaaagcctgaggatcaaaaggaatatcagtttcaactaaatgagcttgggagggaaagttaccgtatctgggagtaacccagttcttgtcgaaccggtagtgacacacagcagcggtgtgtcccgttttgaggcacacttgacaaacaagaatgcgattgccattgccacgaccaaagaaccgaggtcgagagttgtcctgggcatttcctcgatcatttccacgactgaaagggcgagaattagtgtttcttggttgttgaacagcaacattagcttgaagcttgatagacatatcagctactgagttgtggtgctcaagacgggtttcatgagagagaagaagtgcttgaacttcttcaaaggaaagaaggtcactgcgggaggtaattccggatacgactgcatcaaattcaggccccaatccgttgaggagttgaagaatcaaatcttggtcactgactggagatccagcaattaagagggcatcagcaatggactgggctttatcaacatagtcagatattgatgaattggctttttgaagatgggagaattggcctttaagttggaggagacgggctttagtctgactagagaatctgtgttcaagggcacgccaaacagaatatgaagtagtgaaggaggcaacagacgcaagaaccggttccgacattgatgaacgaagccatgagagaagtaattggtctttctttttccagtgagcatactcagggttggttgttccattgataaagaactctggggggtggacatctgagaacaagatttggtcaagatcatgaccaataactgtgggaaccacttgtgatttccacgagaggaagttctgtcgatcgagtttcagcgtaagtgaagcggagagagaattggaaaatggattccatgtggagttgggagttgcagcggtggtggtttgcatagcaggaggatcggtagaagaagattccatggacgtgagtcaaaagacgatgataccatgtgaaag

SEQ ID NO: 183992 - DNA, 4965 bp, Cannabis indica
aatgacctgaaatgtatgttggcagtcacttgttgggcgatttggggtgcaaggaatgattttgtatggaatcgaaaaggggtgcgacctgataatatagttgttgttgcaaaaacttatcttcaccaacggattgatgctcgaaaaaatgatacaacacaggcttcaagttagcttacggttggaaatgggcattgggtttctcatgaagcaaatagtgtgaggattaatgtcgacgcaggaatatttgacgagggacggagctatggtttgggtatggttgctagagacaacagcaacatgttgattgaaggacgtaccatcttagctcacgcccaagtggaacctgcccttgctgaagccattggtgttcgggaagctcttagttggataaagaaatcaagctttcaatagtgtaaagtggaaactgattgtttatgtgtagtacaagctttacagagtcctttatctatggtttctttatttggggtgattattaatgagtgtaaaaacttgcttgcaagtttgaggaatgtgttggtttcttttgttaatcgatctgacaatgtggtggttcataagttcgcgaaagttactatgttatatcttaattgctatgttatatcctgattgtttttttaatatggagtctattcctactgatttgctaccttgtctggtagctgaagtttgcatctaataaagttgttatttgcattaaaaaaaacacattatggatattttttttttgtcaaattcatattatatcaccatttcaaagtcccaatgtagaggaaaagcactactaaaaaaaactcatttttcttcactttttacgatgtgttattgtaaactcagaaccaaagttccaggcaaagagagtctatttaataactgaaattcggtgtattgtaaaaaataatgtctctacaataacaataattaaaacgttaacgaagggaaaatcactttcatttgaagttacaaacagtctttttctacttattcctcacattatataatttatcttaaacaaaatctggccatagcaactcccaataatgggaagaaatcacttttattgaagtttcaagcatgttcaggtttggataatcatgaggcttacatgaaaacatatccacctctgtctcatgacttgccaaacataaaaaaacacaaattcttatattgacacatttatttgacattaacagtcaatggtacgaaatgaatcacaaggaagaaaccttctcttcaattgatgctctaactgccttcaatagtgatggcatcaatttcttattagtaacaattatccctgtgtcaagatcaagatattttcctttagaaaaatccaatgggttccctgcagcatctgtaacctcaccaccagcctctgtaaattacgtttatcaacaaacaggcgttaaaaatacaggaagagaagtgaatcagttgctttactttactatggaaattcggatacctccctgcatcgagtatatctgctagcaggcaacttcaacccaagaaaagagaatgaaaaataagattacttggaaactgtaatatgcttaccggtcacaacaatacatccagcagcatgatcccaaatcttctcccggtatcctttatgagggaaacgaaggtatatggctccatcgcctcttgagagtgccccatactttgcctggctgtcaattctaaccggcggtgctttgacaccaagtttctgtgataaataagatgttaaggaaaatgacagcaagcttagaagttaactgcaaaatatgtgcattaccttagctatggagctagacaagtcatgcaatgagtgtgccgcttcaaaagattcaaagaacgatgcttcttctggattttcaatagcactaacatgtacctggggacaccacacatgtaataagttacagtttcaaaattcgaatgcctacttttttgacttttttgatgagaaaatctatcaaaataataattaaatgcataatgaaataagtgaatgtgagcaggcatcgaccttcactggtgaagaaccatcaagtgactgcatatatgttccttcaccaactttggcaaagaaaagacaaccaactttatcatgtgatgattctgatgaatgttgattaatggatgccaaaggaagatttggacaagcaagaactcccaagactactttcccttcatctagcaatgctaaagctatggcatattggtctcctctgacaaacctatggtacaattgtcaatgattgttatagttctggaggattttttttcaaaagaaatcaagggctaaaactctacaataccatattctgggagaaaatcctatttcctttattagatgtgggcacaagtgcaaaattatgttgggaaaataaatataccatataaagattaagtccctgaaaagatgttactgtataaactcttccccattcattctacaactgtctagatgaatgtacattagcaataacaccatctgctatccaagaagagagaacatggagagttgtaaataagggtttggtagttagctagtttattatcctttgaacagactttcaacttttcttctttgtcctgtggtgtaaagttgactttaagttgcaaaagatattcgacatgagggttatactcaagctcaaacataccacacgttattcttcaatcatggaaaaataaggtaactactcactaattatttatgtgaggatacaatattatttgaagaagatgaagataaaaaactttcaaaacgttgtatataattcaagttttgaagcttacccttttgtaccatctattggatctaaaacccagtgcctgccaacagcaccgccttcagattctccatggtcaatggctctaagcacatcttctgtgctcaatgaaggtgtatcagcatacacttcctcattcccaagagaatcatttacaagttttgtaatgcgttgtagtgtttcctggccactttccgtgcgaagatctcctgtatcctggggaagttgattaacttaaatttacaactaatgagagaaagaagatcaaggagactacggaagtccaaatattcacctcctcagccactagagagaataattcagtaggaagttccttctccaatacaaaactaacaacagcctgtgaacctgaatttagtacaagtaataaaggaaagatgatactcataattatgtaccttcttttaaatcaagatacacattaaattgtcaaattgttaaaaaaatcaacacataggaatacataaaaactaaccataatcggccacagtaacaggacttttatctgatttcgaatgaacatctgattgcaacagtgccttttgcactttctgagaaacaaacaaacaaacaaacttgaaatcaactgaatcaatatccttgaccaaaaacatttcccaactagtgttcgctaaacgtaatgaataaaactatgggaagtataatgcacaaaatgagacctattacctctagatttcactatatatatagatatatatatatatatatatatctatatatactttaacttaacaggccaaagataagaaggtacagcaaggatatgagcagaaagacgaccatccatattggcattagaaggaaaacattaacttaaaccccaaacaccataacatccaaataatattatttcgatttgcaactaagtaaatttgatcggtaacctatcgccacaattttctaatgggtcgataactacaacaacagctaaatccacacaaaagaagaaactagattaaaatctgcgtgggttttgctcaaaagatgatttgaaacgtcagatgttccgtactagaaattcattcttaaatctttaatcagtgttctgggctttaggaatacagcaatttctcatactgcagaaatagagaaactcatatatacaacttatatacagaatcaacagatagatagatagataatgaaagagagagtgagtgagcgatgcctggcagagtgtagcagcgagagaggcagccttcttggccgcagcgagctccttatcgtaagtcattggggaaaatgcagcagcagctacaactagagaggctcgtcttgagaaggaggaagatggtggaactggaaggacagagttgggctttgtagaaaatggagttttaggcagtagtctccaacaatttatagccatttttctactttctagtgggtcttaaaacttcgtacccaaaagaactagccaaaaaaaaaaaaaacactattttataatggttttggccatttggttgggagaaatgtgctgccttgtactgtcttcagctccattttcctatcatcataggttagataatgatttattaggtggtgtttgcattgatgtaatgtaatggaaatggtaattggaatatgaatgataatgtaatggaataagaattgtgataggaatggtattctcatgtttggtttaactctgtaatatactataataattgagatattttctaacaatgtaatcatcattatattggttttatgatgtaatggggattacaatatatagtgtaatgaccattataatgtaaagcccttacaaaggtttaaaaatgaatagcaaacaatgtaatggtaataatatttccattacaattctcattacactaaaccaaacatgtcataattattatagtttattattagggaaattacctcatatactgttttataaacattttttttaaattactttttgggtttctaaagtggtttgcagcgctagttgcaataggggtttctatacgaatttttgttgcaattttaagttgctaacgccagttgcaataggagtttctatacagaattctgtataaatgcaaaaaaaaaaaaactgttttagaatcgtaaaaaatagaaaaaaaaaaaaaaaaaaaacgtaaaaaagact

SEQ ID NO: 183993 - DNA, 3947 bp, Cannabis indica
attattattattattaaaactaaggtacatcatataacagctaacacctcacctaatattgatccctagaaaaatgacccctcttataaaaaatgggaaaagataaggtaatttaatactatagcaaaaataagatagacatcaatacctacctttattttttatttaatatataaataattaaatatatataaaaggggaatcccaagcattattattctctctttttttctactctttttctctttgttggccctttagcaactactagacttcaaaaaggtgatagatttagataataagggcatcatttcaacttcatagaaccaacaccattaaagtgccaacatatacataaatataaatattaagtttacataatatatgtacactttcatataacactactaacaataaaaaattagtttagtattattagcttaaggataacaatcattgagttaattaaaaaggcacatagttttgacaatctgaatttgtaatgatatgtgttaccaaaatatatacggtctaaaagttacaggcaaaattttttactttataaattaatataatattttgatttatgtatgtatttacatttattttaaaaagaatgagagaaagaaagtggaagagagattaataggataaaataatagttattattatttttttatttctctattttagatttttagatgataaggatcaaagaatgatatatgcacaccaaacctgtcaaaagctgtcttgagattaatttgtccttatattatcttttctccattatgatctcatccaataatttctatggtctaataaacataccaccaagagaaaaattaagtaaatataaataaggaccaagtgtgctcaagttataaggtagctaaaccctaataaagtaaccttgtaattactattccttttggggttaaaagtaagtgtagtatgttacattgtctcaatcaaaaccaaaagactttggcaaatgatgaaaattatagtttagcaactatgtatagtgatagcattattcaattcaacctaatcaatgtgatttttattcttattattattattatacattatcaacttaaaccccaagcaaaatgagccatcattagatagtgattgacactaaaatccacaactctattttccccctaattttattttagttaattaattaattatataattgtggataaacattcatgcagcactaaaatgagaaacttataaaaaagaaaaagaagagagagacaagaataataatacacaaattacagccacataaataaatacaaacaaagcaatacaaagagtaatacagatgatgatgatgatcaaagaaaatgggaatggaaaatacaacccttttgcccccaattttttttttatctacaattcccattttacccttgaatttctctttccctaaaatcccattacaaggacaaaagggtcattagcacattgacagaagaacccctcaaattgttatttttcttttttggaaaccaaaccaaattaagaaactaattaagcattgctcctgaaggatccaagagctttgatggctgcagctcttagaacaaattggtggtagaaagcagcaattgcagcaccaatgaatggtccaacccagaaaatccactgcaaaacaaatattaccaaatatttaattaccatcaataaaaattgttactatttattaaggccacacaagagagaagtattattattatttttattgttaagtgtactaatattacccaaattgcatctatgaaattggagaaaatggcaccatttttactatttattaatttaaaatgtataaaactcatattaaaatgcacacttttttatggtgcttaacccgttaaagtacctcgtaatatttttgttataaacatttttattgagtatcaattaattagagatattttttaaaatttattttcttaagttataaaattcaattcctaattacaccaatagcaaaaaaaaatactagacaccgtttatttttaagaattctattttctcacatagcaatattttaatttaatttataaataatattaaaaaaataatatttagggtaataatgatgatgataataatgataatagagttagagagagagagagaagatacatacgtgttcattccaagctttttcactgttgtaaataacagcagcaccaaaactccttgccggattaattccagttccggtgatcggaatagtagccaaatgaaccataaacacagcaaatccaattggcaatggtgccaaaacctataaatcaattccacatctcattattaaaatcaattataatacttaattaactataacttaatgattattctattgttcttacaggaacatgagaatctctggcatttctcttgggatcagtagcagagaagactgtgtaaacaagaacaaaagtaccaataatctcagcacccaaacccactcctttgctgtaaccaccagccatggtattagctccacctccatatctgttgtaatacgagctctgaaaagctttaaccaatccaactccacaaatcgcacccaaacactgagccaccatatacaacacagctctaatcaaagacacttttctcgccaagaacagtccgaatgtcaccgccggattaatatgtccacctaaaatcaatcaaatcaaacattaccttaattagatttacatcatcagatcagataattcatatatatgaatccattttaattatttaccagagattccagcggtgcagtaaaccaggatgaagatcattccaccaaaagcccaagcgattccgagaattccgacaccgccgcactcgtcgacgccttcgatgtttggatcggtttggcttttgtagccgatgactgttaagacagttatgtagaggaagaggagtgtggcgatgaattcggcgattagagctctgtagaaagaccatttggttagttcatcggggtcgaagaagggagtgggaggtgggtcgtggtagtccttggccggaaactcgccggcttcggttacttcaacgtctttagtcatattgaagagagagtagagaaagtgtttgtgaaaatgtctgaatgagaaagtttggtgttgttgtgaggatgagagttgtagtaaaggggtatttatgggaaacaatatgggggtttgtagtactagactctactactaataataatggtttaagattaggtttaatttaattaaacatgatgattaataatttagacaaattcttttgtggactaccctaataaaaagagaattattaaaagagcattgctactaggcactagtggtgtttagcaccttttcgacatgtcgcgttgtgattggctagtaatactcccgaaatgctattatattaaattatatgagacccgatacttaattagaccaatagcgatattgacacataggagggtgctagtcactactggtgctctttagcatttttcttattaaaatatattattagtatctagcactctttagtgtcatatcgatatcagtgtaattaagtggtgagcctcgtataatttaataaaatagattaattaagagaatatcgataactatttgtatggtgtcacctatagaaggtgatggatactactgatgttaaattaaagggcagtcatgatgtctagcgtgtttgtgaattgtaatattactattggtgtaatttaatattaagttttacatactttactttattgaagataataaaaaattattaatcaattataggatagtacctcataatgatgttgtactttggtgtcgcatagtaatactctaaaaaaagatgagcattgttattaaatacattgactatattaatgtggtgtgttatgagtgattagcagttttttttattattta

SEQ ID NO: 183994 - DNA, 11347 bp, Cannabis indica
acttagtcattgcatatattttaatgtatgtgcaacttatataaatcctctcggtccattttatactacactacgtaaggcatagtatgcgactagactctgccaaggccgcatcatcttgtgagtttggttcaagcgaggtcaactctgggagagtcattaatgaatagctcatccatcccttgaggattggatccacgtgtcgattttataggagactgatcttgagtttctaggcaaaaaatttgcactataacgcatgcccctagtttcgcgattgacagttgtgtcattaaggaaactttcagagagaggcagacgagttattgtcacaagatggtgactttttgttgtcttgttgaggattttaaaaagacagatgtaattattacttttatttctttgatatgccacgtcgtcaagacctttcggggtatgtgcaggctctctctttggagaccattagattgggaggccttaggcattcccttgccacgtgtctgcatcccaatgaataaagagtgttagtatttaaccccctaaaatataaatcgattctcattcttttttcctatcattttctaacttcactttctcatctagaaattcaaacttaagaaattctctgaagttttgaattcttgtttgctggagacgatttcaaaatcttgaggattttcaagagtgatctttgaaataattacacaaaaggttagtaattattgttttctctgaatgtccgcatgccctccggggttaagtttagagcccagcaggtcttccaaacataaaaataagatatttttgaccattgacaatgatctaacagtgaaaattagctcttagtggtgatggtcattttttagagcccaacaggtcttgctgtgggtctatttttgtaactcccttggggttaaattttgacggtgataaagaattgaattatcttctaaatgcaagttgaatcgcatcaatcagattaatattgagtgagttatgactgttactaaaagcagttcatgacccagcgcgcaggttgacatccagcgcctaggttgacatcccagggcccaggttcacatatgacgtcagcctagatgttgagtaagtgtgaaaacttccaagggatgtactttgagatgcctaagtaatattttgacatcacttagttagttttcgtgctctagcaaagctgatcatcagttctcgaagatgttgttgttctacagaaatgagagactcaaaactcttcatttttgagtgagttccccatgtccaaaataagaaatgcaaagttgtgaatttaacttctctaacttcatatattttagttattgtaaacaactagatggacggtcgaaacaaaattagagtcggataagcagaacccagtgcaccaggccatttgtcaatctgggcattggtaccctattcccgagctcctaagatctcattttgatacttctaaggtttttggacttgaggacgaggtctcctaccctatttttgatcattacagattcaatggtcacatcagatttgacatttgagcaattgaacgtagtgccccaggttgattgttaacctgggtgctaggcctaacaccaagtcaaactaggcactaggcctcgtttccaagggctcaattttgtggttttctccccgagtttgcttgaatcttcattcttttttatgacgaaaaaaatgtccaaaacactttttggtgaacttgatcagaaacaacccaggctgacaatatttcaacctggacgctgggcctacctccaagtgtcaacctgtgcgctgggtcctagttctggccctctgaaaattatatttggtccccaagaatagttggatcttaatattttcttaaaacaaagaagacactcgaagtgttcttgaaaaactccattgaagatgggtcaggttgataaaatatcaacctgggtgtagggccagccccaggtgtcaacttgggcgttgggccttgcttttggcacctagaaagtgctatttttccatgaaaggacctatttccccatgtttgatgaatacaaagaagattcaaagtcaaatctctgatctgatacttaaaaggcacctagattgatagattttcaacctgggtgttgtgtgctcggggccctaggtgctcaaaaatgaacttgttctgattctaattctaattacctcaaatatgtatgtggtatgtttagttgatgtcctaatgcaagttttgacccatttttactaagacagacccaaaaattgaaaccctagttgggaatgtcaacctaggcactgggtgaaaccctaggtgcccatgttggcttctaggctacaagttcgtgtaattttagctctcggggcttggattagttgctccatgttttaatggtttagaatattgaaatatagtgggttagattcaagttattaaagtttaaacttccattcgagagatcccgaagtcaacctgggcactggactagggtcccctcgcaggccaactgctatgacttgggtctactcaactctgtaacgtcatccttcatgccacatgtcaaatattgatgtccacgtcaccatagaaagtttccaaattaacatctacctttacccctatattttttagatcaagaacaattttattgaattcgcccaagtgcttcctatgctctttggaatcatccattctcatcgcgtagagctttttcttcaggtagagtgtattggtcaaagacttcttcatgaaaatggctgaaagctttctctagagacccccaatcgtactttcatctgatacttctcaaagaactttatcactgagactcaacaagattgcattatgagcctctgattcaatttcatgaattttcctcttatcttcaagctctttgagagtagtggcatcaagttcttcaaaaatgccttgatgaactaggatagccttcatcttgatcctacatcccagtaaacatgtcaaccttaaatctagtcgaagccattgatgctcagttcttgaaattttaaactaggttcttgaatctttagatctaatggtaaagctctgatattattagttgtgaataatcacctaactaagagcattaaattcaaagagtaaactaaggccaactaaataatgataataactcaactagtaaataatagaacaatgttatgaaggaatgttgtagcactgtaaaaatgagataagaattgacgagattcaatcacaagccatgatagcttggacctaatcccagggaagaactgccttgagaccaatctttattcaatgagaatgttgctctggttacaaagatgatcacaaataatcaaaatcaatggtgtcttgcacctacaaaaaactcacttaagggtgttgtgatcacacacatagcccctgtacatctctcctctcatcattttcttctcaaattctctctctaaatcgtcacctaaagcttagatctaatggcccttatatagacaaatatttaggctcccaaaagaatgagaaactgagctacctaactaacaaactaactattaaaacaatttagttagttacctattaagtgtctaaaatctctaacagaatctctccaacatgctaagtgtacgtttcattttgataaaaaattaaatcctataagtcacatggaagcgaaagtagcactccgttttaagaacaaagttaacaatataaaggattttgaaggaattccacaaggatctacaatcactttcttggtgactgataatacctcttacctttcaattctcaaacaattgaaagttcctttctctgacattgaagaaaaagttgtgcacactattcttctattcttctatgttgcaggctttgcgacttttactgtgtttatttgcctctgaaaatgctcttaccaacacattcatgaaaaagttttaccggttgtctctgacctttcccatttcttgaggtggctgtgattttctgattcatgtttccttttgaatttgttataattttcagtaatgtttttgttcaataattcctctgcatataacttgtttatagtgtaatttttgacatgttatggacaaggtaaatgacaaaagaagatagtcccaatacaaatctccttacaagaagatgatcaacataggcatgtctaaactttacaagaagctccaataaaaaattacttaactcttctgttaaaaatctaatttaattctaactataattaagcagcatcctaacagagtgattcataagagcttcattttttatcgagcaaggactttaacagcaaaacgtcacaacaaataacccttaaacaggtaaggatcaaacccaatagaaaccaccacatcgatgaaccaaaaaattagatccaaacccttgacaaagcaaactaaacagaaaggcaaaacacaacaaaaacaaagagctattacaacaacagaaaataagtacttacaatctttgataaaagccccacacagaaaatatgtgcataaaagtatcattttgaaaaaatattagtaaaactattttttccaagatactaaattaaaaatatgataaaacacaattacctatcccgggatcgggatgtaagaaataaagaaaaaaaaaaaaagaatacttaatgtgcttagactatttttgtgaatgtaaaaattgtgttatatttagtgtaaaaaaatttgtaatatatttttatcaatttttagcattatgttttattgcacaattaaaaaacttggtacaaaatttagtatttttattaaaagtataaaaaaataataattttatcattaattttattatttaaataataaagaaagatattataactaattcataattaatattatagtcaaaggaattaataataaaaaaaaacataaaaataaataataaagttatacatttatttattttattttgcttaaaaataaacatttatgtgagttaaattttacagtaaatattgtgtcaaattaatattactttttcacaaattattagaacatatttttttgttaagttttagctttttatcacttatttagttgaagttaggtttccaaatatttaaaaaaaaaataaaaaaaaaaaaacaagttaggtatttgttttctacttagtacatccccaagttttgtgctttgatggaaatcaagaccaaaggcaacgttaattaacatacatgatgataaagcccttacaatataataggctgtcaattgcatgccttagttaataaggcaatggtgacccaaaaccaatactaaattatccctctttcactatcattaagcaaaaattgcttcatatcttatctttcttattgtattatcatcatgtttcccatatttgtcgtttctctttttctatttcgtgcaaatcaattaaaacaccacaaaaatccatagtaggaagtaacgtgaggatcgcataaatgggtccaccgatgcttagaaatgtttcccagtgacaagcataaattaggccagatttgggctctgtcgttttattaacttagctacgcttacgcccacttgctcataaaacggaaagccaaccgtgtttgtaaacaactatttcaactcacggaaaattcgtgcacttcaactcagctactgaaggcaaatggagtttgtacaaatatacataaacaggtaaatcgatgaaacatttgacttggaaaaaaaagaattacgagagaaacttataggttgtcacttgtggtcttacacaatgtttcaatattcaactattgattcgaaattgtaagatatcagtaatcaaatagaatttgagcaataattgtcttttcattgattaataaaagtctcaatcaaaggttaattcgaagtaatctgatctgaccgattcattattatttagattcgggtaaatcagatacatagtacatcataaataaacaccagccatacaaaattaaacacctctttatttatttatttatttatttatttatttgtgagtattgctataaggtactaatattacttagtattttttccacgtgttatgttgtaattagttagtgatactttttcaaaaaactattatattaaataatatggaactaatacttaattagaccaataacaatacatagtagcgtgctacaactgatccatactgcaaattctcaaattttgggtaaagagattcttcagtataataaaaaaaaaataacaatagaaatcgaatttatcttaaaggtattactttagcccttcttttattattaagtgttctttaacgtttctctttatttatttgtaaaaaacaaaatcaaataaaaccataaaccgccacagtgtctttccttctcagctatcgggtatacttgtctttcctttgactccatttttgaagcgtaggtgctctcctttataaaattaacaataatcatctttctctctctatacctctgttcactaaggctgaaaatgctttaaactacaaggacttcttcgatcaatggctctttaatggaaccgcagctccgtcgattctgaaatacaaggtactaaaacttctcaccaataattgtttggcctgcttcatcatttttaggggtttttttctctcgttcagcgacttttaactgttttcttggatgtttggaaatagtcccaagaatgtatcaattggttttaagttgaaagctcaatccctcaccaaaataagtatcattgctagaatcattgtgttgtttacaaattcaaacagtacgaagttatttttgtgtatttgtgtgtggaattatggcagaatagattatttgaatttcagtgctgattttgctttagctatgttgatttggtgtctgtgtgagttttcagggagtgttgagtgattgattatgctctaagactctgaatttggtagtgctacgatggagttgttttctcgtgttcatttcaatattttgagagcatgcgttggtagctggttttggattgcaattttcttgttgttacatagcggtaaaggggggaattccaaatatttgattggtcttggaagctatgacattacgggaccagctgccgatgtcaatatgatgggttatgctaacacaggccagattgcagctggtgttcacctaaggcttcgagctcgcacatttattgttgcagagcctcaagggaaacgggtggtgtttgttaatcttgatgcttgtatggcctcacagcttgtgacaataaaagtgcttgagaggctgaaagcaaggtaatcattataataattctttagatattactctgcatccgtaggtacacaatgtttttttttttcaaaaaagaataaagttttgcaaaattttgagactaatatgatttgatggaccgaaattcttataactttagtatgcataaaaaggggaaattttccaatgccccataagccctgtagcatttttgtattaaggacttgtttaaagggaacaagaggttcaactagattcttttgttttaaaaataaacaaactaaattcttatatgttacttggcagatatggtgatttatacaacgaaaaaaatgtagctatcagtggaattcacacccatgctgggcctgggggctatctccaatacgttgtatatattgtaacttcccttggatttgtgcgtcaatcatttgatgtccttgtcgatggtattgagaaaagcattatagaggctcatgacaatctcagtccaggatcaatttttgtaaacaagggtaaggagagaagattctaaagcttttacttaataagataaatttatgacaataaatattcttatattaattttaaccttaacttgcaggagagatcctagatgctggtgtaaatcgcagtcctagtgcctatcttaataatcctgcagcagaacgcagtaaatacaagtatgatgttgacaaagagatgacccttttaaagtttgttgatgatcagtggggtccagtgggtagcttcaattggtttgccactcatgggacttctatgagtcgtacaaatccattaatcagtggggataacaagggtgctgctgcacgatttatggaagattggtttgagcaacgtggagtttctgatgaatttgctttcgaaggaattcctcgaagagtctctaacataatttcaggacattctgaacgtgagtcttgcatttctcatttacttggagtttattatcttaaagggtttatgatgtatggtcctgttcattttatttatttatttttttaattttttagttctcagtttttaattattggaaaagtggggcaagattttatccaaatatgacatatctttggataattatttgagatctgtctgatgcagaccatgagttactggagcttgctgcatccttccagtctccttctggtaaaccagccaccaggactttaagtgttgcaagacgagtcaggggtgttctcaggcaggctaacaagcctgcatttgtatctgccttttgccaatccaactgtggtgatgttagtccaaatgttcttggggccttctgtatagacagtggcttaccttgtgacttcaatcatagtacctgtggtgggaagaatgaattatgctatggaagaggaccagggtatttatttatctccatgcgatgaatttttggtatgtagcactttcatatcttatacctcaataattgcccctcattcttgatgttgtcagttacccagacgaatttgagagtacacgtattattggtgagaggcagttcaaaaccgctgtagatctattcaacaaagcatctgaaacactgaaaagcaagattgattatcgccacgcttacatagacttctcccaattagaagtaaagatccccaaacaaggaggttatgaggtggttaaaacatgcccagctgcaatggggtttggctttgctgctggaacaactgatggacctggagctttcgattttaagcaaggtgatgatcaggtaatttgtgaatgaagacattttaggctatacatttccctacgctgtcgtactatatattcctgactgttctgtgctggtataattcttaatgatcttatatcagggaaatccattttggaagttggtgcggaatctactaaaaacaccaggcaaagaacaagttgattgtcaacatccaaagccaatcttgcttgatactggtgaaatgaaagaaccatatgactgggcggtaggttttacacttgtttggatatatttcttttaaaatgatgtcaagaggagggaaagaatctttaagatgggtttgatgattttaattccacgatcaaactatttagaacttgctgttgtaaattgcgagtgaatagcatagctgtaaatcatggttaaccgttattgaagataataattattttagtttctaactccattattctgtaagttttatctagagaagatacgcacaagtgagattcattgcagctaagatatacagtaggaaactgtacgtactcctagttattttgtttatagatatcttaattatccccatagctcctggtagctccatctgtccttaaatgacaacagggcttttaaggcgtactagctgtatttttaaggcatagtctgcttagaatgtatcaaagcctttgaagatagactgcaacaaaaaccacttcaaggctaaagctactttaaattgattatattctcaaattacattttatatctgttttttgtattaatgcatatattatagtgaggattgctattattttttcctaacagattgatgctccaactcaagaaaatcatgtttgctcttttttctttttcagccttctatacttccaatccagatcctgcgcatagggcagctagccattctcagtgtacctggaggttgttgcttgttttgcttttcctggtctttttttataatgttttaagtttggtcctagcttcactttcactagtaggaccaaatggagtcatttgtattatttggctggtagaaatttaactttgcttttagaaacatataaatctctctatctggatctgtttctttaggctgtaccttttctgatatttatttttctcctccaatttcacacagaatttacaaccatggctggtaggcgccttcgtgatgctgtgaagactgttctcagtgctggtaataatggggagattcatgttgttatagcaggattgacgaatacatattctcagtatgtcactacttttgaagagtacgaggtgcagagatacgaggtcagttcttgctaatggatgtctaaattttttgggagtgagaaataggaaaatggatgaatatctggcagatcactaagcatgtttagtaaaacaatatacatcttgctacttttgatgactctagtttcaatatttttcttgttttctcttgataaagaacatgcaaatacacatgatacaattacaaaatagataaagaggtgttaactgatcatagtaaccttatgttttggaaactacatactacatagtactgttctcattctacttctattgatttttgttactctccagggtgcctccactttgtatggaccacacacgttaagcgcctacattcaggaattcaagaagctggcaagtgcactcgtcgccaataaagaagtggaaccagggccacagcctccagatcttctcaataagcaaattagcttactgacaccagttgtgatggacgccacgcctcctggagttaattttggggatgtcagtactgatgttcctcagaatgctaccttcaagagaggtgacctggtgaaagtggtcttctggtcagcttgccctcggaatgaccttatgacggaaggcacatttgcacttgtagagtttcttcgaggaaaggatacttgggtccctgcttatgatgatgatgatttctgcctgaggttcaagtggtccagaccatccaagcttagtacccgaagtcatgcaacaatggaatggagaattcccaagtctgcaactcctggtgtgtacagaattaaacactttggtgcttcaaaaagccttttcggatcaattcgccatttcaagggtgcatctagcgcctttgtagtagcataagaaatgtattcgtgtatgtatgaaagatttcagctaatatttgatgctcaacatatgaagtagcggttgtcactggtggtggattgcgcatatctatatgactagtctaattctttatcatggctagcccagaatgaagaccatcaacctaaccctttcatgaaaaaaaaaacctcactctttcacgaaatggactctgtcctgtaatgctttt

SEQ ID NO: 183995 - DNA, 2436 bp, Cannabis indica
agagagagagagagatacttaatcacggtacattttatttattgccgttagcatttatttaaactaaattatcagaaattttgggcgtgggaatagctattaagcgacctttttcttgagaacaaggccaaacctgtcagaaatttcaagctcagtatcattaggtaatttccaatcaaagtggtgcaagaaagaagccaatgtatagagagacatcttctcccctaaagaaactccaggacatattcttctccctattccaaatggaatataatcggaattgttacctgtcaagttataatcaacattattacccatcaagaacctttctgggataaattccaaaggattttcccaaaggctaggatctctttgtacagcccatacatttagaaaaatggcactccctttgggtatagtataaccaccaacaatagtagtttcttttgcagaacgaggtattaaaaatggcccaggtggatgtacacgcaatgcctccttaaacacagcactcaagtatgttaatttgggtaaatgagactcttctacgatgttgttcaatcccacaatttgtttcagttcctcattaactttattcataacctttggatgcctcagaagctctgtcattgtccattctaccgatgttgctatagtatccgtagctgccacgaaaagatcctgtttaaaaagaaaacaaaaaacataaaaagtccatttaagaaatattgaaatttttgatacatagggtataaatttaaaattatgtacgtaccgtaagtacagctttgatttcgggtatggtaatttgagtttctttatctttattttcatgatgacgctccacaaggtacgttagaaggtccttgtatttggattccttgactatgggactatttttactattcaacgctttcatctgcctagcaatagcattatcaaacaccgattggaacactttattaaccctgcttacatttcttccaattttctgtaaatcgaaccacttaagcaatggaaaaacgtcggagatattaggtttgcctagcatctcaacgagttcctctgctgcagcataaaacagaacagcatcaatagagtcttttccttccaaagaactaccaatcgtcatgcttataatgcaacgaattgtcccttgaaacgtcaagagcccgatattaattggggtatcaatcttttctttgatgtcttccactgactttctcatctcttctctcctcagccctattagatcatccatcactgtattacttagcatctcacgaaccaagatctttcttagcttcttccaatctggaccatagtcttggaaagcaatgtcgtgtccaccttgactgatgattgtggaagcaacacccatatcacggttggcaaataatgtgtctttttctttagccacttgggagactagctcctttgaactgaccactacacatagttttgttcccatccaaaacttgtaaattggaccataaacatcaaccaaagctgctaggtctatgtgaaggtcctcacccaaataaggaaggtatccgacgagcggccagccacggggccccggtggtaggggccgagccaccggtgccgatgataacttcttcccagtccatcggaaccatattaaggcaaaagctgctacagagaaaagaattaagatgtcaaacacttgaagcccaaaataattgactaagttattcaacatagttttcagttgttggttgtaagtataggtgtgtgtgtttattgtgtttgatgagaagaactttgtgttggaagaactttatatagagagattaaggacgccaatttttaacagagtattttattatgtagtagatggcgtcactttgttgaaaattattttttaatttcattattcaaatcctaggaaaagtaaaataatgtttcaatgcaggtctctttactcttgtcttcactaaaaaaaaaatatcacgtcgtccttgaataattaatttttttttttaggaaaaaaacttgttataattaattagttcaccctttcctacttttttactcacgaactatactatatcacttttatgacatgtattaattttcatacattgtttattaaatttgagaaaggaagaaaattcttctcaatttttatatgttatactttttgttttctaacttaatttattttaattttattaattaaaaaaaaaaaaaaaaaaacaacatatgctctttaaaaatctataaatagaaaataattacatattctaataatagcaattttgtaaaattaaaatattttacttttattagttatgtaaataaaataatatgattttggttttctttccaaacaatttagtaaagagcataataaattattgttttcgattattttctattttaaatcgatacatttctttcattgattattct

SEQ ID NO: 183996 - DNA, 6297 bp, Cannabis indica
gagagagagagagagaagtataaatgagggtattgaaatattcaaagttaaggtgtcaagtgtaaaatatcttaaattaaaaccactataaatacatacacagcctctgacaactataccctgccctatccacctcacgaaacaccctcatggcaacactttacatgtataaggtagtattttgatttgggtatgaaaataaaacaatatactataattattaggctatttaagtattttactttcaaactattacaactatcgaatcacaccccttgaaacttttagtccgtcaataattcctctcgaactattcacacaatggtaaaatacaaggccattgtaaaattttatcatatgtaattaataaaatatcgatgggactaatgtatcattgccacataagtgtcacaagttgttaacgtaaaaatttggccaacactcgctcactagattggtgagaggagatctaagtttaagtaaatgaatagagagacacaagagatttatagttgttaaggttgaaaaatattttaccacgatcttaatttactactcatgtatgttggattatgactaatctaacatcttaatatggataaccctaaaaaataacataaacacataaaggaattagtaggtcattacaatgattgcagagaagttaattgactcattctatttagttctcctaccctggattctttttatcatagagtgtgatcaagaattgaacttagattctccttcgggttgtagtagactacacagtcttccacactatcttgagtattgctttatatttgtgagcaatcacttaataccaaggagcacgaaattttaagaataaatctaagataatttcaaaactctaagtatatatataatataatagctcttaattttctagttgtctggcaaagagagagtcaaaacttgttgttatccgtgctttcgacaatggacatgtggaacccaagtcagaattcaaggcccatcaataggtccctcagcaaagataaagtgggccaagcccatttggacaagtctttctaggaatgtattctagctctgcaaccataaaaccttctgcctttggcaaatcgttccttgatgcaagttcggtaccatgagatttgatggacgagacaccgtgttcctgaaagactcttccagttttcctttatattcctatgcacaaataaggaaataacagttgccagatcttgaccaagcatcgtattatattaaatggggaaacttcttgaaacaaatatcaaacaattaattcatagttaattgcccacaatcaaagtacatggtgttgatcaaatcaagccaaattcgacttgcttaatcaccaaatcttctccttcctgggttggacttcacgagacagcccaagtatgttattcactgtaaactccccaatacagggaaaagagaaactaaatgtaattctcaaactattataagtacccatcgaatcctatggattaagggttgaattttcttgcaaacttttctcaagaaaacttatgaaaaaggcttttcaagctaagaactactgaataacattgactcgtggactaaggctaattaataccccaaccacgtaaagaactatttgtcttttctttactcttctttattagttatttatttctttagctcttatcgtttatattcattttttgaaaatctaggtaaatagtttgatgctttcgttgagagctaaaggaagcagtgagaccacttacagattgcatccaagtaatcatggtcctcacccgaacaaagtgtagtctttttttcactaaagcaagggactctaatgatccacacgaggcgactatagttgtcagaaaggtcactaggatgaagattgaaactgagacgatcccatcatcaaagatgcaaaatctagataaagcagttttgaggacgctgaaggtaacactcaggacacacctgaggatatgcatgaagatgacccttaagataaggtttctgatggtaacattggagagcagaaccaacttgacaagtaagaccatataatcatcatggctagacaacttcaactggcaaaaagcaggttaacttgacaggatcaattctatgagcaactgctcacaaagatgaccagaatagaggctgtaatgatttctctgactaagatagcccctgacgcacaagcttctccaacaattgatgcccttgagaaagtagatccaaaagatcctagaactttatgtgttcgtaacactacaacaatttctattaataccagcggagacaataccggcgggccacatctgcccctaataatgggataataccggcagatgtgggggcccgccggtattatgggtttttgaattatttttttttaaaaaataaatataaaacttattagcggcgggcatttattaataatggtggatagcccgccgctaatatgagtgggatataaagtgcgggaaaaagcctgcctttcccattcaaaactaattagcggtggaccaatactggcgggggtccgccgctaattataataataccggcgggacaattaataccgacgggtcccaccggtagttctttccctataaaaataactcaggaactagaacgcccattttttcctttctcccatttttttcatgtccatttcctctctttctcttcctatccaccacccatcaccttcgttccaccaccgtccacctctgatccatcaccgtccaactccgttttgccaccgttccatcaccgtctcatctcaccggtattattttttttttttgaacaaggaaggaagttctttattcaaaacaagaaaaagaatacaaagcacaaaaaggaaagccgccagccacaaggagcagcagccgcaccctttaccaactatccattacattaacaatataatcgaataggggttcatttctcctgctattacagctttaaaatctcagcttgacagtcgacttgacctctttactaacaatctcagctagcttacatttctgctcaaaaacacagctatttcggtttgttcaaacagcatacaaggtagttaaaacaatcgcattcaaaacctgctccctaacattatttgaaggcctggacaaccactatctgatgttgtttggccagatgaaataaccacaccaggacataatctctttgatgatcttttgagtgaggcagcagctataaaataaatgactatgtgtttttctctcagtaccacaaacaggacagttctcattagaaattacaatgaatctgcttatattatctctagtaagcagatgttcattcactaattgccaaccaataaacctgtgttttggtaatatcaatctatctcatatgttctttgcataatcaacagtcggtacttgaacaaaagaaacataaaacagtttagagtggaatttacctctcctcaccgccgccttaacatcatcttcacctataattgagcagagccagagaagctttttgaaataccaactagcatcttgctgaaagttgacagtccatatgctttgccgtttcaaatatatagcatcaatccatctgacccataggttatcttgcttgctcgaaacagcccaaagatacttagccattaaagcaatgttctatttcttcccttccctaaacccgatgcctccaagtttcttggggagacaaactttctcccaagagaggatatgtaatttgctacggttcccattcactccccaaagaaaatccctgcagcatttatcaatggccgcagtaactttttggggaagtaagaaaaggttcatccaatagtttcgaacacccagaaggacataatggatcagttgagctctgcctacaaacgagagattcatggtagcccaattatgcaaatgtttgtgaactttatcaatgatgatcccacaatctgagaacctccctttggtgggcctgagatgcacaccgagatatttgaggggaaactttccttcatccatttgaagaatgttcaaaagattatgtttgccaacatcttgaatacccccaaagtacacagtggacttggatttattagccactagccctgtagtttcactgaaccgatggaaagcctcattaacaagtttggcagatttctcattacccctgcaaaagataattagatcatccgcaaaacaaagattgactaggccaatggatttataaagagggtgaaaaccaaaccctttctcctttgacttctggataagcaatctagtcaaatactccataatgagcacaaaaaggagcggggacataggatctccttggcgaagacccttctcgcctttaaaagagccttgaattcttccatttagcataagagaatacgaagcaccgtgaagacagctctgaatccacttgataaactttgaaggaaaacaaagaccttttaagagatcagcaacaaataaccagtccacagtgtcataagctttgcttatatctatcttcataacacatcttgaagataaattctttcgggcctttcaacaagtcctgcaagattaggatgttgtgagcaagctgcctatgtttgacaaaagctcattggttctcatgaatgagcacaggcagaacttcagagagtcttgaacaaatcatctaagagatgcacttgtatatagtgttgcagtaggcaataagtttgtagtcactagtattttgggggttctcagtcttggggatgagggagatggttgtctcgttcacctccttcggaagatgaccatgttgaaagaaacccaaaacagctttagaaatatcatctcccaactttgcccaaagccctttgaagaatcctgcaccataaccatctggtcctgggcttttggcagaatgaataccaaatagagcctatttcacatccttctttgtaaatggttgaattagtttcacctgttgcatcagatataacttgttacccaaatcaatcacatcatactccacccttctagtagcagaacttttcctccccatatagttgcgaaagtgatttaggaaatgatcaatgacccggtcatactcatcaacaaccttcccatcaatgctataagaaaagatcttattctccaatttcctctttttcataattgaatggaaataactcgaattttcattcccatatcttatccagttcattttcgagttctagtgaaggtagctgaaatattgtttttggatctcctgaaaagtctcataaagctctctctcctttctcagtgctgtaacattaccagggttgctggctgaacattcttgagcactaaagtaggcttcttttgcagctttataactattgacaaggtcttcattcttggagacaaagcatcttttaaggacatgttcgatcctaaacagttgttggtacaatcttttaagatccgttgaagtcttctttccccaagtacttagcactttctccttgtagactactttagacatccagtagttacaaaaccgaaaaggcttgaaacccctgtttttgatcgctagttgtttaatgagacgaaagttatgatccaaaatttcccccatctaaagctagcttcagtattcgggaaagcatcaatccacttctcattggcaaaaattctatccaacttagagtgcaccaggttccccttctcatgttttttcgaccacgtgtaaaacgagccagcagatttcatctcttcaacctgcccctgagccagccagctttgactatcaagcaactcggtgtccttgattctcctcccaccatatctatctttgaagctaaacatggcgttgaaatatccaatgataatccaaggctcattcaagtgaccaattcctccaagtttattccaaaggtccttcctatcagtaatcaaatttttcccatagactactataaggtagaattcctccttgaatcctaccattttatgcttgcagtgaaccatttgcttatcttctagtaaaaccttcacttccaccattttgtccttccaaaataagaagattctaaacgagatctcctgactagaatagaaattccaattcggattattcctaaccaaaatctcaactttgtcatggtgaatttcggtctcaaagagagctccagaacccactttattcatcttgcaacattcaaataactcacgctgtttctccactttattcaaccctctcacgttccaaccaataatattattgttatccattagatgggattgatatcatttccccctcaatctccttcaacac

SEQ ID NO: 183997 - DNA, 5987 bp, Cannabis indica
tagttcctaagcacagctcaaacaaaaacacaatcagcatgctgcctttaatattctcatcaactatgtatccatctctaaaacagcttatccactactcattactaaaattacaaacatgataagcttttagttgaatcttccttatcttagaacacaaacaacaactgaaattctcttgagctttctcattgataaacaccaaagcttacacaatagcaagctttccagagctatccgctcaacaacccctccaggttattattacctagactaaatcctttaataaaatatccatcatttatcagaattgacaatagttaacaaaatatcaatttcgcaaccaatttattcatttgttttgataaatttatatatatatatatacactatatatatatatacacaaacctatacttttagagagaatacgaaactaaccacatatcttcaggtaccagaggttcttcacgtagaaatgcttctaggcaggtgtacaaagaaagaggctcacatcgggctttctttgttacaggtccatatttgaacacttctggcaagttttctagaaattgagtatcataataatccaggagtttctgtgaccaatcaatatatattactattgatgttgatgtcgaggagatcttaatgggtttttcttctccatcagacaaatcaatacatgcatttttttcatcaaccaactggagtggtagttccggtaaagttgctgctttaaaagaagttacattgttctttactaaactagaggcgtgaaattcagtgcaagctataccagaaccagtgtcatcctgtggttccaaattagtggttgacttgctaatatcagatacatcaacatctacatgattcggagttcttcgtagcgatgagagcattctttgaacatttttctgtatgtcacctctcgtaattgcatcaccacatgagattgacaatataactggtgttccaaagggtttccatcctgtactatggttgccactagcacctctaagaaaattaaaagcaaaaaagcataagacagcgcatttttgaaaaatggaaaaactactagaaagaacctaattgggtaatatagatccataaatatcttttggactgggactacaagctcaatactaaagttactctaataatgagtgcctgagctacaatttcatttacatgatataagaaattcaattacagaaatacaataattttgcaatataagcctccctaagttaatttgcatgttagattgatcataaagaaaaattgtacttactgttctctacggcgatgtatcaactgaagatattttcggttcttcaataacttaggagttttgtaggcagcaagacgttcatcatctttgatggtggacaatgatattaatggatcttctaaaaacctctgaattatatggctacggacctataaaatgtcaaattaaatcaccttaattacatgcaggcaaatgaaaatcgaaaaattaacagtcaataaaatgcaacaaacctccactagtaagagtttctcactaggcttcaagaaacaagcattgctaagtgcctggaccaaatccctacaacgtccctgctttgggactgtaacagtgcaagaagttggcaatgcacttccatcacatgtaaaaactgttacggtcatagttcgagtgatggtagattgaagaggcagtgaaagatacatgaaaggatcaaatgtgacagagaccttattgcacactggacaaaccagagttgatttgtattgaccctggaaaatgaataacccataaatgctctacacaaaactcattagatagaatatatgctattttcagcattgtgtatctataaatatatgtaaagcatttcaatgcataggagatgcatacacgtacaaagacagtgatagatatggaatatgatgccatacacatgtttatcactgacaaccaatattttcagaaatattttcagaagtatgtgattgaatgacctgttgggcattttccgtaatcacatcattcaggcctgcattcccaacatttgtaccagacatcaattacatattatcatcaaaaggtgtacttacttggcacacatcaacaattatagaatcattacgagcaatatgatttgcccaatactcatcagcaacttgttcatcaggtcggccatcagcatctctagatcttatgtaaggtttgtgcttaacacgattcagatcttcatgaagaccatctagcagaaatgctaagagctcctgaaaaaataaaaactttaaatctatttaatgcctttggttcatgcactgcatgtcatcattttttgccttcatataatttgagcaaacctgagaatcgtgctgattgtatccactaaactgtggtgcaaaacgagcaagctttgtcttgaaaggtcgaggagcaactggcattcgtccgggtgcccacagctttcgaagtaactcgccaaatgctagagctagctcaccctacaatataaaccacaaagtcacaagaagattgttcccatatacacgagcattagtaggaaataatttaggagaccatcagttgaagaaaaggagatagaatacattacttatgctgatctcaaacaattactagaacgaaaccccaagagagtacattttgaatgaggttatattaaaagatcatttgactccataaaaacagcttaagacatcactactttagatttcgaattctctacttccagcagccaccaccttattcccacaaaatatagatggacaagattaaacagccaacaaaaggaaacaatcttcctttaccaaacacagttacagataataatacctaatcaaatttaaaaatcagtagtaaatgattctctgaagtgaatgacaattctttttgcttcacacaagtggaattcagattcttaaaagaataacaaattcatttacataatcattatacataattctatgtaatttgaacttagcatgttctttttatctaacaaaagcaaaagaaatacaagaacatcacacatttattatatcctaaatccagaagaacatcacatatgttatatagtatttgaaacttacaaccatgcctagagggttttgccagtttatctcttggtgataatcttcccgaaaatattttgcaaactctggtgtatgaacaagacactgaatagcactgttcatgaaacaagtatttccaagattttgcaaaccaatcaaaccaccaggagacccccttgtactaacgccactaatcccataagcattatccgactctctagctaaagtaacgttctgactttgcgcatgctctgtgttgtagcttctagatgcacccttgctagcagataaacctcctgcaattgataagctcgacttagaaggctctacaagaatagaggtagcttccttctcaagggatccattgttttgaatagaactcatgcagctacccgatacagtagtattcacatggttaaggacctccaccagaatctgctttaagtttattacagaaaaaaaaaaagttaagagacctgccaaccaacaaaaactccacacattttctttctgcaaaacatctatgacaagtttaggtatagcaaatataagcaagtttaaattttgaaaatctatcctttgtcatcttacccattttattgtcaaacaatgaagatgtttctaataaacaaacagagcagcaaaacatgataagtaatattatgcatcaccaataacacatgttcaagcatccctgcgtttctgataataagtagcaagttaaacagttaacttatagaagactagtccaacaaaaaagaaaacaccttgacatcagacaacaaatttattttgaaactgaaaaattatgcgattttaaagatgtatttcaagagtaacagcaaagtctgctaccagttgttccaacaacaaaaaccattgaaagctagataagattacaccatccacacttgaatgagaatatagcttaaaaagcataatacagatagtaaaataatgactcacatcctgatccatctgtatattcgcatcatccagtgttttctccatgtcattcatcaaagcatgctttcgacgtccatagtaatcccaaatgcacacctagaagacagaaaagtaattaacatttccaaaacagcatgaaagaaagctcaagatattttaaataaatacataatatgcagtgggttattaaaacatatgaagtttacttgttctatgttcagatcaaagatctcacaagctcttctatgaagctctccaatggattcctgacaaaaatatttcaatgtcaaagtttacaaacaaaattagcaaataactacagacaccttacagtaaaggagattgcagttacacaaaaaatagtggtaaatatctcatgtcctggcctcatactgtaccttcttgcttattcttatggtagaacagtcaccttttggcatcataagtaattgaagtcgcaaaggatagacttctacagccaactcagtttgtgagagacctgaactaattactttccttgccaatgtgggcccccctccatacctatcagcacaaagcattaaagtcatttttaatacctctaaaaacactacaatttaaaacacaaggatctaaacatgcattacaatcaagtctattaacattaattatactgacagatttttgttttaaaagtgcacacgacagtgttaaggggccgcgaatacaaaaactataccccaagtgattgtcacaaggtttctctacaatttccaggagttgctagaaatcaaaccctgggctatgagcgaactttgtaagagacaaaagccttcacaatgtaaaatatgctccgcaacatgagtccttcaacatgttaggagtacccaacttaatataacaagagctcatatcaacaaactatttaaagtttctaggactttcaactacaagttggtaatgatagaagaatagtcctatccattatctagcaacaatagcgcgagaacatcattctaacagacaatcttctgcctttcaatatgaattcacatgttcaatagaagacatgaaaaccttgtaaatagaaggaactttcactataagacttttgttcattccataccatgtatacaattggttccaaacttcttgtggtagcaatacataatcacggccttcaagtaaggtatcatgtacatcgattcctgcactggaatcctctaaggtaacttcagatatcaaatccgaattatcaataccagcaggctttttcaaggtacttgagccaaccaaatcacaatgttcagacaaggaggaagcatcattgggattgttcggctggtcttgattgacatactcaatccagtgttgccaccatctgttgggaaaaaaatagagaatattagaagctctcacttttaaatcttcactcagaaatgaaataagcactaggctgtcaagctccatagctcgaggcatcaatgatttcaaaagcacgaccttataatttacattagacttcaaaacaagaatccaaatcaagataacactaatggaattcaacacaaaaggggttatgggagagagagaaaaagactagacacacacacacacagacaaagaaaaaaggagactgcgagaattattataaatgggttgtttctccaaaatctaaccgccttctccttaaaagtgagacaagttagtgccttacaggtctccccatatcatatgctgtatcaacacaaacaggttaaatataaagagtactctacactaaataaataaactaaactattacactgcccctttccacctgaattcaattattccagaatgcttcatatggacaaaaaatattacatcgaaattcccctgaaaaattcacttactatttagcgactaattttcttccggatgagaaaaaaaaaaagaaaaataga

SEQ ID NO: 183998 - DNA, 5987 bp, Cannabis indica
gagagagagagagagaggcagaaagggatgacacactgacaccagatggcagtagaaggggcaaaacttcgccaaaaaagattttcaatgcctcctttcagtcacatattttgggatcccccaaattcaccaatccttaaattatatagtaccttaaagttgcgagaaagaaatccaattaggggcttatccttctcattcttgctgattttgaaaaggccagctagaacttgaattctattcagtgctatgtacaacaaggcacaatccttgggatctttcttcttcagatactgtattcttgccagtttctccatctacaaacaataattgggtcaaaacttctcaaattagctttgccacagcataaaattagttagcataactttcattaaagtttatagttaaatgagaagaagagagaccaaagaatagtaaaatgtaccataatgtaagaaaatataataacataaatcacttggagagtaaaattatatgttttcatccaaaatacttacacaatgcattaaagtacttagaaaagaaaagacaatacttctcttataaactcaagaagagattttgttccttttcctttctcaatgattcaaatacggagaaaatgtgaaaaaaattacttttgtacgcaattgtgctgaatttgtaaaccaaaacccaatgcccaggttacgcatttcaggccaagatggttcatttggaagaacagacccaaacaaattttcctcacaatcagagtgataggcccacacaatcagggaagaatcaatattcaattcttccatagttgctgatctaccaaaccttctgaaaaaatgtagttgctgaaactttaacacaacccagaacctgcacataaatcataaattaataataaaatccagaagcaactgaactgcaactttagggaattgttttcaacaaaatgcaatctcattctaaaacagaccataaaaacatttgataaaaaagtgttgggatatcttataaaaattaaacaatgattacctttgtccaggttcatcaagactttcataagcggagtttggtttagtcatttcactaagaagatctattatagcaagaatttgagttttttcttcagtggttattgcagctaacttgtagaaattctcaagtggctcaatgaaggcatttagttcagattttgttgatgaggacattaaaattttattagaggaatcagactccaaattataagcaaactcggacgaccctatcagaaactgataagatggtgtggttaaacctccatttccaccccagttgaatcctttgtcagatgaacttttttggagaagtccttcaaaataatttgacagaggaattagtggaataatactgctacaatcctctgtgctgcatctcctctcagaagcacaaccaagggattcaccaagatgcctcacagctgaaaatgcacgcttccaattgcctaaatacaataaaagcttacaacatcaccaaagttacatattgctcaaaaaaaaacattatatgcaagtttaacaagaaacaattccaagaatattttctaaatgaaatctccatgtttggttaggagtaatgaaatagagggatgtgaatatcatgaaatataagtaaaaacaaattattattttttattgtgcaataaaatgatctttcctcctaccttttcgagaaataaccaatccacaaaaatggcaaaaaagtcagcctgaataccatttcattcctttctctcaagaaaaaacaattgtaatatagcaacaataggtctgcattttgttgaaactgatggttgaatcaggaactatgttatcaccaagaaaagatcaatcattcttaaagaaaagaactcaaatgcaagatacaacatgacagtgaattgtagaacaggacaggctaataataattccctagcttcataacaaggcatcaaatttattagttagaaaagtcatggtgatacagataaggaaaatttatcgggcgtcaccactgggtctaccctcgaactatttggaatatatttaagcaagtagttgttagcataaacattcacttccaagaaaaaggaacaaagtaagtgttagacctcaagttagtagaataagatataagagattaaataaggagggtatttgagtcattgtattgagggtgaatttgtgagtgaaataggttctatatataggtaagggaagaattggggtatgaaatgtattgagtaaactctttgcatcaaaggggtctaagagctcccatcttttgtaactagcttttatcatacaatcaatatcaatcttctataatttcctactgttttggctattgttttattgtgttcttgagtttagagtccaggtcttatcagtaagcaagaaatccaataaaaagtaatattgtaaaaagaaacatataatatacttctatctacttccactacaccaaagaaaattggaactagtattaggtagcttagtcccacttctgaactagataaaagtaaacaaaattgttaagaagaagtttattctaatacctgcaaagatgttcataaagagtgcctcaggatgataaaattgtttagatccaccaaacctctccactatttctagcatgttccataaaccaagttttttatcccaaacatgctccaattgggtccttgctgacaacaaactgctggatccacaacccatttttgtattaacctttctaggagtgacaaagttgtccttgctatcatcctcaggtgataatactgccaccgcaacaatgtcacaatctgtgaatattgcagaatgaatgtcctgcgttttacttgcaaagtctaggcaacgtgtcttaagattatttgaatcaacaccagcctgatgctctttatttatgaacaaccattgactgattatagacaagtaactatcatacaccaccacaggtgttgcccttggcccccaaaggaagtcactaataggagataaagtatgagtacgcgcaatgcagcgccaaatttcccctttcattgattttccagtgtttagcaaagtctgaccaccagaccatccctgagcatatatacacagctgattctgaaggcaaagtccaagtaagaactgaccattacctaaggctaaccattttaaagcaataacttgtttatcaaggttaattttatcttctaaaatgaaagcccctgatcctgcaatgtgcacagattcccataaagaaagattgctgacaatatttgaatgagattcctcgcaaacggttgcaatcttccgtccacatttacttaagcatatagcagtaataggcccctcatgtgccataaccatgccaacaagctcccatggtgtagcagaagttggtacttcaccaagtttacttctccaaaatttcaaataaccattagcacagcctgtagccatggtatatgcaggatgactagataaattatcactaagagaagcagatatttgtgaaaccaaaccatcttgacacaccacagcaaaacttgtaacatgatcgcgactatgaggttctggtaagtgtgatgaggaaggacgtaaactaacacaatatcttttatcagaaaaagtaattccgaaaccccacatgttgcattcagcagcatttgtagtctcaaaatcacattcgcagctgctacctgataaatcataggaatgcatagtaacttcccatgatagagcttgaaacccattcatccatacacccaaaagcagaaatttatgtgactgtaagatgtcatgtctaacagaaggcaaatgaattgcaaatatattggttggaccttcctcatacggaccatgacctctaaaaggtatagtacataagtagtgacattctatatatttgccttcactttggcatatcttaacaacaaagcaatcaattccaccagcatgtcccaaaagaagcaccagctcttgatccaatatgggaggagcccaactcacgcttgtgtacttagaacatgaattatgagttccaagtttcccatagagctcccatgtaggaactaatgttggacccgaaatgcaattagagatcgaagatagtgaccaaaacaaaagtaatccattagaatccaaggaaacagccagttcaacttcagcactataaggatgcacaactacttgtaagatttttccagaatgaccatctaaatttaagtatccatcagtcctagaagatctgttatctatttgatgattattaagtgatgaatcttctaaattattgggtgtttgtgtatatagaagtgaccagaccaatgaattactaggtaacaactgaataaatgagcacattgttggtggaccagacaaacttttcctcaaaactgtggctttaccgagaaatattttctctttagaatttggtagatcagttctatgaagatgcccaacttcgagatcttgtaattcaagtgttttccacaatgtaacacggggaaatctcaatggggagacatcatctaaacaatggactgcccaaagactaaccaaccttcctggaccacacccaatgatccactcacaactgccagccttgttacgatcataatcatttgaagagatcaaatttttagttccttcaacatcttcgtatataccctcaatttccgttgcccatgttacaaaaaaatccatgcctaaagtcccatttactgactggttaatctcaattacagcagcaacacaaaatgatagccgagtggatttatgatcatccttgccactttttctgacccgtccattatcaatctcactccacaacctcactgttccatctaagcaataagttagcagcacatttctatttgaattcctagaattcccatttgagtttctaccagttgctggcctccattcaatcaaagacacaggcaaaggatgatgtagctcaactttgacatatcccaattttgtatcactttgacatacggatacacatctgctagtgtaatcattacatgatccttcagtttgcagcttacttgagtattctgccgttgcagaaggtcccttgatagaccatgtcgctgaaaccagactttgaggtccatctgctttaaacttccaagcaatttcccaaaacttgttacttcttttccatagaacaacctcaactccaccgacaattataccatctcctgaaccactccacctgacagcatccaccttactagattgaacaagtattgcattctggctccaacaaaaagaacctgaatatgagtgaaagggtttgaaatttaagttgggaagaaaattaaaccaacgttttaaatagttaaatatatttcattctccaaattacgatcgcaatgtgcaaacaaacacgccaccacatttactaatatgaaaattcaaagctagcaggaaataacatcttcaagtactatcacccattcaaaaatccttaacaatttagttcaattcgtagggagtttagtacctttcaaactcgccgagtcatgacagaaaacccaaacacagttttcggcagcggcggcgagctcgccgaccgagggagtagccggagaccaggataccgcgttgacagccaaggaagggtcaccggatagctcgaagaactgccggaaaatgggtccaataacggtttcattcggggataatggagagggaaagtgggagattactaatagattggaagctccgtaggcgagccaggagaagtcagcgaagttggggagccaatcgattgtggatccaggtgggtcggaacgagagggagccggagggatggtatctgatctgaaaagagaaagagggaggtgttggatcgggtcgattgtggaagcagaaggaaccgagtttgtgtccgccattatggttttggcggtatgatcagtcctcgtcggagagtggagattggagaagatgagctaaataataaacgtgcacattaaaaaa

SEQ ID NO: 183999 - DNA, 3603 bp, Cannabis indica
ttatgtgtcgtgtttttatattaacaaattcatacttatatgtttgttgtgtcgagccacttaagtccatatttttcctctcatgcccaaacccatatttattcgtgtcgtgacatgtcgtgctcataccagtttcatgtcataccaaaaggcccaagtcaaatgtacaactttaaagtaaaggcatatggtggggcattttcaagttagaacaatataagtccgcatcttaaaaataaaaaacgggaaaattagcatcattgaatttgcaaataaataagaaaagtatatttcataacatgatttacatcctcgtcagtataatatcataatgaagtttctactgtcgagtcgagaactaagatacatggttgttatgtcaaagcagagtatcccatcaactaatttagagttacgagtgttgatatacacagatatttgatatctaacctagagcctaggacaccaggttacactaggttacacaaggcttacaagtgaatgaacagactaatatacagacactaattagtcagtaacgtcactctgtgtcactctcggaatctatgaagctgaattctctgtgtccatctagcttgataagcacaattccccgattctcttcactccattcaacaccctctttctccagaagtttgattacctgcatgtagggataatgtaagtttgttttgatctctttaagttgggtaagtgcaactttctggtaaaggacggttcatatctaaaggttgcatacttgaatattttccatactattaattgaaataacttaaaaagtgttttctcaatctgagtcattttggaaggtcttactagaatagttactactctagtgttttacacattttgcatttgaaccgggtttgagggataattgggtattagaaagagaaaagagtgttataccatctatggagagctgtttctagctgtaaatagttaatatgtaaagttataatttctaccttaatccattctcctaacaaaaatttatctaattgatcatatttcctaatgaattaaaaaacagttgctgcatgtaaaatgacttgtttttttgtttttccttttccccacaccttatttcttgttataaaaagaggaaaacaataaggccacaacacataccgcttgttttagctttgacctgcccataccatgagtcccgcatcctgttataaccctgaggatctgaaccgctggagaatacaaatgaaaaactggtcaaagcaagataacacgacgtggcacaaacaagagagaagaaagtactttagctggatgacataatgtcaaataccagcctaatagaaagagcagaagacagcacgggaaaaaattaaataatcaataggttcttactttgtgcataagaaacaaatatgagatgcatttttaagagcctcattgctggactaacatgttgcccatgcaaatcaatagttatcacattttgtatactcttgtttctgcagattagcagcaatgcgttagttcatcaacaagaaagatggaaccagtaaaagaaaatgctgaagcttttcatttttctcttttaacaattaactaacctagctttaaaaatgtccttgctggccctttcactagctttctgtgccaatttagtttgttcctgcccctgcccaaaagaaaatcaggtatcagttttaattatttgtagatattattactaacataaatgcaattactcaaccatgctgaaaatatagagcattctttctcaagtattaataccttctccgaaaggtatgcagcatattccttcgccccgtttgaatatgctgttgctgcctgcaaaaccaatctgctggtcaataactataaataactactcgccaaataaataaaattgcaaagaaccatcttactttctcatagcaggacctaactgagctccattgttgatttgcagtttttctaaaagcatgatattcatctcctttagctacaaggacaagaaaactttacaataactggtgaccaaacattaatgggtgcaattttaatcatttaaaataactgaaaaacaagtagaggacgctttttaaaaggaataaataacaccttccaattaagtaaaatttttgggtccaagaactattgccaataatgaaaatacaaaatataaaagcatacataagtccaaccagacaaggtgttccgtgctgtattgcactctgttacgagtgtttatttctattttaaattactgatctatttttatattggcagttgagaaagaaaaataacactcagtagtgtactcacgcccaaacaacagcagtaagtataatacatgtacccttttaatccgctcagacaaaacatctacaactaaaattaatgatactaaagaagacagtagttgatcactagtatcttgtactaaaaccacacagaatctttccataaccaaaaaaaaaaaaaaaaacacagagaatctaccaccgtagttaaaagataagaaacattaattcaagggaataatatactaagttggttttaaaatggtattattaaacaataatgtactaagttggttttaagataaacaatagcttacaaaaatgatacaatctcttaatcaaaacttcagaaatttgcaagtgtagcagaaacaaaaagtacagttatggcattttaattatgataaattagggaaagtgggattgagaatagtagcttataaaataaatcaaattattaaagttgaataccataaatatcctgctgtgcagttgaatcactagacggacaaacatcaaattaggggtcccagcagctgcaatttctttgcaacatttctccaattcattacttgcggttgatatgtaggactcttggagatattaaacaaagaatccaacacgctctgagagagacctgattcagtactccttttgttagcaggagaatgactatcagagctagcaagaacatccttatagttcctcctacagtcaagaaaatattgttctcaattctaaagaccacagctataggaaactgagattgaaattgatcttgattaaatgagatggatttctagtatttataataaaattatcatccattctatttttcatgataaagggaaacccttaatacctatgatttgaaacacatatcatgctggttaacacactatcacaaaatggagaagaatacaaaaaaaaagtaaaaaaaaattaagataaataagctacctgcaaccacaatccacagaccatatactatcatgtagctcacattcagatgaaagagaggagcaatcagagaccttatcagtaagctgtcaaaattcttgaaagcattagatacttatcaaaatgtttaaaaaagaaaatatccacaaatcactttgtatataataacaatgggtagaaataaattacatagcaacgtaccaacttttctacacatcaattagagaaagccaaattactcatttgaagaaaaaaaacaaattgagagagagagagagagagagagagagagagagagagagagagagagagagagagagagagagagagagagagagagagagagagagag

SEQ ID NO: 184000 - DNA, 4271 bp, Cannabis indica
aaaaaatatatagtatttttccaaaatcaataaaaaaaatatttttagaaggggataatttgtttttggtccttaaattaagtggaccctaagcacaaacttaagtcgtttataccaaggtcgggcttgaagcttatgagaattcccacttaaaaatctatttaatttgataattaacactaaaataaaaaaaaaaaaatcactttaataagattaaagtaaggaaatttatcgtttatttaaaaagtattcttattaaagccacaagatacaattttaaaaataacaacaaaaaaataacactaaaaaaatacaatcctaaaaaagtaaagaataaggttttctttacatatcacataaaaaaaacacttaactcattttgatacgtacacaaaactattaaaacaactctaaagatcaaaagcttgagttaaatatcatctcaaattgttaaatgattagtattagtaattttcatttttcaattacttacaaatttttaattgttgaccaaataggtggctaccttttcttacaatctaccagaaatctatgagcttcactttgcagtcccaatggctggtgggattctctgcacactcaatgctcgacaagactcgactatggtgtcaaccctactagcacactcagaagccaaactcatctttgtagaacatcacttactacaaacagttcaaggagcatttgatcttttatcacaaaaacatatcaaccctccaactttagttttactaaccaaattcgaatctaagaacaaccactcatacatgcactatgatgatttgttagccattgggaatgatgacttcaaaataattaggcctaaaagtgaatatgatcccatcagcataaactacacctcaggcacaacttcaaacccgaaagctgttgtttacactcatcgcggggcgtttttgaactccatagccatagttttggttcataacatgggatcaaggccagtgtatctatggtcagtgcctatgtttcatagcaacggttggtgtcttccatggggggctgcagctcaaggtgcaacaaacatatgcattcgaaaagttaccccaaaagctatttttgataacatttatttgcataatgtgacacatcttggagcagcaccaactgtgttgaacatgattgtgaactcatcaaaagactgtcttcaccacccgcgtctcccccataaggtggagatcatgactggaggctcaccgcccccgccacaaatcattgcaaagatggaagaaatggggtttgtagtaactcatatctatggcctcactgaaacttatggtccagctactcattgtgtatgcaaaccagagtgggatgctctgcagccagaggaacggtatgcattgaaagctcgacaagggttaaaccatcttgggatggaagagatggatgtgaaaaatccggtgacaatggaaagtgttagggcggatggtgcaacaattggtgaggttatgtttaggggaaacactgtgaatgagtggatactttaaggacttgaaggcgacagaggaggctttcaggggagggtggtttcatagtggggatcttggggtgaaacatgaggatggttatgtagaaattaaggatggttatgtagaaattaaggatagaaagaaagatgtggtgatatcaggaggggagaatgtgagtacaattgaggttgagaatgtgttgtatagccatgaagcagtgctcgaggctgctgtggtggcgcgccctgataagatttggggcgagacgccttgtgctttcgtgacacttaaggaaggatttgatggtgttgttaatggtgatgagattatcaaaatttgtagagatcatttgcctcattatatggctcccaagactgtagtgtttcaagatttgccaaagacttcaactggtaagatacaaaagtttattttgaaggaaaaagcaaaggccatgggcagcctttcttgaacctttttaaattgtaatgctcattaatactatttagtacagttggattaatggttataaaataaatctgctcaatgtacatgagcactgttaactttcagtgaaaattatagagattaaacagccaaatgatgactggtaattaataataataattatctttagttaatgaaattgtgaaccaaacatggagaattgagatgccagaagaatagtagagatggtatgcttaagatttttttttttcttttttgaatgggattgttttctggtttagagagatcactttgttttagaaacagtataacaagaaaataatttacaataataagcaagaaaaggaattagagagacatggaagagtaatgcttagttcttcatttacaacacaattaattattcttaattgattttgtatttaagtttgttgtattagcttgactaagatatgccattgttgaagttaaaaagtcaaaaaccaatattaatggcatcaacaaagacagtaatacaaacacaatcaaataaatcaaccagaaaacttaatcaaacaagacaaatatctgttttgttaatagaattagtcaaagaccttttctgagttttcaatatgacttagtttattaatattacagtcttgtaatctctggccaattcatttcactctgcttcctctgctaagtctaacaatgatgatcaaacactcattgactcgtttcgctcgtgctctaaatccttctcactactccaaattcaatcgttcatattccaagtttgaagaaccagaatcgtggaaatcaatggatggtttacttcgttgctctgcaaattatgttcctttgtctcccataggcttcttagagagatcatcaaaggcttacacagacaatacttcacttgtttatggctctacaagtcacacatggggtgaaactcaccaacgttgtcttaaactagcttctgccttggccaacatgggaatttcacgtggagatgtggtatgttaaatgttgatttattttctttttttgaattctaatgatgaactttgtttgttgattcatttgtttcggtttttttgtataggttgctaccttttcatacaaccttccacaaatctacgagcttcatttcggtgttccaatggctggtgggattctctgtacactcaatgctcgacttgattcgttcatggtgtcagcattgctaagacactcagaagccaaagtcatctttgttgacaaccaattactcgatattgctcaaggagcactacagttgctcgctcaatcagacacaaagcctcccattttagtgccacttacagattctgactatgaaactcttctggctaccggaacagatcagtttgagattctaaggccgcataccgagttggatccaatcgccataaactacacctcgggaacaactgcccgccccaaagctgttgtctacagtcaccgtggggcttacttaaactccttagccactgctctgcttttggggttgagagacatgtctgtctacctgtggagcatgcctatgttcaactgcaacggctgggacgtcttgtgggcttcagcggctcaaggtgctgctaacatagtcataaataaagtcactccacaagccatttatgataatatagctatgcacaatgtgacacacatgggagctgtgccaaccgtcatgaacatgattgttaactcctctgtctgtgagcgtaggctgctgcagcacacggtggaggtcttaacaggcggtgcaccagcaccgccccagattcttgcgcggatggaagagatggggtttcgaataaatcagatttatggccttaccgaaacttatggtgctgccactaactgtgtatggaagccagaatgggatgctttacctcttgatgagcggtctatgttaaaagctcgacaagggcttcgccatctcgccatggaggaagtggatgttaaggattcagtgaccatggagagtgtgaaggccgacggggaaacaattggcgagattatgttcaggggaaacactgtgatgagtggttactttaaagacttgaaagcaacagaagaagcatttaagggaggttggtttcatagtggagatcttggggtgaaagtatgaagatggttatatagaaatcaaggatgaaatgaaggatagtaatcatagtcaaggggggtttgaacgataaagcagtgttgagttagagactgttttgtatagtcacgaggccgtgtttgaggctgctgtcgttggacgccccgatgccattgggg

SEQ ID NO: 184001 - DNA, 3840 bp, Cannabis indica
agagctttactgtattcttcaaaaataagatcagccttaacagtgagctttccttgctgtgggtttggcaggagaattaccgcgctatagggactgcaatgaaaacagccatctcaatgagagtagtaatagtcaaagaaatttcttctgtagagaaaattttcatgtcagggcttttctctttcttgtcatggggtctagaactctaagactcgttaatgattatgattaataagttaacaagtttatatggcagcaaaagagttgagatttcaaaatttgctcacctggaaaactcttccactctgcagcaataattcagatggagttagcataattatataattatgatcgatgaacaaaagaaaaccacaggaagaatcaggcatagttattagttaaaacgcttgctatcatctactttcccagcaccccctagggaaaaaaccccttgatactctgcttgcatgaatatctcaaaaaaatgcaagaacgaatataataatagtcaccttattttctcatgcaagacaattacgttgtcttcttcagaaccaacaatctgcataacggatcttcatttttaggctaaataacacttgatagacatcacatcaacaattctggaaaagatactgaagctaaactatacaaaaacataccatatcagcataatgtcgtttcactgactggaaaggttctgatatccttgtcagtgttatcaccagcttcgacttccctcgaatctggcactcggtttcctcaaccttcatgtcaactttcggaggtagtgatagtaaagagtccttgatatggtttccaaatggaaactttcgaccggtgacaatctctatcctccggggtcagctccagcaagtgcatcaaatgatttaatttccatcgactgtagtgcctattaagagagatgggttcgtgagccgataaagaagcatggtattctgatagaaatcaagaagtcgtggatcttactttggctgtcaccatcccaatcccaggtaattgtttcagaagataaggactatcatcccagagtttctgatgcaatgactttgcaataagggctgaattcaatgctcctttgtagttctttttgtaaatgaaatattctttcatgcacttcgcgattctacatccatttaagcatattgaattgacatcctacagcacagcaacaaatggattcatcagtgaagctaagctctgaccattattatacgcaacacaacaattagactaaaattatcatagaaataaaaacctgagttagggataaatcgtgaatcaaaggatcaccagtcaagcagtcattaacaagaacaaatatcttctcctctctcgtctgaatacgcttttttcgttttccattatcaatgaggacatgaaagcgaagtcggccctctttatcagtgttaatgtcattcagaagctttttctcgttgcgtctgagctgtatcccttaatttttcagtgaatagataccacacttttcagactagcaattcaaataacggaaagaaatacaacataagcactttgagcagattacatgaaatttcctcagctcggcagataacatgaagagcatcttccagagtgcagtttactgggatctgcattaaaagtttcattgtatcgaatttcaagtagtaccttgtcatcagccttccaggctctaaagacagaaaatggaaaatggttagaaagtgataatgatttattaccaatgacctcataaaactgttaattgctgtcattgacatacctagtggtttcaagaggaaaccatctccatcagtccatatcaattgatattttgataactcgtttactttctgaacacaaatatctgacaagcataacattgttattgaaagaaaacgtaaatgggtactctttcttacttccatctgtgaattataacagtaccttgcacgtgcttttctacacggtctcttgaaatcccttgtttgacagcataattaccagggttctgattatgcatcaatagttcagagctaactagatgagaacgaaaatacaaaagatatccaaaaatgggtacccaaaactacgtgcctttttcatcctcacatacaagtatgaacatttcatccattcaattgcccttataatgtcagtgacagtcagttgaactatctccgcagttaggtgctccgttacacatgaaagcaatctaaagtaagcaaacaattcataaccaaattagtcccaagctccattgcattgtgaaagttaaagataattattatgttacatactgtgattccaccagttcacatccgttcaagagattctcgtacaagtgaacctaagattgtggaaaagttcaagagaaaaaatcagcactggtactatctctaaccaacagtccaacagctaaaacaagcaaaagggttaagagtattgtcacgtaattacatgcacaacgaatgttgatagaagattataaaataccgtgtctcttcttgtcattattacaaccattcctgtatcatcaaagggtggccggcctgcccttccacacatctgcatgatgccaaaactaaatcctgaatagaattttcatataggataagactgttgtatgaagtacaattgttttttccttctttctgattgtttaatgggctagatgtagtagtagcaatatgtcatccactatattttgttacgctcttttccatctaaattgttgatttaacaagaatctctctttgcagaaacattacagataactgtataaataaacaaagaggctaccgtgtgtgtactgactactaaatatcctagaagctgtaaattcgccatcatattgatctcattcgatacatgattaaagatgtaactgttaaaaaaatataatcccagtaataggtaataaatagaaagtctggatgcagtagttcctcatttactctcatcaataccattcaatcaagtagactgccaactgaaaaaaaaaaactagaatctagcaataaatgtaattagataaaaaggcccttaatataataaaacaatataaatatcgtagaaagatagcacagctgacaaacctgtagtactgtggatcgatcgtattccatgtataagcctttttctttgttgctgggttacagttattctgttaaattactgaagaagaaaaggcttttccaaatcttgatacagtgataggagaaatgacatacaaatgctgtgttgattttatcacaactgtgtgtgctggtaaattaactccatgagcaagagtatttgttgtgcagagtacttgaatgtcacccttgagaaaaagattttcaaccagaatacgatccttgtggcaaagtccaccattgtgataaccaactgcaaacattggagaaattttgttatggtagttagtgacgactcaaggaacaactaaaagcctagaagtaagacgaattttaataatccaacgcttaccaccgtacacaatataggactgcatttgtttgtcactgcatgacagtgaagcttccctcaacctttcctgctgttctctgtccttgacaaatgggtttgaataaccagaggtcattgctgactgagtcagtcgctgtgcggcttcttgtgcgccttttctagttgaacaaaatattaaagcagatttcccttttgaataattcatgagaatatctgtaaatcagttttaagcaaatttgttcatggtatattagtaataacacacataactcacaagaaagaaaggaaaaaacataggcatacatttcatttgaaaatataatcttcaaaatttctttctttctttttttt

SEQ ID NO: 184002 - DNA, 5870 bp, Cannabis indica
gaataaaaatcctaattagcctacaatgaatgtcgagtcaacaaatactaaagagaaagtaacttaaagggtaaaagagaactcactgccaggggtcatcgccaaggagaagaacatcgttctcccggtcaacaaatacaagctgccagcctgatctcagggggtcctccaactcgccttcaaggccgaacatgcgagcaagttcacttcgcagctcatggtagctgctgaatttggtgagatctaatgacctcccgaaggaccctgacttgtaaacctgttaataaattatattgttccattaaaaagacatgtttccatgagagcaatacattttggaagccatagacaactcaccttaacaaaggttctggacggttggtttccttggcctgaattgtctggagactgcaggaaaccggattcatcgatgcaactggaaggtgtaattgcaggattaagtgaaaaatcggttcctgtagtactcatgtaactagaacaaggaaacggtacagttgtggagtcattatcactgcctactcccctaagatttgacattccattctgcataagaagagatgagggctctatattgacaccaaacaaaagatggctatgtggatcggtattcccttcttggtcaatcgtgcactccctgccaggaaagggtggcagcgaaacagaattctgggagagattattctgtggctgccccaactgttcaacttgaggcaaaacacattgaggtccagaagaaataagaggttcaactgcagcacgctttgatggccagaccgatgaggatatgttgctcctaggcatgttgagcaagtgggatgattcgtcgggtggatatgaacccaatatgctgtgcaagggagaaacaatgctggtggtcacagcagttccatttgaatcgggataactctgttgttgacacattgaagagatggtctgcatggacggtgattgtgattgagaagatgaagaatagtgggacattggagacacagcacttgaaatttgctggtggtcaactagttgctgctgttgctgttgtgaaggcagctgttgctgctgctgctgctgctgctgttgctgattactgctattgaacgaatgctgttgttgcaattgttgctgaagaaggtgtggctgtgttgaatgctgagtgtcctgcatgccttggagaaacacctgttgaggttgagattgttgcatcatttgggactgcatcaaagcagcagcagcagcagatctgtttgggagattttgggtctgctggaattgcagaagggaagtcggtattggtttggacggatcaactgccctcatttcttgaagtgcagcagcagccatagcttggtacatgtcaggttgcagaccaagcatcgacgcgtcgaaccttggctgcatccatggtgagagcccaacaccctgataattcagagcttggattccacggtctccataatctcctcgaagccacataagctgagagttcatgccaaggtcgtcctctttcatacctaagaataatttaggaacatggcaaggtaagatgagtttatactcaacgttaaactaaaggatgttagaaatggagcccgaactgcaccatccattaaaggtagcagcagaaatgcataccgtgaaacgcaggaagtcccggtggccaaggtcttttaagcctaaggggaaatggtgatggatacatggggaatgttgttagcggctcaatctcccacagggacactctcggctgcctatcccctgccgttgattcatcccagcccacctgcattaatcaagcattttgtcagcatttcggtgatacaatggacatgtctaaaggaacttgaacagaaaaaacattttacataatatacacataatagttcttgacaaaccttgactgagcgccagtgtgaattaggccaccgaacagcatctaaatcacttatgccagttatcgtgcccatgtatctgtcattaaacacagttttctaaagttagcattttcttacacaccttcaaagttcgaattataacattattgaatatggtgaagcataaaggttaaaatttaccgacgaacgcttgattcttctgtttcaaacagcattctaaagcgcataccaacagaaactcgtgtatgataaactgctttgacgtacttggccaggggaatgacaaattcagatggactagccctgaaaaaggattaatgtggatgtttaacttggtgtcagaaactaattaatacacttccaacagaagcgaaaaacaatcataccttgggttataaaaaattgtgaagcgactatttgttgcagctgcatgagcagcagcagcaagaagccccaagtgcatgctgtcactcgataaaactgatgaaggcatcacagtttgaggcctatttgctcgccggatgccaaggagtaactgatttttctcattcctgttttaaacaaattgtaactttgtaagtacaatcagttaaagcagaaggcaggaaataatcaggaaaaaacaataaaaaaaataaagcaactgtctcttattcgatgccattcatacacgacatgagctgaaatccaaagcatgcctgttgagcatatgatatttagtcttgttcaatgactctatagccttattacagcagagttgaatgacgggtctaacacgaatgtcatggaactaaagagcataaaaatatatccgacagcaaactaacatccttaccagataaaaagcaccgagtcaccagcgacaagtcttttagcactaacaaaaacactccaaccagttgtaaggagatgtctttttggctggcctgcaaaaaaggaagggaacaaatatttacttcaatctaacattagaaaaagaaccccaaccgggccaatcttaagtcaactacagcaaccatacaaaaacaaataatcataattgaagtcacaattcttccaagtgttcgatacacatttaacattgttctcgaaacaaagaatctgctttgtgattaaaggtttctctaagaaaactaaccacggaatatatgtctaaatttccattcattatcatgaagatccctcgcaattagctcttgtgctggtggctgctgggagaagtcctgcagatcaaaacacgaaatgcaaaaaaaaccagactcagcatagaatcaaatatcaatgtcctataccaaacttgagtcacatagacaaagttttgacataaaaaaatactcttgttaaaactcccaattatgttgaccactttgttatgttattcctttaactctttttttgtctatgattctttttagtgtcatgctgagagattgggaggataaaatggacacaaaaagaaaaagtatgcacatgtttttgaataaaaatggccggtgtcccattgttttcattattgatctcagtgtccccacaattataggagacaattcaaaactgacgggccatactacgcagtatagagaacagggaaaaaagaaaaaagaaaaacgaaaaagaaaaggaattaccaagggaggaaacactttttcagctgcccggcgaggaactgagaatcctccatgggtacttgtgtcactggccgtcaaggttttacaaaagtaatttgtcggttgtttgctgggagcgcccaactctgctggaaggtaggcctccttttgttcttcctacacatcataaggtcatatgtgagatacacacaagctgtaagatcagtaaaccgaaacaagaaaaatacatttcattgcatcataccggacttagtggttgcaaagtcatttgtgcatacacttcatcggtgtcaatgtctgcctgaagatcataaatttgagactgaaaaccagtttataaaactatgtaaaaacgtaaaccaaccagactaaacaagcttacatgcatcgtcacattgtgaagttgacaaataagctgtggcggtaagctagggtagttaggaatatgtgcatccacttccctgtttgttgatgcagcaacctacataacagcatcaatacatgataaagaacactataactcattcgtatttcttttctatcaagtgatcaacaacaatctcttgaaatatcggtaacaagacgtgcattaacgaattttcttaaattgctctaaaatcttaaatatttaatggattctaataacttcaagctaacatatttaatttttgacaattacaaacagaatcagcacaagggtttttcattttaaggctttttacacaagtagcttgatgacatgaaattttttaaattaaaataattttttgttattattctctctctctctctctctcacactcactttatctctttttcaaggaacaaaattaacaaatacttcttcacatgtcttaagatctccttcaaaaaatgcattgttggaaaaaaagaaacacaagaaggaaaatataaagaaagtaataatgaaaaatttactgacctgttcactgtgaccttgtggaaagtaaacaaccctgcttccaacagcaggcaaagaaacaagtggaccagcacaagcatgccatagctcagaattcaaaaccctcttctcccctgcaaaattcaataagagagatacaaatattataatcaaaaaaatgatactagtaataataatgctaataatgaatcatagtatattaattcaaagatctcatcaagagggaaaattcataaataagagaactaaaggacaatggtaagctatcaaagatcaaaactttaaagagcaagatggagaaattggaggagagtgaaataagattcctaagagaaagaaagggaaaacaaacaaaacaaactttgcttcaattttgggtctccacaaacaaggtagagagacaaaaaggtcataatctaagtataaattaaataattaacaaacttgggtcatcaagattttagtagtttaatgattttattaagtagttaaatggagccaagagacatttaaatccaaaaaaaagaaacataaaatcccacaaaatattctcaccccagaactcaatttagggaccataataaaaaggacaagaaaagaaaaagattgttaatttatgtttaagataaaagggagagaaagtgtattaggaatattaatcataccttcctggggctgagggctaaaaccaactgcagagagcctcatttctgaagattttaaccaaaagcttgtcttaattacaataaataagtaccaaaattcacccaaatcactgaataatccttaagctcacttcttttcttttgactccacaaggaacccatttaaatcccaatacagtcctccatgcacagagagaggtttctctcttctcacctctcactctctctttctctctctcttctttctttctttcactcaaagtctgaaacttttaaacaaagaaaccaaaaacttcaaccaaagccagtttcactgcaaaacaagattgatttcagcctcatccgctttcactgatcaccttcttccaatcaccaacttcatgctactgctgctacaacaacaacaatcaacatttttcaactaaacctcgagattctcaacacttttttttttcaacttaataacaaaaataagtaataataattaaaagaaaaaaaaagtttgtgtctttctcaaactacccaattaacccaagctcacaaaaccaagcatctatggcgaaaacccagaaaaaaaaaaacccaacaaagctaaaaaagaagcagatctcccacttcagaacggcacaccatgaaaaacccagatctcaatatagctaagaaatgattctaagtggtgggcatatgcattaaattccaggaggagcaaagtttctttcttttt

SEQ ID NO: 184003 - DNA, 4985 bp, Cannabis indica
aaccgctaaaactgtaaaaaaaataaaaaatacgaattgaaatttttttatggtgctttgaatttttatttttaaatcgcgtagtttatatttttgaattgttaacatggggttttgaattcttatagtattttatagaagtattatttgaattttattgtatttgtaacagtttaattattgagtaatagtttaaattgctaaaattataccgtaaaaaatattacagtacagttgtttttacagtattttaattttggagtgcgagtacaattttaccgacaatgtcgttttgataattgtaaggttaagctaaagcaagttggttccgaatgtgttttgtaaatctatgttttagactcaattatagcatcacttaattacttccacaacatttcaatattatctagttagtttcgaatgtgttcagtaaattgtgtaaaaagacacaatgaagttctgtaattatagcaccacttaattacttcacaattcaatattatatgttgtaaaaataaaataaaatgttttagcaaataataataataataataaaatgtgaagatgatttatataaaaataacttcaccatataaatatttaatttattgattttggccatgatcaattaataaagtgattatagagagagaaaaatcattttgcaaaacatatgttaaaaaaagtgtatatttttgtaaataaataaatataaaaaataattaaaaaaaaaaacataaacccttgaaacaaaaatataataaaatgtgaagtgtgaataaaattatcaagtaaaaaaccaatattgctttaaaaaaaatgtctaaaatttaatgcccatgctatcattatcaagtttcatggtggcaacatccacattgaggaacggatcttcttgccctacttacttgactgtaaaacataaatttacagaatttactaaacacatttggaactagaatttctttctgcttctcatcttttgtttggggcttctctcccttcttcctcacaaacagagcaatgaagaacccttctctgtcttccactggatcggttcgaagcaacttctcggctgcaaaaacccagagagagcttgccaattataaaagatgaaaaatctgtgtatatccgttgaaggatagtaatgaaagagtacttacagccttcaaagaccggaaggccgcggcggggccattgaggaaagggagcttcgagttcgaatccaaaagaagacgccagagacagaactgatttgatgattgcctcgttttcgacctcgtggatggagcaagtgctgtagactattctctccactgatggaactggtcaaatcacaacaccagcattgtaattttaacatcattataagctgccgagtcacatattggtataagcagctgagttttccgagtaggaaactaggaatagctctttgtcaagagatttgtagtagctaaatggatacttacaggacaatgcgtgctccagagcctttctttggaaagctgcgagcttgttcagtcgaaaatcgtcgacatcattgctcgattgacctgtaatggattgaatgaaagaaatttaagaaatatgacaaagtagtaatggggaagtgagttagagactacaagttacctgtggcataagaaggaagaagatgatctaatctcacagaagcagtcccagatccagagcaggaaggatccaaaagaatggctctgacctaaaattgtagaatatgttgtcaaactcacaagggattttcttgaaagagagccatatggaaattgaagctaaggtagctcgtttggttggtgaatgtgtaaagtcgttcgtatattcaagtttgaaactagacatcgtgacattttagtagttaatatagtacagacactaatgaagaaaggaatgatatttttttacgaaaaaataagtaggatcctcgcttgcttaacccttcagatatggcaattgctatgtaggtaccagaaggaactcccactgtcccacatactgactatttgagtgacctctcttgaaaggaatgatattaaaaaatgtttcttttcagtagttttgttatattgagaatttaatgtagacaccctaataaactgacctataaactaagtaaattttcttagcaaaaaaagaactgcagtcgtcttaccttggaataggtcggatcctccgaacttaagcttaagaagtccccatgcaaaacctttatatctacaaactgggttaaggatttaaacaagaaaaaaaagggtggatagacgaggaaaatacaccaaaaaacataaatgatgccaagcttgaaaatagataaaaaaccaaaggtactaaaaaatcttaaatatgaacgttgttataaggatactagaagcaccagagagttcaatggtgtcgttcaaacgtttaacccgttctttgtttagctcgcaagctatgatcttcccctttcctctcatcagagcagcaagttgcacagttttgttcccaggggctgaacatgcatcaagaaccttcataaaaaccagaaaatatcatttatggaatcagaaaattatagcaatagctatattcgatcatttgagctactgttcttaagtaacatctagtatatttatcgttgatgtatcatatctattgcatttttccagtattatatttcccagccatcagtatataaaaagaagaggataagaaactacctcccatcctggtttaggagcaagagccgctgccaccattgaacttgcctttccctgctcatacaaataatcaccatggcagttattaggtcaaaaagataaaaataacaaacagagagaatcccaacaaccattgtgaagtaatacatatttcatttcagcatgaagggaatactgttcatacttaatttcattaacaactagttaaaaccttacttgcaagaagatacttccattcatgacaagaggatgattatgcaaatcagttcccggtggaagtatcaacaagtccggaaccacgtcatccttttgaacctaatacaaaaaaaccgacatagcaaaagattgttcaagtacaaggggaagaatgctcaataatttagtcgggtacatgatagaaaataatcagcacaagaaaatgcaccatagtttttctcttaacaggttcaatcaaatttaacatagtgaaatgatcttactctgtattctgtacttattctaaaaccccattagtagaacataccgagaattttttctccagttcttgttgtgcagattctacatccagtttcagagtatttactcgaacataacgaggtttcaaaacatcagcatctgcaatcagaacatgggactttgattacagttccatctcagtagccaaaatcaacttaataatatcattgatgttttgaagaatttgtgttgataactgcaaatttgtttacaatataaaccaagaaactataacaattactacaagagatgattcaaacatcgccaattgaggtaacccttttgggtcacaagtcacacaaattcaataataaataaataaaagaaaaaataacagaagaaaaccacatcaaaagcaatatagtgcctagtcattatatacagtgtctgttcgtatacctggagtttgataaagagccaataactcttgaacattcttcagttttttcttcttcaaaattgaagccagagcagaaaccagagcctctctccgcttccacagaaacttctctgcatctcctgttgataaagttttctgcaaactcaatcaaataatcaacacacatttcagtaccaaaaccaaagcaggttcccagaatttaaaaaatgaaagacatcatcatgttgggtgcaccaaaatactacctgaccaaaaagaacatcatacgtgattatataaaccaactcatcttgcttctgcaacagcaatggccattattaagtcaatcaaatttgaatgcacaccaaatgtttgtagaaatgcttcaataaatataaacacaaacatacacacatatatatacacatattttatataccttccacttgctattgagaatctcagcttcatccaacacttcctttatgacagaaagatctgaaaaacacaacaaaatccccctaaattcgagccattgctaattaagtcgctgaagctttaagatgacttacgttttagtgtttcacaaactagagcaaaggtagccttcttgttcttcacagaggggctgtaaatgagcgacttgatggagccaacggcgcggcgccgagcgtcgccttgaagaaccagccggagcaccttcgctgcttctctcctagcgaagtaagccgacctctcggcattgctctggcggcgattttccgacttttccgccggcgcggcggaggagtgtttcgtctttttcctcacaggagctttcgttgttgtacgcgccattgttttacgacgaaagaaaaagcttcgaattcggaagtggaaagtggaaaccaaactcaaaaactataattccctgagcaataaaacgacaccgtgtttgtttcatttaaggcataaaacgacatcgttgtaagaggtattaatatatggtttttattagagtaatatgtgacataaatactttaagtttaaaccttaattgtaaataaatatttaaatttaatttttaacggtaataatactaagttatatttctgaaactgcataagtacatgacggttaaatgtcaacttattatcacgtgtcattttcttattggtatatttaaactaattttttttaaaaaaaaaaaaattaatgacgtggactaattaggaattgccacgtagcaatttatttaatggttaacagctaacagcaaggcgtctacagaagttttagaaatataaattactgctaaaaattaaacttagtaattgagaattaaacttagatatttatagcgtaaattactcttttcattatagttataacat

SEQ ID NO: 184004 - DNA, 5018 bp, Cannabis indica
aggatgcgggtcagcaatcagacttcatttaaaagaccgtggaagcttaattttggttgttaccctaaattcctcaattgtgatgagatctataataagaaatggaactaggccactagaagctggtttcctatatttatatacaatatgttagttgaagaaaagagtgatatctgagctttatttgactcgtaggggagcaatggatgatttttcttcttgagatgtttcattttgaagaagtccatatggcaagtgaattcccaattagtgatatccatataaagtccatagcaagtgaattcccatcacagtgttttagttgtacacagtctacagagcacatcttcttacattctcaatttgcagggaatttttatggcctaagtttctcgctaattacatacattaatgttccaagagctgttagaaatgatggcccaagagtttgtaaaagactttaattttttattctttattctctattcgtttaagttgtggtgtgctggccatttgaatggaaaggaatggtagtaggactttcaagataaggatggagtacatacaagaaggatcaagctcggttgccatatggctacagagttatttcatgatctttgatatatcaagtgattgggagtgtttttagaaatttcaagttgcccttgtttgaagttctttttatagctggacttgactggttagttgtttttaactttttaagtgatgggctgtacttaatagtttttgcctcaagtgagtctggctttagacatgctgagaaaacaaaactaattgaattactttaagagcctaaattcatcaatgtattaccctactttattattttaaaaatcaaacaatccagcaagtcaatggcaactaatacaatatcagtgacttttcttttaacatgtgtacagactaatattgactacaccataagattaaagtagcactaactaaaaactggtcatgaagaattccagcagaattccagcctacaccataagatactgcccacataacctcaggcagaattccagcctctaaatttagtgggttggactcaaagtagttaatctagtcaaggagttgcaaaaatactcactattaatcgactagaataaggacatctggtatccagagtgtgcagtcagccaagtaaccatgaatgaagtttaacactaactccacaattaatacgtaatagaatgctaattctctagttcaccaaggaatcactactcgaaacaaagctttactaagaccattcaagggcatgactcagactcccaaaggcaagaggtaagattcaccttgaatctcaattgaaagaattgaaagttgttaataatatgcttgaaacctaatctgtccatcctaaacaaaagcaagagttacagcaagaagctatactttctaatcacaagcataacaataagtaccattgcagtgaagcgaagataaattgtgaatacattgtccaacaagtcataaccttatattggaaacaacaaaagatgcattattacctccttcgaaagaggggactttgtgatggcatagtaatcaaagaatatttgaagagttgaaggatcctccaaaacaggcctccaagaggaaggtatctacaaaatcagcattatgtttactttgcaatacattacacaaagacttattgacatatcattaaattgaatctaattcaaactaaggcggtaaatacctgaacggtgccaaactcctcggaactttcatcaattgaggtgccaacaaaatcaaaggacaaacacttaagtgaaacagaaagagccagctcttgcaatcgatccaccactacaaatgaaataacaaaaaaaaaaaattagaccaaagctgcaaaggctgtagagtagcatacaaaggtaatacacacacacaattgaacatatatatatatatatagagagagagagagagagaatagtctaccgtcattcttccgctgggccaatgaagttaatgatatttggaatatttggaaaagtgactgatctctaaagttgcaggcaacccttcgatgatgtgttgatggcaaaccaggattaggctaaaattttagcaatttagacaaacaaacaaattagagtgcaaaattaagatggatacttagtaaattagaaacagataaagaaagcttcaagcacaataaatcaaaaccatataagagtgcaaagagaaatcaaaaatcaccctctaccagaccaaatcaataaataaatctaggatgtctagcaggagatgatgaataaattaacttacaataaatgaagatgaaagcattatttaacataaagactattgagtgaaaaaataaaatgtcaaacttgaatgatgtacagtttgtgaaaacaacaaatctagtttttatcatttctttctcctcgattctaagacctatactgcgaatatgaatcttttaaatttaaacacgaaaaaattgaattaaattttatggaccaattaagaattgagtttacatgattcaactctgattcaaaaaataatatcagcaaaaaaaaaaatagttgggttgcctgaaatccatcttcatcttgtcatgtatctacgtttgcttccaaaatagctatctattcaggtttagaacatcattccctatagcctcaatcaagaaaaaatcgcactttacttctaactataatcctgcaaacctaaagctttctctttgtggtaagactggccttactaaaaccctttaaacagcaagtttcatagcttcaatgccatatatcttgcaagccatattgattccaagtataatatgccttcatggtaaggcaatctttgtaaatcgttctacctgttttatttttattttctttgataatacaagtagtggtgttttgattaaaatataaatatatctccttcatggaaaataatgctccaaaatagttgttatgataaaattgtattatttacagtaaaaagataagatggggtgatgcataagtatctctgaaataaagtttactacatgatccttccaaaatgttctaaagaaagtaatgaagaactttgagcaccgaattgtgattttaaacaatgattaccgaaaaaattgagtacaaacctgattcatctcagacacaagctgattcaaaatcttcaaaccaatggtgtagtgatctgatgttgcctggtaaagtaagaagttcagtgacccatcagtttgaaagatactactagtttaaaacaactacatggtagcaggcagcattacaagttggaactgtcagaggcagcaccttaaggttgaccaatgtgtattatcaacaaacacattgtaaaactagcaatagcattgttaggaatagcaccgtgtgggaaaatattatttaaacactctttcacttaagttaggaataaaatgagatgtgtctctaaagcgggtattaactcaagtttctctttacaaataatacataatacctttactgtaagcctagcacgtttacgtttagtgctaatcgaacaacaagatagcaaccaaacatcaagaatcaaattactattgcaacaacaacaacaatgatcatgatcatgataatactaataattcaaaataacaaacagacgtagcatccttaacaataagcaagtcagacatgctaaacatcaaatcacaagggcacgcacccactatgtcaaagacatatcacctggctcaagaaattcgtcgcctcttttaccacctctcggaaccggtcatcatcaaaccacccaaactttgtaactcgacataagagttggattagagaagcagtcacaaaaggctgcaacttaggtcccctagtaaacaaatagttgataaggtagttccctgcagttaaattccacagcagttaacttacaacataagcttaaaacaaacattcgcatagatatcacattcacggcaaactcattttgtaggaaaagatcgaagattacgaatgtcaagacgaagctgcaaagcaaggctatgctcagtgacttgctttagtaaactggaactggccaacatcaatgcatacggggtaagtgcattgtcaagaatgtattggcactgagaaatgtaatcagtattgacagagaaacacttgagcgtattctctgcgtgagctcgttcaactgagtcctgagaagtgtacagcctctcacacaacgcttccagttgagccaagctctccattaccgcaagaaacctaacattatcacattttcatcaaattccaattaattaccaattacgccatgaatatatatacatatctcaaattaacagaatttatttcaattcaatattatttccgtttgttaatatttggatcatcatcgattagagaaaccgttgaaccagattttctcggcaaccaaacagattacaaattcatataaaattacaactccccaatctgaaaaactcgtcagagcataagatcgagagaaattaccacagcaacgccgaaaattcactgcgtaacacaaatttccgataaataaaaaaccctattaattattttctacgggataaaaactcaagagcgaggaaaatgaaaataatgagaaataatgatcgatgggtatatcgtatatgtggatggaatgtagcgaagaaggaagaagatagtggtatatatatagagagagagcgaggttaagagagttgagatggatctgagatccaaaatggtttgaaaggagtgagttttggattgaaatagagaacatcgacttcagagtccagactacggattccgtttttgggcttccttgctgggttggcgtcccctacttggctttggtttcttcgagagtctgcaaatacacattacgatggccgaaatttaatagagaaagaaaaggactttgttaaaaataagtaagtaatatttatgacactaatattcaacaaaaacaaaaattatgacactattttttttctactcaatattacactaatttattttttt

SEQ ID NO: 184005 - DNA, 10100 bp, Cannabis indica
ttaaaaaataaaaatattaccaagctcttaatgttattacatttttgcaaataaaaactatggttttgttttttgacttttatgtcctttgggatctattaagttttgttttttattttttttttaaaaaacctgtaactctaaatttatgaataattttaaaaactaaaacaaaaggtctaaaaacttaaaactaataataataataaaataatgaataatttgcaatataaatccttaagtttaactctcagttgcaaaaaaaatactaagtttaatttttagcagtaataatatctaaattctaattttaaaacttcggtaagtactgagttaaataaattgccacgtggcaattcttgattggtctaagtcattaaatttttattatttaataaaaattaattcaaatataccaataaaaaaataattcgtgaatataatggcttaagttagtaaaaaaaaaacattacataagactttgtcatctcaggctgaaaacaagaacatataaaagaggcgaaagcaacaaccttaacttccaaggcaaggcatgtgttatgtctttacttttttctcttagttcaaggtcaagttttcttttctttttaataatatctttcttattacaattttatgagataaaaaaaaaagccagttatttaagggttttcactttcttctttttcggtcgtgcacgcccctgtgccaagtctacaagcttcactcaagaatgccagaaagaaccacctctgttatacagttaataattagtagtactgctacaaagaatcactttgctaaaacttaaaatcactttacaaccggggagaaatgggatctaaccatagctcaacttgcttatcacattcatccctcttattgtttaacctaaggaaacgttggcttagcctgccattgacacagaccaaatcataattactaagtttataattaatttaacttaaagatcagcccgaacataccacattaaatttctctggccgttgtgcagagccaataaatgaggcagagttacagagcagcattgtaagttttccttgctttgacgtcaaagttcttaacatccgagcatcatgaagaattttctttaggcatgtttatttcaccaagagccaatatttcctcaggactcaacataagtgtaccagtacttaagtagtgccgatcaacccacctcctgttttaacacgtcaagcaattacatcaactattgtgcagggttgtagtgtaagaatattcattaggactacagaaaccgaaagaaaaaaaaacaatgtgacatcacaagtaaacacctgcgtttcctttggatcccagtgtcctttgataaacgagaagcttctgattttgaaatgcaacgcagtgaagaaagatattcgtaacacgctgcacctttcagtgtcatgagagattttgaaggaacaatggattcaactacatcagcaaggtgtgatttgttttcgctgcattgcggacatccagtgttaacagttatgtcagattataaaacatgtaaaatattcttgataacttaaggaggatttctgttcttttaagataaaaaagaaaataaaagagatgggttttatgtatattaaaaatgtcaaacagcaggctccaaactaagtaatgacttgttttaaaattttaattggttagtttcttttttgagaaataaagaaaaaaatatactaaaattattttcaaatactattaaaaacaattaaccaagcaaatactttagtaggttcacacatgtttttaaattaattttctattaatgctcattacaaattggatagagtacgcgtgaatgtgagctggaagacttggaaaagattgtgcaagtctacaggttagtagataatgaatgtgctaaaagaaagaagtacagaatgctaccggttcaactctgaatttcttccagtccatgtagttcctgattcagccaacttaggaaaaaccagcgaaccagttggacagcccaacattgaggtgagatcgacagagcagacagaacccatccttgatccaacagcagcaatgtcttttgctaacaagcaaaatccatgctgtgcagttgcagaagcaaaccggcatctgttaaaaaaactgtatgcatctgactcctcagatgtgatcaccgatggttccaaagaatcctggagtggtataaaattccattatgaaataaactgcataatttgaatagaaaactgtcctttcaattttcagctttaaagttaaatgacacacccttgttagtggttgacggtcaggaagcaaaacatctgcatctgagattagattagtcattttatgaatgagctggacaactgggatagcatgctcttcggaacccacgtactgggatagatctgcacggcgcctacgaagttggttccatgaatgttgtactatatcaggcaccaccaagggtttaggcttctctatacattttaaagttctgctacaatccattcgactacactcatccaaaatctgactgttctgataccctattgcaacagcctctacatgctcattttgagaatcttccacctcctcttgttggaaaagtttggcaattacatcatgattacttaacaaggtatctgaatttctctttgtttctggtttcgttacataaacatgttcatcttcaacaggtaacctgttcctcattgagacttcatccaatgtatccccaacaaaaccacaggaaaccgtaacatcttgctccctgcaatcgttaatttcagtttctggaacaaatgatgattctggcacgcatgacacatcaattgacttgcattcatcatttaaggggatgcagccagcagagtctaaatggtgagaaagcccttcatctatatctgctgcaaccgaacaaggttgctccttaaacaatgggctccttctaaatagtggttcatttggagtctcttcatttaaatacatgggacatccattatccactaattcatcttcagaatcagaagacaccacgtcatgctttttccgaacattcttccgcatgcatgaaaatggggtgtctaaattatcagaaacctcatgagtatcaagctgaactctaaactcatcatagtcgtaaacagagcaattgaggttcaacattgcttccttctttgcctctatagtttctgtttcaatattattgttcgcaaaacggaatggtatttcctgcttgtcctcgattatatccattaatttagaattttcttccctggataacgacttagcgatctctttctcaactaactctgataattcagatcttaagtcccatggtattaatttaggaagtatctgatggccagcctcaaggttaaatagaagtgatccatatgccctttgaattttgttacctgtagagacaaataaacataaatattaaaaacagctcttcagtagagtggtagtaaacagatggcagagcttatgcacaacagatatattcagtagaagctcttggaaattgctatgtaccaaacaagcaactaattacggtctggacgtggttcaaatacttcaaaccaaacccttttactcagctccccatatccaaaaacccaagaacaaaataaaggtttaggtgaagtcaccaaaattataaaatttatgttgtcaatcgaaagattagttctacatagctggtcactaaattattccaaacgttttgctatagtcccgaaactttaaaattatgagtagtctcttgacttggtaaaaaaattagcataagcctctttaacatttaacattaaaactttaatagaatattaagaaaacgagacatcagtcaaatttaaaggggatgaatactaatagaaaaatttatatatgcgtgtatatattttcttcataaagtatatatacatggtaatgacttgagatgaactttttcgcaataacttcaataatgttcaatctatgtgttctacaagcattaattgcagaatattagaaagtggatttgcacaggtcattgattatagtttaatataagttgcatatctctccattaaatctataaaaatattctcaaaaaaattaaacatattaatcaaataacaaccaaagtacacgcaatgctactaacctttcttagagcttttaccctggcaccagaactgaagatgcataatcattttacgtatatctccctgacaagaatcaattacttgctctatgacatgagtttggatgttggctctctcagcagcacaaacctgcaatgcagtagtaggttgaatttgaaaaatatattcaagtaccagcttataagggacaagttgaacagagagaaggagctgcaaacgcataccctatatgcatgggaaagcagcatctgtggtgatggtggtgtaaaacagatctctaatctgtctaaattatctggcagtagaggtttgtgacctagaattttacaccaatgataattaattcaaagaaactactcgcccaaaccttcaagagaaaaacaattgataaatgaaattttcttactattgctagtcaatattatgggtcctttggcagtatcagcaatctgttgcactgcagcgatgaagcctcgatcttcaagaaaagtgatatccacatcctcgaaaagaattaaaggcttaacttcgctcttataagagcaacttccagcttcctcgtgagaacaaattccaggtatttcagcttcattacgacgctcttcatctgataatactatcacttcagcgatgctaacatcatattcttgacttgccgaacccagagctgcagagggtttcagaacatgcttatttgaagaaccagcagaatttgttagtgacctgtaaaaatatcaaaaggactacatgatgacggtgaaaaataaaattatttctgttacaaatgttgctgggcaatggttaaggcgggtccacaccaagaggcaggcgcaaagaaggcattgatatcagatatgattgcaatggttacatatattaacataagaagaagcagttggaacaactaattgttttgtgaaaaaagagtataaatagacttactaaggccttgagtaggtatctgattgttttgtaatattttgggagagaccaagcctcttgaaagcttggatggaaccttaatgtattttatgtatgttcagtagctttatggatttataaaactaaatactttacaaagctcctttctaatgtagcattaagctctataaataaatagagttagttcttcatttatgccccgcccccccatgcttctacatatatccattagcatttaagagacaaacttcattgaaagttaaaaagtttaaactttgaactatggaggaaataggaaatgaatgtcagaaagttatcaaatatgaaaagacacaaagatcatttctaagaaaatatatgaaagggaccttataactcggcgtgattgaagagcctccccaaacttctgcctcacaagagctccatttcgacattcggatgcattgacctgagaagatattcaattgaaaaaaccgcatgtaagggttggtttgaaaaaatggtcaaaaactgcatcacccgcaccgcaaacagcctaaatattgatatatgtatatatatacatacacataaaaagcctcttctaagcattttctgttcaattcctagcaaaaatgtcttcaaaactcagtacccataaggtgaatgaaaggatgatttaatctagtatcaactgttggttatttataaaagatgtatctggttaccactcgtagcaaacatgtcaatgacttgtacacatcagtccatagaacactcatgggtagcttggattcactaatgggggagctaacaaaaaattgcagtagggccaacactgagtaaaacttatagcggggaaaatgcaaataataataggaacattgttgaaaactaaaccttttgtgagttccaaagtaaaaataacaaaaaagttacatgtaaaatagaaaaccttttacggtaacaggcccccttccctgcgcgcacacatggtgaaataataggaatgctgttgaaaaataatctttatgtgaggactaaagtgaaaataacaaaaacttatatgtaagaatgaaaacatattaaggtacacacaagcctcagtcctgcgtgcaacgtgcgctgcagggcgcacgcaaacagtgaaaataatagaaaatgttgactcaaaaacactatttttgtagaggtaccaaagtgaaaaataacaaaaaaaaaaataatatagtaaaaacaaaaaaaattagggtcggccacgaggacacagtcttgcgcgcgcgcgcacacatgaaaaaaaaaatagggtgtcattgaaaagtaatttttgtatgaggaccaaattgaaaataacaaaaatattatgtagtatatttttagtgacgacgaacccccctgtccaacatgcgcacacccacacattgtgcatgtgcatgcacatgcctccttcctactcacgcgtgcacatgtgtatgcatgcatatacgcacgcaatgcacatgcacacgcaatgcacatgcacatgtgcaaacgtacacatgcgcaaacgtgcacatgcgcaaacatgcacatgcacacgcgtgcatcccctttcctacacaagagcgaacaccaaaacctggccctctcgcaagagttgcacgcacaacaaataattggaagtttgttttacttttaaaaattgttagcaaaattttcaaaaaaaaagtatcatcaacaaaaatttgtaatatccttttgtttttgtctgtaaaacaaaaaaaaaaaagtacatgtactgtacatgttagtccatacacacatttgtataaacgcataacctaaaagattatataaataatgaaataaattaataaagtttgcgaagtatgcttgccatttataaaaactgagggccaaaacaacattttaacttttattttcaatttattgaaacaaaaacttgaaaaatcaatccgatcaatcccacaataattcatatacgtatataaaaaataaaatagtacctagatatacacaggcacatacaaaatcgattgatgcgaatgttctatttatttacatacaatatacctacattaacttcaagtaaaccagaggaccagatgcgtctacgatcaatctaacagacatttattcagattcagaaaacaatattaaactttgaagatgcaaccattaatataattattttagtacctccaagacctcatatccttgctcttccgcacaagcataaattgcagcagattttccactctgcaagatgtctgagacttagtaatagatcttaatataggaatattgtaaccatctaaaatgttgcaaaccatctaagtctcgtattttcacataaaattaacttaaaacttttgccagaaatataaatacatagaaggagacaagaaccttcccagcataaggctgcaaaagacctacctctaactgtgagctttatttttctcaagttttaggcactttacgagtaccccactcaagtcaagataaaaaacaagcaaatggcatgtataattttcattctcactatcagcatatccaatgcatgctaaaagttctaataatttcatttcagaatcctgaacaaccatatctagagactcatcataactgtaacaagacaatacagattttttagttaccccgactggtcctgtaactaagaggacatttttcagcctgtcctcctcatattggcttcctgaatcagagtcactttcagaacatacataatcatcttcttgcctatcacttgtatcgcaatcaataagatcattgcagatttcaaaatctctttctcgccattgttgtagccactcactcaaaaacttcacagaatcatcattaccacatacctgcacatcatgtcacaagttttaaaaaaaaaggaaaatgtattttttccccagtttaaagagactgtactagtcaaagaagaaatagtgcaagatatctaacctccgtggcagtttttggctggtaactgtaagtccataagctattccttagttgattatcacaaccagaatagcatgacttcattctgcaataaaaatgcagatgaaaacttaacaaaatctttagataggctaaactaagaataatgcataactaatcaaacacattatgataattatttcaacaatatcaaagctaactaagataataagtacacacgtgagatatcttacgattaatcagataacgagtgaaaacgattaattgaaacatattaatattgagcctactaaaacaatgtaaaaattaatagctatagaaaattttattataaaaatctacctgccctcaagaaatccactttccttcctagtattttcctttcctaccacaccagtaggtccaccaaaggaatcaactttatttatctcactgccctgccaataattcatttgtattgagaatcactcacaggatgacaattacaaaaaaatagaccatttttactgagagcacgtgcatcctttaaggaccgacagcatacctctgtttcatcatctgctgacaatgtttcataaatacaatcttcttgaacaacaaagtcatctgaaaaaaccttatcatgaaaacttgatgcgttgtcagggtgtaaaatgaggtgaaacttttgaaaacttaagcactcaagggagccttcaaaaatagatctgcatgtgctttctaggtcaaaaatgtttttcataaagatctcctcagaaaatttccaggatccccagtcaagaggaatgtcagtatcctgtagcagaaagttttaacagagctcagaaaaattactgcagtctcaattaccatagcagttgtttaagagctagtctgagaaattcttaccaaacttctttcaaatacatgaattggtgcacaagtctcctctttattttgcctaacaactgcaaacgttttacgctctacaattacctcccgatttttcttgtcttccttccgagctgcaaaaaagggatgcagtttttttcctgcaaaaatccgtgaattttcctgttgaaatgaatgaaggaacttagctccacatcaataagtaaggtcaaagtcgaagttaataattaaccatgccaaactagaatgcatgagaagcaattgataggaaacatgagtaatctaaagaaacaaataaactgccaaaagtgccagtgactgatagagttcaacagcttggggtggacataaatttttgtaaaccgctaaacctaataattcacccaaaccaaaccgagataactcgacgaaaaatacaaaccgaaaaactcgaccaaaatataatccgcctaatctttatattagacggattgaaaataataccaactcatccaattaacccaaactaattcgattaagaaggtttatatataatataatttatatacatattttttcattatatatttatatattataatttatataaatattaaaaaaatatagagttttatagtgattgatttgaactttgaatcaatctatctatatattagtcttattatcataattaactaaaatataacaatcgaatgtgaaaaaaaaagtattagtgttcggtttgagtaggttaatccgaccaaattgaacaattcattggatgggttaatattttggacgggttgcacttagatttttgtaatccaatctttacattaagttaaataaaaggtaccataaaccgaccgacgtacaccctttttacatgataggttttttttatattattcaagaagttagggaaaaaataataataaactacgaatgtataagaggttacgaaagaaacaattgaaaagagactagttactcagtgaacatttcttaaggcaagagatcaaattgactaacctgggctgtcaatcttgcctctaaccgcaaatcaggcataacaacagctacatcttctgtctgtgtatttgtagaatttttctttggagtactatttgcagatcctcttcccctcgtctgccaaaaatgtaacaaaaaataaaataaagttca

SEQ ID NO: 184006 - DNA, 5956 bp, Cannabis indica
tcttttctttttttttttttgtctcctcctttctcttcatttagctgttatttttacagtatggaataagctcggatcacctcaatgatcggcgctcgacacaatggacactttcctccaccacgaaccaactcatttgcacattttgagcaagtgcacatgtgcccgcatctgcaaagtgtaaagaaaacaaataatcaaaaccaaaaaaaattgtacactaaacatcaatacagtataataataaaaaggggggaataaaatgtcactaaaagaatacaatcatacctatacaaaagagaatcaatttggctgtcgcaacaaacacagcaagttcctttcctgacatgaccccatctaatgccatcttctgatgtctcgggaaccaaccctgaaatgaaattgcaaatgtgaattctatgctatcagaaattcataaaggtgattagactaattcatgaatataattacaaaacaaaataaagaaattccataatgagaagctccattcaaatgtgacaattgtatgctaccctaattataattacaacccctaattaaaattacaacctgtgtatattatttttcgaaaaccaatgacaacagtgctaattttccacataaaagtgtgcacacaaacctttttcaccagctgatcgattcagtgctgcggaaacttcctgtctgactgaacgctgcaactccagctgcatatccatgcaagcctccaacatcctttgcatgtggctcatgccttgttgaagtctagccatgtcggctctcagatcattaatcatctcccattcctgctcggtccagggtaacattcattcaaaacttaaaaaagcaattattgtgtaaaaaaaagtggacagtgaacatgtgacaggagtctccatacagaaggaaaaacacctttcattcatactgaaatttagacttagttccttgtttgtcacacaagtacaattactcacaatttctgagcggtgcatgttatgtcgattccagccagtgtgatgtaagtcctgatgccaaagtggctgtggtgggggtaccggcggagaaggtaacacaagagcaggtctgttaatggcatcaagctgagcttcattttgctcatccctttgttgctcctgatcccgttctggtgaagtaggagttgatattggcaaatttctatgcaaatcccagtcaatgggtgaacgactttgcctttccacatatgattgtatcaactggtcaagactttcccggaaaccactgcgaagaagattagaaacgctcctcctgcaaaaagaagttaaggagcacaagaattaaacatgctaatgatgtataatattaaatagaaattaaaccttctttagtagataaactacctgctcaaaagttccctgagctccatactgtacacattgtcatcatcaggtggatgaaatctattaaatcttctaattggaacagtgcggcgatttctcaaagaaccagaaggccctactgaccagcttccagcaccatcccgggtgccatccctttgccaaaccccttggggctgccgtgcaaggctatcttctctatcaggattcctaggagtctcctcaggccaattattgactgaactgtcatgccaattcccatccatgtcctccgtgtttccatctctccattcattaaactggccaaaggatgtctgtggccaatttgctctcccatcttctgggattggcgcttgcgaattggttgcttgacttgaagtttcctgcacattaatacgctcagcagctgtgttgctctctgaatttcccatacgatcagacaaacggctgatatcaacttcttgactcgtagactgtaactgttcatgattttcatgttggacatcctgtggagcatttgtttgattttgatcatctccagaatcatcaatatcactattagctgtggattcagactggttgccagcttgtccacgaactatagtttctaatcttgaacgaaacccttccctagccagataaagagatttgtcatcagggcaactgagtcaattttctttcaataaatacggtttaacttaattctgctaatgtcaagaatcagagatatcaagcaaaatacaggaaacaatgtatatcaaacctacatagcaaaaggtcatcaattgtataccctatgtaccacaattggaaaaacaatagaaatttgtagtataggagtccaaactcaaataatcctagaataatattccaacagacatcgacaaaataaatgtacaccctaccaggtttatgcaaggtaaagacctccacaatagtgatcaacctctataatagaaagagttcatctctataatctcagccaacctaaactcctttcacaagcatcaaaatctcctaacaaattatgtgcatggttactaatccctaacaaaaacgaatcataaaaatgaagaggaacgattaggaattcaaaaattaagtcatcctttctcaatttactaactatgaggaatatgaaaagaaaactagtgtctaaatggctaacacatgagcattcattacagtcgattatttaaattttattaataaacacggtaaaagaaacgacatgtatcataatataaatttatcgacactaacatagcaacaagatcatctttcacttgaggaagaggagaatagaagaaaattataaatgaataacaaaaccactttaacaaaaaagattagcacacttgttcccaaaaataaaacaaagactttacataaattattctcctaaagatgaaagatgctgcatgagccttcaacaatgggcaaaccaacaagtgaaattacaagactgctccaggaacactaactatttcccaaaagtaattaatcattgcaaagtgtagtctccaatgcatgaaaacaacgataaaaggtgggaaatacagttatttacacaatttaaaactgttgagtttaccaatcactgaagcaagtcaagaaaaaacaaatgctagcataccttaaaccagaaacagtgtgccgctgtctcaattgaactaactcactcgctgccattgaaggaggtctttcttcttcaacaggtctttcatttctcaaaaatctacctcttaataatgactgaaagaaacagtttcgaattaggaaccaatcatttatggaagatatatacatatatatgtatatatatgtttatgtatacactcctaatcaaagaaacaatgtttaagaaactaccttaacaaacaaaaacaataaaaatcataacacactcagatccttatattatgagccatgtatatagaatgacagaaactaatcccggaaacatttctaatagcttggaatccactttcatgcatttataccaagctccttggatgaaagcataatacaagaataaggtcattagtaagaagaaaaagaaagatgttataaggtattggcagcacaatattatactgacctgaattcgatttcgatgagcaaaatcagagacagcgcgatgctccaatagaccctgaagctccctctgcctttccctctcaatcctaacaagcaaatcaatcagagcttgtcttcctcgcagcctcagcatgtctctccgaacatgctcaggctggccttcatcttgttcggaagccaagccacgggcttgaccaacttgagcaccagacccactgacttgaacttgattttctctccggctaccacgtgatcctctttgctgacttgtcatttgcacccactccctaacaattctcaccctttcacgctcagtttcaccaagccactcagctctgtgactattgtttctttgaccaacacttgcagaatgctcactaatgccactttccatccaccctcgcacaatctgcctcactctctccctctcaacatcaccaagatcaggagattgctcccgacttgacccattgttgtccccacgttgattctgtgaacccatctgttcgtgtggccaagggccataatcattctcactctcacttgcgtcctctaaactcccctgattaacactctccctgatatctgacatgtttgtgctagagtcattggtagtagtagactcgacactcctctgctgcctcagcctttcccgtgcccggcggctcagcacatgttcatcttccaactccctccacatttgcaaaattgtggaggcctgagtgcttggcctctctacagccccctgccgccccgaagttggtgactgtgattcactcaaaaaagaagaatcaagcatcgaaactgtgtgcagaccggcaagtgccatcaattctgtctctcgatttctcctctcaatagttgtaatcatctcttgtgcctgcctagcagcccacctgctcaaaatccgagagtggcgacgccgtgcagctgatgactcagccaaatcatcaccctccaaatcagaccttcgtctcctacgcacaagctgatcaccttcatcatcctcatcgtcaggattgcgagttgaactacaagacgcgaatgacatacaatcatccaaatgcccacgcatcatcaattcttcaaatccacgctcaaagtcagagcaggcatcagtagattccggcttctgttgtagcggttcaaaatccgccattccctttaacccaatcaactcctacaaaacctcacgcccaaacccagtttttcaacccctaaaattcaattcccaagttacagctacacctccatccccaacccacataatattaagaaaataataactaaattcgtctaaaccactattttacaatctttaacaacaaacacgcaaccctagtaaaaagaaaaaaaaattaaaaaagaaaaaaatgaagaagaagaagaagaatacggaaaagataaaattaaaagccctactcagattaaaattccatttaaactccaaggaacaccatctcaccatctaaagcaattacattgacaattctaaaaacaaattcggaaaagggcaattcaaaatggatattagatcggcctgagatcatgtgtagagacgaaaacgatagaaaatgcttgaattgtacagcggaaataggtttcggattggtgacaaaaggtaataacgtacctcagaagcttctgttctttcttttccctacagtctctctctatctgtgtatattcacaaaaatatacatatacacatataaattaatatatgtttatgtgtgtgtacgtttgtctatgactcagtcatatgaatttctgcgtatagaaaccctagtttcttggaaagctaaacaaatgtgagtgaaaagggagagaaaataataatggttgaagaaagatcagagagaagagaatgattttctcagaatttataaattaacattctcgtagagaagaagagagaaagagaagaccaccctattattattattattattattattattattttatttttcttttgtgtaagaaaattataaaataaataaataaataaattggatagacgatgtagagagagagcggcaatctattaggtatgccacgtataattaactattttcagaaattaaaaaaatattgagttttttattcacgcaatcaaacaatgccacgtatgttcttcacttcactaattgtttaatatccaaaaagcttgttttaattatagttttttgtggacctttttcttttttttcctatttttgtttcattattcttttgtgtggtatatatattagagttttataggtctttcatatagttaattgtgtaaaccttgtaatgtgattttttctacaaaatattgaatgaaaattcattaatcactatattggttggaatttaaattaatctttatatatatataaagaagaaaatcaaaacaagatagtgtatggacagaaaatagtgtatgaagaagaatatataatagatcactctaatgtgagattttattttga

SEQ ID NO: 184007 - DNA, 3644 bp, Cannabis indica
ttttttaaatagatctggaaaatctgatcacgacccttgatgtcaggtttgtcaatggtaatttggcgatcaaatctaccaggtctcaagagagctttgtctaaaatatcaggcctattggttccagcaaggacaacaactccagaggttgttccaaagccatccatttctaccagcaattgatttagagtactttcacgctcatcattggatcctgagaagcctccccgtccccttgctcggccaattgcatctatctcatcaataaatactatacttggagcacactgccttgcttcctgaaataagttcctcaccctggatggcccaaccccaacaaacatctccataaaatcagaaccagcaattgaaagaaagggtacacccgattctcctgcagtagctttagctagaagggtctttcctgttcctggaggaccaaccaacagtgctcctttaggaattttggctcccaattcctcatatttcttaggatttttgaggaagtgcacaaactccattatttcttgctttgcctcatcacaaccagcaacatctttgaaatagacctggaacaacaatatacagttaataagttacataagtaatccatgcaatagactagtagactgcataaacagcattagtcataccaaaaaggcgaaaaaaaatatataaagaaggatgcagcaacaaaattcaattctacaatttgattaggaaacagaaggctaaccttattttttgcatttttatcaacttttgtgacatgggctttccctatattgaatattccacgagcacccttacccccacctccaccaacacctagcccaccttgcattctccgccccatgtagaggagggaacccaaaagcaatagtgtcggtgcaaatcttaacaactcttggtaccataccatttcagagacatatgttacaggaacaaaatcgtgagtgtctattcccattgcttcctgagcttcctccaacttctcctcaaaagattcaacacttccaatgttgaaataatatttgtactgaccgcgacttccacgagcaggcgtaccattaattggtccttggacaacatcttcactagctggatcgcgtggtgagttccttacatatacttttgcaactgatttgttagaaacaactatacgatccactaaacctggttccagaagcttgttcttaaactcttggaaactaatctggataagttaataaaaaatatatcaaacaaatgagaagtgaacaaatagacatcaacatcaacttgaaaacaaaattacagcaaaaacaaaaaaaatatgcctcatatcaattgcatccataacaaataatacatgtacaagtattgatgagcctcaaatgaaaaagatcaaccatgctgaaaccttaaataagatgcgacaagagatgggattaagtttcaaatgcaagtatcagccatacaaagaaatgcctgggaaccacattctggcgaatcaagcatccacagggtcatatctagcaagggttgcaaggtattttagaagaatattaaactcgagatgaagcttcaactaggtgaaagccacacttctttcactcatcaaaagcatcaactatctgacttgctattataatcaccaatttaaaaactgggttcaactccatcacagtaaatatcagagcttcaaaactgggttccactccatcacagtaaatatcagaggaatctcctcaaaaagattgagcattaactcttttaaaaactaaaacaaaaacttgatagagtaaaaaactcatacgatgccaaagttagatttccctacccgacatattttagaagcacaacacatataatcttaatagacaagataaagaaggccactaacaatttttatagcatggcaatgaaacagttactaaaagtctagaacaacccctctaccacaaatcaagagataaaaaagcaatcaaagttcaatgaaaataaagtaacaaaaaataatacatacctgttgttgttcacggggaccaaaattaaatgaggaaaggaataatccaatcactaacaaaggagttattaaattttggaactgcttcataaaagcttcctgaaaacttccacgatcatcggtattggattcatctggaatgaaaaacaaagtgattagaggcagatatgcaagtggtacccagtacaaattaaccaaaatccaccactttatgctattgctatataatatggaaggaagcacaccattgaggatcaaaataaatgtttatgcagatgaaagtaaccttgaaccaaaaattaccaggaaaaaaaaaaagcctaatccctggtcaaggctaaaaacttataatacagaggggaaaaataagctttgctaataaattaaataaatagacaccatctttatttcttatgaattaactaagaaactaaggttaaaaaaacattcaggaccggcaacaagataatttcatctatactctatagaatgacctatctttatgtaggagaaacatccgcgacccataatttacatagagatagattgaaggaaagtttccagttatgatgatcacaaatctaatcctaagattaatgagccctctaactcagactaattttacaactatcaaatacaacaaaagcatcacatcttcaataacagagctaaatattattgtcaaacaaacagcagcagcaaataatgataattaactacattctaatccaaacacgaaaagggtatagacgtattatctaatctgagcagtaaaaaatagatttgtcaacctttggactcagatttctgttcttcccctttaggaatttccttcttttccttgggatagaagttctcatagtctgccaacaaaatgaaaccttctttagtttactgaaaacccacagaaataataagtataaccaaaacattagggggaaattaaaagctcactctttttctttggggcttcgctggagaatagtctacgaaattcagggttgccgagaatgtaacgaaaatctgaagcagaaacctttcgagctccaatagaagtaacatagcttctcagaaaccctaaagccccatctacgggaccgccaccctgatacgtatcaacacccgcaactgacaaaaaaccttcgttttcgttcaaggtcgctggccttcgacctccatacaacaaattctaccaaacccaatacataaatcgacagaaaaaaaaaattacaaaccccaccaaataaaaatttaacaaaaaaatagaataaatcagaaacaaaagaaacctcgtggccatgtagaaaaaacccttaaacgaatcagaaaacttactcttgaacgggaagatcgtgagaaagagcgtccaatcctggaaaatatcatcgcttggagtgtcccagagaatcaaaatgggaacgattgtaatcaggaaagagataaataagtactgaaaaatcggtaaaagatagagaaatcaaaagtaatttaggtgatttaacaaacacattatttgcgaatttggaatggttcggatgaattaagattttttaagccgggaagggtatgaatctccctcacaccctcagatatatgggcttcgcttcttttctttattttattttttattttttta

SEQ ID NO: 184008 - DNA, 2770 bp, Cannabis indica
aaaataaaataatataaaaaagagctaaactttgtctcaatcaaaaatcaaaagcttcatcttctgtctctaatcacaacgcaattattatcattcaattcaaagttgtaaacttttctcttttctctttctttttatgtctcttttgagattcaaattcaattacaaaaaataaaaaataaaaatcttagctttgagcttccaaaagcttcgtagtcctccgccgactatggcatcgccgccgccgaacaagatcgagaaggcccacctgatgtaccgggaaggacggtaccaagaggcgttagggttttacactgaggctctaaccatggccaagaccaaaccccagaagattgcccttcatagtaacagagccgcttgttacttgaaactccaccatttcaataaggttcatctttttctttatcatattttttaaattttgttttaaatctccattttttagtgttatagctcaataatcgttctggggttcaatcataattatgaatttttctataaattctcaatctttgggattttaacaattttattttttaggcaatttttacttactattatattgaatttggattcttttatggagttatatggtaaatttcacattttcattcagaaaaaagaggtacttgatagtcattgagttgaaacatattacataggaatgataaataagtatatctgcattttggtatattatacataatttttattctcagagtgaccttgttctgagtctgacctgaccctatttttttttatcaggcagcagaggaatgcacctcagttcttgagcttgatcagaatcatactggagctctgatgctgagggctcagaccctggtgacactcaaagaatacaattcagcactttttgatgttaataggctcattgagttaaacccatcatctgaagtttatcaaaaccttgaagcacgtttaagaacacaactggtatctattcttttcttctacctaaaacttatcatattataggacttaaaataaagcatggcaaaatttccatgttaattctgatataggactttggttgaatcagttttcatttcattctcatttcattcttttgtttggttgctttttaaagtattggaatggaatgacttttccacaattttggtggaatgagtattctattcttattcctattctcattcccaattctaattcccgtgttttcgttcctctcaaccaaacgtactcttaaatatacttctgctgttttgggttggaatttattagggatgacatgttaatcaagttataagattagcaattcagcattagcagtttgtaagagatttcttttcttttcttgctcaaggaaaggcacttgctccaattcccgagttagaagaagaagaggaagaagaagaagaacaagaagatgaaaaggaagaagacgagctaattatagacgagtttaagggggaaaagtgtagaggggaagaaatttcaacggttacatccgcaggaacagttctgaaaaccgaggttaaaaggatcacaactgatgctgatgttgttaactcccaaaatatacacagcaagaaggcttcttcacccgaacaacaagtaaagaatcaaatagtgaactcaataaagaataaacctacagctgaagttgttgttgttgctcctcaaccacagcagaataaagggttatcagaaaaagatccaaaagggtggcaatcaataccaaaaccaaagggacattctacattggactatggaaggtgggatagagttgaagatgattctagtgaagacgaggatgatgatgatgaggaagaagaccaaccacaatatagatttcgtttgaaaacagtcggtgtgcgacaagtgaagtgaaaaaaagatagaagattttcataatacaaattgtgcattcttatctctatatctatactactcaacacagagaagtcaagatcaggcagtttacgaaaaagctcagagattctctttgacatgaagatgaatctggcctccatggataagattcccatgttgaagctgtgactttttttggttctttggagttcaatggcactattctactgtccatatattttgtgtttggtgcagaactttgcaaatatttggccaagaacatctctagtgaaagtggctatgagtatgaggcttggtgatatcataattatttattatttttttctcatatatattttttgtaaggaattatatctatctgtatatattttgtgtttccttttgtttaatccttttggtttgtatgtaatttactgtttgttatcttatattttctgcatttaatgttagtctgctgttaagaagtttcactgttgaaatacattatttttacagaaaattccatttccacatcttttcatagccaaatcacattgaaaaaggtttgtttgcaattacatagttcagtagcgatacttattaattaattaaattaagagccataagatgatgatctgctattgaaatcgcagctggtggcaaattacatttcccaatttaataggtgcaagttcagcagaaagcattctccgagtaagagtgacttcttagtgaatttttatgtccgacattatttgctgaaatatttttttttttataaagatatttgttatagttacaatatcatttctttaaattttttaaaattttgaataatttatatgtatagtatcgattttctatattatagcttactatgcttgttgaaaaattt

SEQ ID NO: 184009 - DNA, 2345 bp, Cannabis indica
gtggcaattttgaataagttaacggaacagttaagcttaggattaacggacttacacaaaagttgaccttggggattattgctgctatttttaaaggttggggactaatttgcatcaaagtaaacttttagaggatttttgccgcaaatttttcattattaaaattactcaaactgcaaaatggcattaaaaaataggctataatgctatggcattatgttaacaacggaaataaaaacatttttattatattttttaaattataaaataaatcaatattctggatccatttttattgtcccaaaaaacaagatgttggcggtagtgagttgaggggatggaagatcgaggtggtcggagagattataattgtggtatgagttttatagtaccatgagggattgttggctgtagttcttctttcagcttgtctatattctcaacaattgattatcttaagatctttacgtacgactatgagttgttgcaagccagtcaacaaaattttgtgaagatagacttcagtgctctggagagaagggaatttgttttcataaaaagaagtgtttgaaattaatcttatactatttacattttcagtaaagatatccttttatattgataaagtaaattattatgctcgtaaatgttgtaatcataattgctttgattactcgtactgataaccttagagtatcagactaggttgaagtgcaagatgactttaattcaaaaatagggtaatttataagtactaacttcatatctaaatagaagcagacgactatttatttggtctagtctttaaattccaatgcaataactagaattattcactatgatggcaaaaagaaatactcaacttcattattaagaagacaaatagtctaacatcataaatataaactcagaacatcacttctattaaaagttttggaaaagaataagaagttttagcaaaattatgagctattctcttagtagaatgatacacaaataataaagagattttgctcttacaattaaataaatgcctacaatcatattaacaactaaactaaaaggagaggttattgttaattgactgcgaatggcctcaatcgccattaggcaatctgtctcaagaaccatcatcaaccaacttttatccttgatcgagctaagagccttttgaatccccataatcctagtcaactcaggcgccatgcttccatactaacatacagtacgagcttcaattaagtagctcaggtgatcacgagctaccataccaacaccgaactaagtagtctcaacaaacaatgcaacattaatattcatcttgattatttttttcaacattgtaattttagtacaagttacaatgataaaatgtttggaatacaaccattccaaacaatttttttttatctagtcctaaagctctgacacgagctgatgacgtccatgcatcacttgtatgaaagtaagtaccatcctgtcaaagatatgtttttttcccaagcttgaagcaagaataggaataaatgaagcccaccgatcatggcactgcactgatcggaagagtgtcaaagaatttttgaggacctaaagcaggcagtgattgatgacactgtattgcaactgccagatcacacggatctcaaaaaatctttttatctagttctaaagctctcttagacaacatatgagctactacatttagatttctagccacataattaagagaaacatttagaaaattaaacaaaagagatgctaacatccagcaacatatctgacaatgaggatttatccttccacttatgtctaattttattaataataacttgacaatcattctcaacttctattattggaagttcaatgacaaaacaccattttaaggctacttttaaagctaaagcttcagcaacaatgtgagctactaaacttgatgttggaaatgaaagttcaacaacttcttcacctctactattcttaacaatagctctaataccaattcttctatttttcacatatgttgttgcatcaccaactgtaagaagcatcatttagttctaaagcatcatctcgatcaacaactcttatttttttatattgtttgattctggggcaactcactcttatgtggcagccaatttttttgataaattgggtagattgtttgatagttatgataaagggtttgaaaccctactgcctgatggagaattagttatctccaaaaggtgggttaggtctatgccgatcagaattaatgatagggagttgggtgctgatttagtggaattggacttagcggatttcgatatgatacttggaatggatttctagtccaagta

SEQ ID NO: 184010 - DNA, 2843 bp, Cannabis indica
atgaggtaagatggatataatagaaaataatacaatacttacacggatgtttaagaaaagggctacatcgaccacgtggaatgccatgccatgtagccaccatatatgcaaataatgaccaagcgccattaacaatgttgccatgtcaagaaaaaatcccaaatttcgagtaagtacacatttccattctagcaatgaacctggaggtaacaccaaatgaatacaatttccatttagaactaaaaatacaaagtgtcgggaaagaatcataacataaggtatttggaacatctatctattctatatcaaatgttgatgatcaaagcacaatgttaataacctgctggtgatgtgttaaatattttaaatctatgacaatttgagctactccatgctgaatggtggatccatatatcaagtaactgaaatccatgcaccaaaatagcctacaaagcatatttgacatacccgaatcattgtcaagttgattatttatattcatagaaaactggtgtagaaatgttaatgattaagctaataaaaagatgtcatgaaaattttctattaacattacctgaagtgtctcaaatgcaatactgagtggctcaaacaataagagcagaaaaactgacatattcaaagttctatatattaccaaacagagctgtatcctgtaggcacacaacagattatgtaagagatctaacttggctacatttcactggtatgggaaaaaaatatctgcttcttcaccatttcaaaacacatctttttattcaggaagatagtaggatagttcattgcctaaatgtttctagaagaagtgttatattgattgagtataaaaactagaaactttacaatctccacaacagaaagtaaaattaagagaataccagaagacgtcaacaaagagaaccaacaacaatactgaatacacacggaaatatgtcattggtgtggcagatggagatgcatttagtctttcaagacggtctcttgctaaagcttgaaacatctgtgcaaaatgtttcaaagagtcaaaagaactaagctatttatcagagcatgtctatcacaggaaaatatgttatacctttagaaaacaaagaacaatcaaccaaattgaccacaaccctgcatgatatattgtggcttgaacaactaatggaagaaatgtcccctgcatatatgatcaggtatacagcaatttaatcacaattactaggaaaccgcagtagtaaaactaacaaatcataaaaaaaatacaaggaactgaataacaatattcatacttatcagaacaaacctagatataaaaaatatcttattaccaccaatatcaacaacattatcaaattgtaaccaaatagcagcttgccatgttgggaaaatcttgaaaactcacaagcaaaacatttgataacattatggacaaaatctcagaagtcattcttaaaggaagtaattacataggcaatggacatagcaagcatttatagatagttctgtgataggggaaagggacaaatcatttaccttatatattacatagttaacaagacgttctaccaactttcgagattcagaaggatacaactccacaaagaatatagtctgtaatttaaagcagacatggcaaccatcagaaatactaatatgcaaagtaaataatagtacaataaaagttaacagagtagactcgtgtacttgagaactcagtaaatttcaagagatagcaagcttacctttaaaagtagaataagtaaaacaaatacattgagcataaaattagcaagcagtgcaactgttgtatatgatcccaaaagtaaatcaactacatggcttgtgttcccagcggaggtattattatcactaattagtccatccggtttcaaactgagtaatgatgattcagtccaccaatgaagactaacaaaacttagcactgtacagagcgccgagatggctatatagctagaacccattggtataaaaattcagcctcttcaataaatcccagctccaaaagtttcatcagaactgttgatcacttagcatgcatagacactctcccatcaaactgtaaagttaaacgggaccaaaacttttaacagatatctgcagtggctccctcagttgtaaaataaataaaaaaactgccacacaaaaaataataataataaattaataacacgagtttatctttaatcagccaataataacaattagcagtgaatgtaacaacccaagtctgattcaactaaagtacttttcatacatatgaatgatctcacactcaatgcctaaacaagaacaacaatcatacaaatcaaagctgaaaattttaaagcacaaaatattataactttcaacaaacgaccaagttcccataaaggtcatacaaatgcctatctaacagaactccatgtgtattaacagaatattctaaaaaattctgtcaatttcaacagaaacatgtcaaatactgacaacaatgctgaagagatgcaaatgaataaaccaaaattgtctctaaacaggttatcagtaggtagccattcaatgaagtattgtccattttggttcaaaacttctcttaacaggttattaattggtaactattcaatgaaacattgcctatattacttctcctattaaaataccagataaaatttgaaacaactacaaattatctctccgtcaacaacacggcattgttccaggtaacttaattgtcaccatgagtagttaaaataattacaattcaaattgccaagaaacaccataaattagattttatttggagagatgagaagtttatcaatgtcaccaaacatttt

SEQ ID NO: 184011 - DNA, 3623 bp, Cannabis indica
tttacaaaatacaaaatctaaattaatatttaccctaaactataagtaaatttaaatttaaaacccaaataaacaatggaatactaaataagcatttttcaaagtactaaatctatattctagtagggttcttctactaaatctataatttcataagaataataataaacaaaaacaaaaagaactgagcaccaaatgaacatttacccgaaaaataaaacgagattcgattagattcctcctctttttcgagtaatcggatgaatggaacaaagcaatcccatcttaaaatttaagttatttgttcaagctctcccacactagtgtggggaaaattattaacgaaatttgcagtttaaaattatatatgtaagtagaaaaaagaaaaccctactctaatcgaagtatcgaaaagccggtgctgatcaacagcaattatacagcaataaaagaaagcttaaaactgcaaaaattgattttctttttaagtttttttttttgttccttttttaaattcataaaatccaacaaagacattattaccaatgtcggttgccttcttctcttaactctggttggcaaacttgatacccttctcgatcgaagatttgagctccggcttcaagatttctaatccttctttctcgtagtctgagagagcacccagacccaaaacctcctccacaccgttctttcctagacgaacctgcaatagtaaacatcgaaaagttcatttcttgtctgctaaggccaatgttaacacaataaattggtgataaatctacaaaagcatgtgtgacattgtttcaataggtggttgtaacagttattaatgtacaaaactatgtttttacgataaaattggcgaaagaatgatgcctacaatataattattttaagagaatttgacaacgtaatgacaaaaacatctcggaaaaaacctttgttgttacctttgaagcaaagaatggaaggtcggtgacacttgattgcacaaaggaacattccacaacatctggaaccccattaagacccttaagacaggcatcagcgaaaagtgctcccgcatagctgcaaagttgagaaaagaaaaaatcaatttagtctccaaatgaaagcaaagatcaaagcagcagaaagagaccaaacatgatttaatgcttacgccattgacaatgttgcagatccctttccagccttggcctcaacaacttctgttcctccatcctgtgttctctttgtaagagccacaatttgatcgtgtggcaaattagcttgtggagtggcctacagatattaaaagaaacaccgacaagttagacaaagacacaaaacgcaaactcatctaaccaaaacaggaatatattattttcataaagaagctaatcgatgaaacatacttgagagaacaatgggagaatggttacaccggcatgaccaccaacaacaggtacattaacccctgcatgaaaaacataatagtgtcattaagtttcgttttcttctaaagattatatttaaagtcattacttttagaacctaataaaataagaattaagtgataaaatatttaatatactacttagccttcttttgataacttttcacaaagtagccatctacagaacaaagacactttgcagataaaagtatggaaaatgctattttgcaaaataaacactattttaccaagcattcaatcaaataaacaccttaaatatttcaacaattatatagtaagaactaagaaagtctaaaaagcttcttttgttcttaaaatcatattttaagtcattacttttagaacaaatagtgcaaacaccaaatgttatttttcaaaaacaaaaatgaattttacaaagcaaccaaataaacatacatttatctatcaatttcaattttcaagcaaaattaaggaaaaattcagaaataaaacaaagagagatctttcgtaccagcaactgggacattagctttcccagcatagaaagtcctagcacgaaccacatcaagagttgtaacaccaaacaacttcttctcatcataagttccagctttcttaaaaacctcagccgcaattggcacagtcgagttaacagggttactaatcatgttaacaacagcctgaacacacaaaaaaaattatcaataaaaaatcaaactttattctcccaatttgcatgaacttaattatcaaagcttcaaaattcaattatactcacatgaggacagtacttagcaatcgcagcacaaagcgatttcacaatcccagcgttaatgttaaacagatcatcacgagtcataccaggctttcttggtactccagctgggattatcacaacatcagcatctttcaaagcttcaccgagattctcctcaccgacatatcccttaacctaaactccaaatttcagaatcagatcagagaaaaccctagtcgaatccaaattcaaggaaatgagagagacaaacctcagatctggtgttgatatggctgacatcagcggcgacaccaggagtagcagcgatatcgtagagagataagctcgagacgagaggattaagcttcatgaggagagagagaggttgacctatacctccggcggcaccgagaacgacgactttacgctcaggtacggattcggaggagaaaccgcggcggaggacttggcctctggtgaaggaggaggttgaagttagggctgtacggacggatctcaacatggatgacctcattttctttggctatggagatttgagagagagaaaatgggatttgagagtatcgaagagagaggaagacgatgagtgagtcgagttgagttgagttcagtctcgagtttggtatttatagtgggaacgagttaagaccctgtttggttggatggtgttattattagccaaacagaatattatatgataaattaattttaagtttttttttttgaattttggtggtggggaaaattaaattaatgtctcatgttctttcttcttcatataaattgggattatttaaaaaaaaaattaatacaaaaattcagaaaaatgcagtgtggaattttaaatatttttacaatttttaaaattttatttacataaaggttaattagaacttttatctctttaacttttacatatactaaatcatgcccttgaatttttttgaccgttaaaaatttcctttgaactattgagattattggatttaaatacttttgtccgatttcatttaattttaccaattcagtaattatttacatactaaattatgttcttcagacttatgtccatcaaactttgacatgtactaaattatatttcttaattttttatttttaaagaaaagcgtacttaggataaataaaaacagctagacctctcggtcattacttaaaaggttttcaaggatggttgataacagaataaaaccaaacttctaatgagtaaatacccacttagccacattacgagccgcaaagttacaatttctactaatattagagaaaatacaactaataaacaagggagaagacctattacaaaatgagacatagttctcaagtgcccaatgagactccttcccattaagagcattgataactactctcgagtcgctctcc

SEQ ID NO: 184012 - DNA, 2243 bp, Cannabis indica
gatgaaagacttgctaaattcacactctggcccgatgccctttcataaacattaaagagatctagaagattggtacactccaagatagaagccttacaaaaagccacactatcatccataaaaaataaatggctcacctttggcccccggttacaagagaaaccaattaccccgccatcattttgagcataaaaaatgagtataaagaggccttctacacacaataggaaatgataagaggagagtgggcacccttgccgaagagccctactagccaccacattatctttgggtgtctcattaattagaagtgaaaattgagggaaactaatgtagcacaagactaaatcacaccaataagcactaaaatgcaaagccttcatcatagcacccaaaaatttccactctactctatcataagctttcctcatatccaacttagcgcacatccacccattacgcccattggtacatttttcatagaatgtagaacctcataagccacaacagtattaaacgagatcaaatgacccagaatgaacacactttgggtctctgaaaaaatcaaagaagtacctttttgaaacgattagccacaacttttgtaataatctcatacacaacattgcaaagaagaatagacaaatactcaaagattttgtgaggatttttaaccttaggaatgaaaattgcatgcatcttattcaatctattcatcgaagatcctcaattcaggacattcaagcaaaccctcgataacttcacctttaactatgtcttaacatctatgataaagcacaaagtggaaaccattgagtctaggttccttcattcccctaacactagccaaagccttctcaatctcatcaactttaaaaggcctattcaactcatcatttagctcattagttacaactggagttatattggcagtaattgtagaaatggctccccaatccaccccattagaagtgaaaaggtcttcataaaagagagtaacaattctagtcatactcctatcatcctccctccaaaccccattggcatcctctaaacctttgattctattcttccactttttagagctcgctttttgatgaaaaaacatcaaattgcgatcaatgtaggccaaccaatctactctagacagctacttctcgtaatcttcatccacagcttgatactttctaaccttaagattaagcatacgaattctctcaactgttgcaaccaattgaatacccaagtgaagagcatcaatttcattcctcagctgagcaattttcctaggaatattgtcaaatttcattgtcttccaatttaccaggaccttgccacattcatcaagacccttcaaaaaatcattcacaccaccagtaaacccataatttttccaaaaactattaaccaccttaaaacaatcactttacctaaactaacttggttcaaaacaaaagtcacaaccacacggcaccagactcaaccccactcttctttcaaacaaatctagcaaaagatccctgtggtctgaatcccgaatctcgagatgagaaagtcgataatcttggaaagaatcacaccaacctgaacacaccaatctcctatccagcctctcacgtacatttgcaaaactgcctcgactgtttgaccaagtaaacttttcccttgagaatcccatgtcctgaaggtcacatgacttaagaacctcctaaaatttacggatcgaactagacaatttcagtggcccaccctttttttattcccataaaggattgcattaaaatcccccatgagaaaccatagaagttgagactttctcttcaaacaaccaagaagttctcaagtatccttccttttgcaagaaattgggttccgtaaacctccaatccttgccattattgagcaagacaaggcacgaaatatgactcaatgagagattcaaaatctgaacgtcagagtcagagtccttgttggaagttattttaccagaatctagatttactaacatgtatgtttattatattctataatccaacatcctaaacatgaatttcctaaaataatgaattaaacacatataaagttttagaaaaccttacattggttacagcaaaatattatggctccttccattcagatttctaatccttgttcctttctatcgtagggtaataacaagatctgaacctagatctcctttaggttttggaattcttcaccaccttccatactatgatttatta

SEQ ID NO: 184013 - DNA, 3400 bp, Cannabis indica
tataatttcacactctatgtacatcatctttcaagggtttatgaaggtgatttttccagctaaagccttcagatttagcatcatcatcatcatcatcatcatcttgcatgctatcttcatcccctgtagtggggcttccacctctcgttgcagctaactggaggggtccttggggagaacctgactgtgaactactagcttttgaagaatcgccatattgatcttggcccaaccataagccacctaaaacaacaacggattggtttgcaggggctgatgtgcctgatggaactctccttgtgtgaagtctatatttctgaattagaattaagccaaggagaaaaatataaggatattttgtttggtccacattcaagagcagataactaattcatctgtcaaaagtggtgcaagactttgaatacccagcaaccaaaaagagaaaaataataattttctttttaaaaaaacccagggacctacttgcaaatgactcttcacttcatcattggtcagaccatctacttgcatgagttctctaatttgtttaggggtggccactgcagaagaaaagatcacagaaactccaattagttatgttttaaaaataataatcatagagacagtagagatacacgttaacaaactgttgtgtttaattaagaaatacagtcaattcccatctttaatttcctaataagtaacgtctcagaaacgattataactttctctgttgaatcacatgcaaacccaacgagtggttctacatagaagagtgtacctttctttttgatctatttttaaaaagttaagtgtgaaaggtgaaaatcaattgcaactcaacgttaaagattctggactttttgtcggaataccaaaaaaataataatattgaatattaattaatgtcaaaccttgtgaacctccgagttgctgcaaggcattgacgaatcgcctgtgcaactcaggtgaccaacaccttctctgtttccgagcagtctgctgtgacccaattcgcaaattcgaatgaacattagctggcgaggaagagacagctcgaccagaattggatctagcattgccgcaacccgattcctccttgggattcttcaagcccggagtgagcaatgaaagccctggaatcgaaaactcatctttctcttctttcctcaccaaaaaaccggaatacggcttaataaacggtgcaaaagacctctctgaactcctatttctatagctcggaaatgggtcttcatttttcagaatcttctcatcattcatctgggataaatacataaacatgaatgagcaaaaagaaaagaaagaaaaggattgtgcccaactggaagcaaaattaccacatctggggttttgaatatttcttttgtgtaccttagtttgagtcatggaattttgcttcgaattcttgtttaaatgatcaccactggatatatcatctgtattccacagctgaacagagctcatccagttctttttatccctcgagtctttttcatttttgtttttcttatgttcttcgcgttcttcatcttcttcttcacaatccttcttcattggtataaactcctcgagcactggctgaggatttgttgtcactgcacattgggatgactcctttttcagagttagaatagctgaaaacgaagaaaacaagaaaacaaacaacagaagaaagcgttagaacccacgaatcattgttcccaaggatgaatacgtaaaactaaattaatcaatgcacaaagctataaaagaaatcaaaaaccaatttctagacagaataaaaaaaaaatccacacaagaaatgaaacccagttgaaataatgatgtgtatgatgaaaaaaataaaaagaacaggaggacagaccgtcacttaacaaaatcatgcatagaggaagctcgcgtttgaatgcgtcgatcttcttcatttcctcttccaatcttcggacgaaatcaccgagcttcgaggccctctcgggtacattttcgatggttgaaacctcgttgagaaattcatggatcgatttcgggacataacttgctctgaaatccaaactcagctccgatggaatcgaacccatttgataaatctctagagaaaaacctcagatctttctttgtttgttctacctgttctcgttacgttaaagaggaaaaaaacgagagaaaatgagaaacagttctggagaagtcgctgtattaacaaatattatacgacacctagtatatatgtgtgtatatatatatatacaagggaaaaagatgcttggtaggatagaaaatgtggactttgaaagatgaaaaaaaaagaaaatgaaagtgtaaatttaaggcgagaagaaagattctgaagaaaaaacaaaacagagagtggggaaggattgataaaccaatgataatttgacagctgtctaatttgttgatcgggtagtcgcatatgctataattaattaaattttattatttatccagatgctattcctaattttctgaatttcgttgagaaactcggtcggatttaataaaatgacggaattggcctcagaatatttgtttaattacggaatattaaatagaatagatactgtttactcttttcctctccgccaaacgaatttgcggtggatggtgcatgtatttaaaacacctataatcagaaaaaagaaagaaaatacttctcgagtttccacatctcttaaatttaaaattatccttacaaaagaaaagaaaatattaattttatcttattgccgacaaaaataccaattctttctttcttcctccctttacatatttttcaaatcactaccaattcattagtaaaaataaaataacacatatgacaatattttctttttaatgaatcccactaggagttaaatacacagtctagaaaatagatattttatcttctgaaatgaaagaaaaaaactagaagatggatgtataggttttgaatagagtcttgcccgtgtattttttatgaacgattttatgggtgagtttgattgattatattgtttatttattgcttggaacctattgtactaagtaagaaatttttttttaaaacataaaaattataaaacttttatattttttccagtaatagtactactttttgacaataatatattcaaaaatgttgaatttgaaaggatcgttaagaggagagaaggattattatggtaaaataatacttaaattaatagagaggaaaagacgtttgagagcttgtgtctaatgattacttcagtaatttgaattagtaaagacaattaagtactaatttcagttatttttataattatttataaattttattatttgtggaccccattattagaatggagtattacagttataatttttcaattccaga

SEQ ID NO: 184014 - DNA, 1747 bp, Cannabis indica
aaagaaagaaacggttacctttaaaactagacttttcatgtcagattggtgagtcttccacatcttacgtacaagtgaacagatcctaatagcttgtggttcgttactacctgattcctcagcactacacttaataactctgacaaaactttctgatctctcaaaatttttaagatggaggatcaaatgtgatggaatattgaagccagctttcgccaattccaaagccataagtccttcccaaggcacgtcccaaataattttgcaaggtttcttatccattttgtctggagcttggcactagaataagatacaagaaataagagtgattgtcaaacaaataaacctcggtacaataagtgatcacattcatggtttagtctcaaacctgaagcagcataactcgtttgttggtcactaagacaatcttcttgtgagggacaacaaaatgttcttcataataatcagacaaggcaaattttgagggctctttgaaaatttcagtacagccaaagtgccggcttgcttctgctaagtagagtaccatctacagccacaacaaggaaacatttttttttctatttttaaaagaaagaagagagaaatagatagatagaggagaagaattgatataatccaacattgaaaattatgctaataatggtaccaggggaatagttcttttaaacaagtatactatataactatataaacattctcagtgcagctattaaatgcaactatgatataagttaagtggaaagcacaatccattttcagctctcttagatttttttttttgttttttttttgaaaaagagaaagaggccacttgtcttagaccgcctatatattttcaactctcttagtttgattccagctccctcctcttttattttatgtacacttatttttctaaatcaagtttatacttaacaatgcataatatcatgaacaggtacctggccaagagcttctttctcacagtattcccttagaatattatctgaatggatagccctgggatttctgactctatcaaatgtggtcttgctattcaaagcttccaagcatttcgaacaactagccccaatcccatcaacagtcaacgagaagaaatctaaagccccactcacaggttgagtaaaaaaccctatgaaagcttgaccaagcccatgcgcaagtcctaatataccattctcccttgcactttccatgggcctctttaccactccagataccccaaaagcaacaccttgtgcaaaagcctccgttccttgaataatgccatcacccactccagtaattttcctcgaccacacctaaaccatcttaaagttagttattttcaaagtatatcaaagttagttcattgattatactttcaatgagattaagaaaacttacttgcttcgaacgtaactgcataaattgtccatcagtagagagttctgcaaaccctttactaagggaagctaatgttgagctcgtcataccaagtacatctactgaaaatagcaaatgtaaaggattatggatcagatccctaaaaattcggtttccaatagcagaacttatagagcttctccgcataaatctgtctttatgcataacccttctcagatgcacctgaaatagaaggatcagaatgtcattagtagtggtaaccttttattaatttcaagcccttgaaataaaatggagcagactcctgtaacatgataatcacatcaaatgaagcaaaaaa

SEQ ID NO: 184015 - DNA, 1499 bp, Cannabis indica
aagacattgagacaattataaagcaaataattttgcaaaaccgttataaatttggctaaacaaaactctttgttgttaagaaacttaacaaccttcaacatcatagtaacccagccgagaacagagttggagcctatagagaatctttgtagcctctgcaatcggtggagagagagtaccacaagccagggtagtagtaggcgccaaacaacgccctagatcctcaaacgaaaaaagttcatccaaaggtaacaagagatcactgaccaaagaaacattcagaagaggacgaaaagaatatgagagggttgcagacgtcttaggaatccaatctaatcttctatattcacgaaagaaacatcttcaataagccaacgaccaccttccaatagctctctaccccaaacaatacttttccaaaaaaaaagacccttcacaagtttcctcagctataagaaaattcccatttggataataaatacctttcgtggaagagagacgccaagcttgtttggctggtaaaactttgttaaaaaggaagagggcatggaaccctatacggtcgtttgattggtgccaacaaagcctctcccatgcacatcaatgcactttccagttatcacaatcaccaccccaccagaatctagcgcaaattcgatggagctcgtcaacccacttcacgagaaaatggagaagattcataacataagtcgggatagcttggattatcgattaaagaagcacctcaccactaccccccgctgaaggagagttttaagcctttcaaccaaaaatactttactccaaaccttctcacaaattaattaaaataaactagacttactccacctcgcaatacaatagagacctagctatttctcatggcatagaactctactaacccccaaagtgaagccataacttcctcatcctctatcatagatggaaatcttagccaaatttaccaactggcctaacactctctcacaccaaccaaaaatttctttgaaccggacacaactatctcaggaagcttccaagaagaagaacctatatgctttataaacatccttataaacatgtccttgaagaactcccaaaacagccttataaatatcaggaccaatcacatttcagtatttctgataaaaaccaactcccatcccattaatttttgggctcttataaggattcgtctggaaaagagcaaatttgacatccaattttttaatgggcacaagaagaaaaccaaccatatctgtcaaaactttagcaaagaccagattaagaacctgattcatatcatctgccgagggattatctgaagtaaacaaatcctcaaaataattaataaattcttgctccacacccttatccaaaatacccactcattcacccttaagaactcccttaatgacgttcatttttttcccactagaagcactagattaagaacgagatattgagtacttttcgtctttaaattatatatatatata

SEQ ID NO: 184016 - DNA, 2253 bp, Cannabis indica
cctgcaaaatataggccataactgagtaagcaactcggaaacataaagagaaatagatgagtaagcatctcaggaggaaacaaagaattaacgagacagagaaatcatgaagaataacatacatcacgaagctccactgcagaatcctcagcagttgttgcttcttcatttaaggcactcggtagatcactttccttcacgtctgtattctcttcttcattcaaaggagcattttctacatccacaattggttctaagggtagagttgaatctaagttcgctccatcagcttgcatacagcttgcattttctacatccacatttggctctaagggtagagttaaatctaagttcgctccatcagcttgcatacagcttgcattctcttcatccacatttggctctaagggtagagttaaatctaagtttgctccatcagcttgcatacagctagaagccaaatccttgccttcacatccttcttctggtgcctggacctcatctggattcataacacttaaatcaatgttttcatgtacttccacagcttgatctccagacccaggaagcatattaatatcatacccctcagattccacagatgccacatcaagggaggcatgtaaattgccattatctttctcaggatctacactacattcaatagcatcaagtctcccgttacttgtgtccgctagtgatgtttcctcaataggctcagtttcaaacctctgtgggtacatgcatgatgcctccatcagtacagaagcatctacatcgttactcttatccacaagatctgcttgaacagtgttttctgtcatgttgttggcaatatcaatagaattaagtttgatttgaattgatgactctatccggttaatagaatgatttgctgcatcagcaacaacttcactattttgtacaccaagtcccattttttcatgttgagatctgaagtcactgtttccagtatgctgaatctcgctttgaataggaatgttaacagtttgtgtttcgaaatcactttggaccaaaacagcagtatgctgaatctcactttgaataggaatgttaacagtttgtgtttccaaatttctttggaccaaaacagaaggctctactacatcctttgctggttcaacaggaccattgtatggatcattttcatacacccttaacccagtcaaatcaaatttctcatggtgcaaaaatatcagtgctgtggacatacctgaaacacgagtaaaaaccaactcaacaaacttggaggatattatgaaaaactctacccaaagtttatatgcaatgcaaaaattggataaaaggttaaagggctcatgtagtagaaagaccaatgtcaataacagaagggacttatggtgcaataagtaagttgaatgagaaagagcaaaatattccatgaaaagacagtcattatagatcttttttatgtttaatgaaccagatgcaaacgaacataataaagtaaagtaacctaaaatatcaattcaaacactaataactcaccagtaaaactgggttgattaaaaatttcttcctctaagaattgtctttgaatcaatgaaatttcttggctagtacagggagctttcttacgcaggcgacgtatgtcttctgtacttgtcaattgttgtcgtattatacttcaaaaaacagaaaaaggaagaagaaaagtgagatgtttgagtcaaaatagttgatttatggtagtatataacttactacaagaaaatatacgctaaatttcatggtaaattagttagacatagactacaggatatatgattaaatcaactatcaaccactttttctggacagcattgtcagtcagttgacccatgtttctaaagctctcttacaaagttatgtcaagtatgattcgttaactctccccccaactaattacccaaacacactcatacacaaggttgtttcattttcccagttagagcaaacaatggtttccatgtccaaaagggtttgtactcgaaagaggtttgcacttcttttttgcagggaaagagcctgcactttttttaagaaaacgagaaaggggccactcgtgttagactggcccccactgtagtcaagtacaaactctttccctgtacagtcaagtagagactgcacaacttggtatttaactcaaattcttaggtggcatttggttgggagaatgccacctagaaatggtctttctttccaattcaaaatggaatagtcattcta

SEQ ID NO: 184017 - DNA, 615 bp, Cannabis indica
gatcattagttttgtattccattactctagatgaataattaagaactagctaataagaatgaatgtccattaacaaaaacagaagaaacatcattacagacgtagtacgcacttgaaataatgagtgaaattatatgattttgatggtgatggtatgtctaattgggttcctagatggccaaaaaatactttattttattggtctaccttatgtaattgatatttttctttccttgaaatttaggaacatgatggaaccagctgttgttttggtatgcctgtttgtaggagctctttttgtaaagttcactgttcttgagaactaggtaaatgaacgcttcgtaaacgggagaagtttggtgtgccctttttctaaagagtttttttcttttcctcattaaaaaaaagtttcttttgaattctttctatgtagtctccttttacatgtttcaagataatcaaggtatatataccagacagatagtcttaagtactgaaaataaaatttagcatagcattcgattctattatcattcttattgatacttgttgccgaacataggaagacaacctcacgtgtaattggattaaaagatatgagtcaaaacgtacaag

SEQ ID NO: 184018 - DNA, 2078 bp, Cannabis indica
aatggacaaaccagattgttaaggaaaaataaactattttcaaaccaaatattggttacatagacaacatttgtgatgattatgtgaataacccagataaaaaaataagcaccaaaataaaaagaactaataaaagtaaaaaagaaaagaaaaaaatcgtttggttaaggtatttgatcagacaagtatctgaacagggggagcagaactttgaaggatgtgatgggatgaagctgagaagaagagaggaagggaagatcttcaaaatgatggtttcggaagaaaattgaatggccttgaagattgaaatgattgatggacttgaaagtcaacaaacaggtacagagttaaagttagttgaatcttcaggcagaacaaaccacataagaagaatagcaggcttatttttcttttttttcccctttaattctaaaatgttcccaagtttcgaggttgcaacctgaacctaatttctgagataatattgggaatcagaggggtcgaatgtcctcttgaaatcaaggcaataagaaaagaatgagaaaaaaaaaagtctctattattgtggagggaacaaaaacaaaataggggaggacagtaaaaactaaaaaagcaccaagcctaaataactcaaagaaaatggatttttctcttataatttttttttgaaaaaaaaaggacactgatattttttttcttattatgagaaaaaataaagaacaatgagaatatgaaactctcaaatcataattgtggagagacaaaggttatatatagagcctgaccaagttttaaaacatattaaattagtcacatgaggcaatatgaaaattttaccaaggatagaagctgaaactattcaaaaagtattactgacttcagaattgagaaggaaaagcatacagcagagaacatgaaactatgattgaaacaatagttctaatctaagagaaaaaaaggtgatgaagcttaggagtatatatgaaatcgtgatcattttattctcttgttttggtgaaatagttaaaagaaataaaataaagaaagaggggcctttcttcatctataatgtggaggagagtctcaatccaccacacagtagatttttaagttttgaggatgtcatgctaaccaaccattgaagcattttcttttgtgaaaatctccctttacccttccaaaaataaactaaggtagaataaccttttttttttctacataaacacttgaaaaaacaattcaaccgtataatgttagcattaatttgcacacctactcctacacatacacatttacacgtaaatggatatataataagcattgctattattgttattaaacaccattagtatctagcacatgtatcgttttacaattagctaacgatactctttattgcattgaactatatgtgacttaataatgaattggaccaataataatattaatatataccagaatttaggcactattagtattttttaacatttctcattaaaatgggcatgaatttaaactactttaacattgaatttcaagtgcaagtactacttttgaattaaccttaaatttcaagctaattaaggagacaccaaccacaaaaaagaagtaacgattgaatggcccactcccaatagtgaaattttttgataagtcatcttttgatcacacataacaaagtaaatatcaaattaatgaaattggattttctttttaaaaaaaataatagtatagagaaaagcggacacgatgcattgtattttggacttggatcggctttaattttcaaataataaacgaattagtggaggggttgtttcctttagttgagttgagtaaagaaactacatattatagtgcaccataatgacaacgacgctatattaaatctataattattccaatatattgtcataaatagtggaagggattcaagcataaaagagttagttgataagtaagagcctccagtttgactatttgctttgccaagattgatgaacaaaccaatctattgcaactagctagctagttcattcttgtaaataatctttaaaattggatattactaaattaaa

SEQ ID NO: 184019 - DNA, 5411 bp, Cannabis indica
ttttaccacatcgagattctgtgtttgaacgctttttcaagttacaacctccaacgtttttgggaggtactgatatctttaaggtagagcagtggatgagcattattactcgtatcctagataacatgggggtgacgggtgcggaacgagttaattgtgttgcattcatgtttcaacagcatgcccacgtttggtgggatattatggaatagacccgagatgtcagtatcatgtcttgggaagagttcaagagcctgtctaaagaaaaaatttatagcatcgccatcaaaactttgcatatggaagactttgtgaagctgactcaggagaagaagaaattggccgagtataccctagaatttgatcgcttatccaagtttgttggtgttctggtaccaacaaacttcacccgaaaacaaaaatatgtaaggggactgaatgcctctattagtcgggacttgaaaattaccactgatcacaatacattatacaagaaagtggtcgagttagccttggttgaagaggcagaacaacatgtgattaaagagcaagctgctaaggatgtcgtcacagcatcaaaccctagtatgggtggtagtgtcagtaagggaaccaatagtggcaacccaaatcataaacaaaaggttgaagcttccgaaacaccgggaagtaacaaaaattttcagggaaatagaggtggttgtcaaggtcccgggtctacattcaaatcttacccagagtatcctaaatgcaaaaagcaccatcagggtgagtgccgagctaaaacatgtttccagtgcgatatggtaggccattttattttattagagactgtctacaggctaagaaagaagaaccaaagaagaacaataatcaaaatctaggacgtttgtttactatgactcaggctgacgctgatgctagtccgtcagtggcgacatgtcagttgtccataaatggttgttcttatttagtattatttgattcaggagctactcattcttatgtatcgagtagagtaattgagagttttcacaaccctgtgatgtgtatgctttgggtttggtaccctattaccctccagaaacctaattgtatctactcagtggattaggtctttatctttttggattaacggttatgaattaaccgccaacataattgagctacaattgtttaattttgataacgtcctgggaatttcttgtctaaatatggggcaataactgattgcaagcgaaagatagtggtgttggagcctgatagtgccaatccaatggtgtttgtgggtaaggtacaaggatcacgcatacctagaatcacaatcctaaaagctaaagatttgatgcgcaaaggttgtctaggattcctagttaccacagtgaatactagcaaacctatgtcatctcgacctagaaatacgagactggtgtgcaaatttttggatttatttctagaggatttaccttgattaccaccttctcaagaaattgagtttgtaacagagttaattctgggagcagaatatgaaaggcaccttaccgaatggctccaacagaattgaaagaattgaagatccaactccaagagttacttagcttgggatttataagaccaagttattctccctaggggtgctctagtgttattcatgaaaaagaaggatgggtcactttggatgtgtatcgactatcgggaactgaataaagtcactatcaagaataaaatcaatggagaaggttcacagactagaaccctaagtctataaatataagaaaaatcatgcatacaaggggttagagtctcaatacttgacagctaaggcaaattatagggttcgtaaacttggcaaacatttgtataatactcaaaggcttttcaagacaaataacattgatttgtggactaaaggttattaatccttaaactacgtaaaatctcttgtcttgttatttatttttgatatatttcttaagctttaatataattataattagttttcaaaatctcaataaatatttataattagcgcttctactcaattgcactatcgaattcctaagatgtaagtatgaactagtctgtagagtaagtagataacgaacaagtcaaaaaatttaaaaaatttaattatcttaaagtttaatcatctcaagattcgaatcaaattaatttataattaactaaatgatattaacttagaatagatataatagtaagtttactttattttaaccattgttattgtcggtctaatccaatattaactctataaattcaatactaacttactttattaatgtcctaaaaaaagatatacaacttgccttatatcacatgtgttaaagtaccacatcgatttttttgaagtaactgtatagcaaagaaacaaagaaacacaatatagttacaaagaagaggaggagaaattaagtcctccaaactagatccttatcttgctggagtgcttctcgagcgttgttatgcgttgtggtgttgtaaactcgagagatgtgatgtagactaatatcgggaaagaggatagggacttcttgatcagctgcactacactagataagaccaaattttcttgcaaatgattatttatccttgtgatcaactgctggcaatcaaattcaatggaaccaaagagaatccgggtagccaaacaccaatgtatgccttcaagtagagcttgagcttctacaaaaagagaagttgatgcaccctatttgtgtatggaaaaacctactatttggttctatcgactgtcaagtatggtagctcccaatccgttttaaatttttcaggtccaatgcagcatcaacttgaagagtatactgtacatgttgaagggagtgagctgaaggcacctgctgtgtaggggtggttgagttttgagcagatgaatccaaaggacttgaacaaggggatatagcttgagctacttgatagtcctgcagtaaagaaataatgaaatattcctcctcaattggagtgttagtggttcggttgaaaagtgcattgtttcttttattcaaaatctgccaaagtaaattaatgaacatcgtaaaagtatctttgttaaattcatcaaggtctctcatgtaaaattctttgatatcacaattacagtttctattatagaaattcgagaatgaagaatgtttccacacagactttgctcttggacaaaggatgagagagtgagaaaaatactcaacttgattatgacaagggacaaaaaggggaaggcacaacatgcttatgaaaaagatttaagttgcaagggaggatgtgattaaaagccttccagttgaagtattttattttgggcagggttttggtgttccagactgttttccaccaaagattgaaatagtccttgttagtaccacaccaatttaatactattgaagatgctcttaaatactactctagaagtacagcatcatttccaatttcatccatttgaacaaagttatccactcactttcttctccaatgagaaatacatgagcccacctaatttttttatacacctttttccttcctactttcttttctcacatatcaaatatttttattattattattactatttcaattgattttttttctccaattttttttttcttttttcttttctgaataaaacatagcctttgatacaactactattgtacctaaactaactgtttagttagttaattagttaaaaatagttatcactgtttctttgtaacaactttctcttgctttaattcttgcttactcattgtattctcccctttataaatgaaatcatttcataaggctagttagcttttgctagtcttgaattgcaatctcatagattggattctgttagatttttagatagataagctcttagatggtatcagattgcccctgactaccgtctccaatggatccctgtaatcctgaaaatccacctcgttcttcaactcaaacatccaccaccgctactcaagctccggccaatcctccatggaatctgttctaaaattcacttcactcatctctcaccgtgaaattggatcgatcaaatttcctagcatggaaatctcaagttataccaactttaattggtcacggtctatgacatacttcttggaggtatttctccacctaaacgattggttaatagccaaaccaaacatgaatttacaacctggaagagaaaggatcaacttctcctcagttggcttcgatcgtccatgtctgaatctgttcttggttctctagctcaattccaaagctcctactctgcctggcgcgcactggaacagagatatgccagtcaatccaaagcctgtattttacagatcaagtctcagctctctacaattcagaaaggtaatctttccatttctgactaccttggcaaggtaaagattcttgctgattctctttcagttgctggtactcctatggacaaaaatgacttaatcatgcacttgctcaatggattaggccctgaatttgaccctgttgccatgttactagtcttgttgatgatctttcctttgaatctattcaatctttattactaactcatgagagcagattggaaagacattacactatagctgactccagcaacaagatttcagcaaatcttgctgttggtccaaccatatctacaaatgggaccctaaatcgatacaatacatcaggaagatgatcaaattgtcaatataacaattgtgtccctcctagaaactttggctgatgtgcctccaccacaccaagattaatttgtcaagtttgtcacaaacttgggcacacagctattgtgtgtcactacaggtttgacaaagggtttgttaccccaaaaattggtgattctcgtgccttcttgacagagattgatgattctgaagaacatcaggcttactcatcatcaatgctccctgactatgctattgatcaagaatggtatgctgataccggtgctacgaatcatattgctcttggcatggaaaatcttgaccatgaacaaccttattttggacaagattctctcacagttgataatggtaagaaacttactatctctcatcttggcactcactcaattcctactgtttctcaacatctaaagcttaattctgttcttaaagttcctgaaataaagaaaaaccttgttagtgttttaaaactactaatgataataacattttttttgaattccattcaaaatgttgctttgttaaggactaactcacagggaatgtcctactcaaagggagagttaaaaatggtctctacatgcttccctaacaacccacttcagaacctgatctggagcttcatgtcacatggccactattatggcttctacctcagacattactgagtcacatgtttctagtttagagtctaag

SEQ ID NO: 184020 - DNA, 5996 bp, Cannabis indica
ctgcagaagagaatggaactgaaaaggaatgcatgttctatatgtggaagcagaagtttgctattcaacccaagtacagagttgagaagagagcagagatggaggagtggtctatcacgctggcattcccatttggtgaacggcttcgaaggggaacacactcgcctggtgtttactctttccttcctacagaaatggtaaccaactttccgttcattatccaggctgattttctcttagcatcctcaagggagacaattcttttggacaacatttggaacaaaggaattcttgaatgtgtgcctattgcattcatagacgcatttaagtctatggtgaagactagtgaagatgcacctgtgtggaatttgcctgataagttcagatttttacctgttaaggcttctaactaccaagagctcaatgtggtgagggatgccattaaagcaaagctacttgaagaggagattgtcccaagtgaaatggtggtgaagcagaagtttttccacaaaccatgtgatgttggaaggctaatgcctgctttctggagtattttggacaaggctcgacaacaaggggtgagcttgcataagctctcttctcatgggaaatacatattgagttcttcatttgaccgggaagaatttgatgacattctcaattttttggaagttcaacaagttgataatgaatggtatgcaaaatgcatcgagggttctagtcttgtcgatagagtctctgaccctgtttatttggagcttctaatgtttattgctgataattggagtaccaaatttcagtgcacaaacatcaataatataccccttataaagtatgaagatcatagtgggaatatctctatgttcagcatcagtgaatctgtaacctgggatggtaaaagtaaggtttacctatcacttcttcctaatcaagactcttggttgattgagtggaacaaggagttcgggtctgtaagcaattgctttttccttccaaaaataacaatggatgctatacggtcaagcttcagagcagtgacactgttgaaatggcttcaaggcaatgtaaaggttggtgcagttgacgttaacagttattccgatctcctatgcaagtcgcattttaaggaggggagacttgttatatcctatgcccacttcttgtatcactccaagtcaaaggattatctctcgaagcagcaagttattgatttgtgtagcagtatgccagttgttgacagctacggccatgttattactcaaagaagtggagttcttgtccctgccaatggaagcaaatgggcagggttgtttgtttcaagcttatggagacgagaagactatgttgagttaagtagtgactatttgagtcctggcagtcactgtaaactgagtacacctgaaaatgtgctccttcaattccttaaagatcatgctgatgccagtgatgttcctcatatacctccacccaatgctcggatccctgctgtgtctggaacactaacaaagcaaaatgctttccttctgttggattggatagattactggagaagtaaaaggtcccacttccccaacaatttcttgtcgagcataatggaaggaagctggctgagaatcaccctgaatggatctcctggctccagaccacctcctcaatctttctttcttagcaactcatcgcattcatggggaagtattatgcagaatgaatctgtgcttgttgacattcctttggttgatgttaactactatgggaataaaataaaggagtataaggaagcattgaaaacagttggtgtcatgtctgagtatgaagaagcttgtaaattcattggtgaacatctcatgtccctggcggattatggcacattgactagaagcaatgtcatttcgattctcaaattcataaggtttttgaggtccaaatgtctttctccagaggaatttatcaacagcatcaagggaaagagatggttacgcacatctaatggtgacaggtctccatgtgaatctgttctgtttgacaatgactggaatactgcactgaaaatcagtgacattccttttattgatgagcaatactatggtgaagaaattcgcatttttaaaacagaacttggattgctgggtgttgtggttgctttcagtggaaatcaccagcttgtagttgactacctcaagtcatcttcacacttgaattacctttcctctgattctctactgttgatactgcaatgcatgcgctctgtatctcaacgctcagttcgaaagattgttggagcattacaaggtacaaaatgtttgaagacaaaagctggttacaagtcatctggtgaatgcatcctatatgaccccgaatggggttgccttcttcaggttgtcgatggtataccagtgatggacccaaatttttatgagaagagcctgtacaattataaagaggagttaaaactaattggagtggtggtggactttgaaggagctactaaagtatttgctaactttttcaaagagcgagcttcaaatagatccataaccaaacagattgtgttgtcccttctctcatgctataggaagctacaagaaagtactcataagtttcctgctgatctcaaaacttgtatccgtgaggtcaagtggttgaggacatgccattgtgattattacaggtctccaaaagattgcattctatttggttctgaatgggagtccatctttcctatttcgcgtcttcctctcattgatgatagtgataatggctatggcaaaggcatccatgaatataagaaagagctgaagagtatgggagtagtgttagatttcaaggatggggtcaacttcgtagctggtggtcttcgctttcatgatatcaaccttatcactccttcaaatgcactttcattgctgaagtgtatccgtcttttgatgcagaagaaagattacacttttcctgagaatttctcaaaagaactttctcgagattggttaaagacaaatgatggttataggcctcctaacaagtgcatcttgtttgattccaaatggggtgaatgcctaaactgcacagatggaccgtttattgatgagaagttttatggttcgaaaatcgcttcctataaagaagagctcaaggccataggagtgattgttgaagtggagaatggatgtcagttaattgccagccaacttggttcccatactgagttgtcaaaaattgtaaggatctatgattacttgagtaaattcaaatgggagcccaaaagtgaggacagaaagatatggatcccaaatggtagtcataagggagtttgggttagtccagaagattgtgtaatttctgacaagagtgagctattcagcttacagctgaccatcctggacaaatactatgatcacaatcttttcttcttctcaagtgctttccaagtcaaaaacagtcctagtattgaggactactgcaagctttggaaggtttgggagaactcgggacactcattgtcacatgatcagtgctggaaattttggagttacatcattagacattcatcatcgaaagaagaaaaatcctttcttgatgagctggagaaagttcctactgccaattcaggctgcaatgacattgtgctgctaaacaagcatgatgtttttgtagctgatgatcttcagctgaaggatctttttgaacaatgctctgctcaacccattttcgtttggtatcctcagccaagcatgcctgttcttcctcgcactaagttgctcgaagttttccaaaagatcggtgttcgcacaatctctgaatctgttaagaaagaagaggtttccataacaaaagatgctgaaaatgagcaggtggttttgaaggatgctttgattgggaaaggtttgataaagcttatacttgggtttctagctcatccttctctcaaaatggatgaaaaagaaagacataaagctgtggaaggccttctcaatgcaactgtttttgagacagttgaacccatccatgtaagctataatctgtctctttcttctgggaaaactttgaatgtgaaagccagtcgaatggtgagatgggacaaagatagctctaaaatcttcactcaaaagattgacgagtctaaagggcctggaaatctcattgagcgcgctacatatttctctcgagtaatatcagagggtgtgttgtgggagcatggggaacatatagatacactgtctgagctgctcaagttggcatttctgctggatttcaatgaagaggcagtggctttcttaatgaaatctaagaatttgcagattttcttggaggacgagaagttcatttcttcaaccttcccatctgactaggaggtaataagtattaatgtaggtagtttactttctatgaatgtatttgtcgaacttaatggtttggtagttgaactctatcatagtgataagggtcttgaacttttgattttctagagtaagtttgtaatggtttgtgaaatttgaagtggtagttatataaatatgaatcgcttgctacatccgtgattttcttctcaagtacatttttttatggtttctcttaggtacagacaagatctaatctgattatcatatataactagtatatgtagtttttaacattgtgcattttatgtataagagagaatttctttaattctcattgcataaattgttgatgattgaccaaaagttcctttgttttagaattattagtgtgactaatatagtaagagccattgtactgtaaatataaaagtcaatccccattacatgtacaaagacaaatacaatatttataaatctgatatcttttgtttttctacctaatatagacaaaggaaatgactcaagagtattcctggctacatgaccaagacccatacaaaataaaaaaataacagaaaacagaaaagagagaaccagtaaacaaaaattcccccaacaaccaaaaaaccagaactccaaatgtgtaatgatattgttataacataaaaacctatttttgaatgaagtcaagtagtggctggttttttgttaagaagtgagtccctgtcattacttgggtgataacatgatgaagagctcaatagatgctttacagcaacaggtcctctgcatattgctcttgttattcttgttctgtttttcattctcttctttatgactttggtttcttgctcctgaaataccaaaagggtaatttctctcttaaaatatgtaatcttttctcgtattgtctaataaaaaaacacacacacacatatatgtatatatatttacctcctcctcctcatgagtctccaatattacaatgctgtcagcactattggcactaccccatttctgtttcatgtgattctcatccttactgtcgtttttaactgcataatcatataaatgtattagaaaaattctatggtggggtgcattattaagtgtctgaatattttagatacaatatacaaattaccagaaacacatccttagtggtgtactataaaaacaccctataatatatgcacaaatgttttggtaataataataatgcatgaatggtgttgcatattgtcaaatactatacatatatatatacatgtatatatatacttaccatcgtccttctcacccaatgatgactcaacaaaaaacactctgaaacttggtgatcctggacataaatttcctctctcttcatcttcttcttcctccatttcctcttcttcattctccttctcttcttcttcttctaccaccaccattttctctaaagcctcaacctttaccactgcactatctttatcctcctcctctgttttctcctccatggtttccagctttgtttcttccttcactggttttggtcgtgacccagaagaagacacactatcatcctccaaagatatcgattttctgctctcgttttcatcaacagaagaaggtaacatatatactttaccatctttcaaaagctcttttttggagatt

SEQ ID NO: 184021 - DNA, 8345 bp, Cannabis indica
ctgtgcacacccaactcttaactagagatcagctttgcaattttttcacatcaacatttttatcatcagatttgtttggtgtgtggggttggaagctgaaactcatcagcattttattcttttgatttgttgttttttctaaacaggtttgtgtatgagatcttcagttggctaggcttttcaggcttggaacttgcagttcacaagctggagaactttttttgtctataacagatagcaggttcaaggataaagtagtggtcatgctgcttgctgcggttgtctactatatttggctaaatagaaacaattgtacacatgataatagctcttacacaattagtcatatagttaaagaaattaaaaggattgtaaagtatagattgtatagctatagacaaaggggattgattccaatagccaaggtttaatgtgcaggctgctaacttgatgtgtaagctgctgccgtgcctcagtttgtttttgaggcttgtttgtaatttgtttgttgattaataagaacccttctcctttgataaaaaaaaaaaaaaaaaaaaaattaaaatccctagaaaatattcactcttcgttgagccagttatcgtgatttgtatatcattagcatgataaatctgacaaccgtacacatgggtaattttatgatagtaattccaatttccaagcttatgggaagcttcgtgggttcagttttcaacccagtaatgaaaatgctaacggaatagtgtcaaagagaaaagggtgggtgaccacactcaaactataaaagggaatttggggctattttctccaccaatagagaatggaatggaccagtttgaagaaacgaacaacaagcacccatttttacatattttatttcccaccaaataaaaccaaacgaatctcatcttctctgatcagaaccacattgttttctgtccatacaaatatatgttattgtttgttatatcagaccccacaaacataattcctgaaatggattctcttgtctcttcccatcacactcatttacttcatcactctttcaatggcggcctcctcagccataactcaggctgttccgctctcttttccaaaccaccactgctctaggttctttctgccaggtggtctctcttcggtgtcacgttttcgcacaaaccatccaaaagcttcgcttggtgttgctttcaatggggcccggacgttatctcatttctcaaaacgggtgtccccttctggggctgttgggttgacctccagttccaggttcttgcaaatgggctctcgagaaacttgttctggcagagaaatttcagcccagtctagcggtgcagagagcagtagcacttccacattttcacaaaatgtgagtaaatttgttttctttaatatttgatttaattatgtcgttgttgagtcttgaagggtctttttctttgttgagttttgcttttcattgttccaaaatattggacatgtgttcgtttgtgtttcctttttatggggatttcaagataatgcatatgataatcactcgtgaaattgagatgggctgtttttgtttcgttttagaaaaaatgatgtatttgaatgttcagtgataaaattgtaatatgttctttcgtgtgtgctattattttatattttgttttcaggttcttaagctagtacatttgattgtttcacttggattgatactggcaacggacaaatatttaaaaaggcatttgtggcagcatcaattaagttcccaagtgctctctttgggatgttttgtatattctccgttctagtgattctagacaccattgttccggcagcagcagcaagtgtgatgagcttttttgagccagctctattgttcatccagagatggctcccattattctatgttccgtctttggttgttttgcctctctccgtcaaagacattccagcagcttctggcatcaaaatttcgttgatcacaggtactttatgaataatttgttggccaacatataatttcaaagaatagtcgtttctggggtgtcgttgaattttgttaccaaattgttttagcttgaagatgttatgctatatatatatttggaaatgaaaatttagtattaaacgacttgcatcaactataaaaatattataattaagtatgatattgttaggatcccacattggcaaagtatgatattggttagtagtatataacttctttgacactctcttctcttaggctagcttttaagagtgagttctacccagtagttatcagttatccttttaagcaatagtggaagttgtgatgaattcggttagtcacttcaaatccaacttcttggatgtttatgtgtatattgtcacttttttcctaacttgtctaacacaaaagaatattacaattacaatggtaccatatgattttcatctctctttttctggtttccctaaattaatttgaagcatccaaatgatggaaactatgatgaaacttattattcattttactctttttcaaaaatcaccttcatgaagtttcttttccaatcaacttataacgtgttgattgcaaacttctggttgtcgtttattcaaggcaaagataatattttgcaattaccatgtacatataatgttctttgattgtacatctggcatatggtgcacccagtgtgcattgtggcgacacacaatacgtcgctggtgcatgctgtatgtgaccgtggtcacacatagcatgcaactggtgtacactctgaggagtttggctgcactcatgcatctaatgcttgcggggtgccatgtttggtagcttacactgtgttccccgtacacaagccatgtgtggccaagtgcatactgagtagcatgtgcagcatttgtgtagagcatgctgagtgcagcaacctcttcaatacaggtgcatttgatgtgcaaccaaccacatccacttctggggtgtcgagtactgttgcgtgtgtgtggcatgcaactgctttcaagagtagcgtgaagctactgtatattttgaaagctcattataacatagagatcgacgacaagtcatggaaagcattatctttaaggaatacaatttggtttctcaactgtttttagaaagctaatacatataaatgctgcaagattctccttaaaaaagaatgactttaatgtttacttttaaaattgtgccatgatgagtatccaatgatgttaaaagttgtagaattagaaagtttgttgtgtacagcatgtggatctaaaaccctttagaattttccctgcaaaaccgaaaatgtttaaatggaaggaacggaagtcttgtctccttatgggtctagctatcatcatattatatatgcatcttttattccttatttctgcaaattcaacactaaagtttagtttcatgcactgaaaagcaatcacaagagttgtgcccactccgtcagctaactatttcatagttcgtccattatttcttcatttcttgcagtcataaaagatacagaacgcaaccccttaacgtagtttttttatttctgttttctttttattagtgcaatcacatgttaattcatattggctttctgcagttggaggttggtttgctacactttgtgttgcaggatttacagctatagctgtaagaaaactggtaaaaacagaaatggttgatgctgagcccatggcaaaaccctctcctttttcttctattgaaatctggtcttggagtgggattctgctcatatcatttgtcagtgcattactataccctacagcgctgggcacaggtgctcgaacatgccttccattccttcttgcatccactgttctaggctacattgttggttcagggtaaaatttcagtttttacttttacatcacaagtaataatttcatcaaagttttcccccttcctacataagacaagtagttcctttatattccaagtttcatgtgatttagattttcacatttttctttccttttaacgttataaattatatttccaggttgccatcaggtgtgaagaaagtgttccatccaattatatgttgtgcactatccgcagatctcgcagcattggcttttgggtacttttctcggtctggacttgatcctgttctaggtacagtaaaaccttttagtttttgctatttactttctctggttgcagatccagatgtagtgctacttacatacaaacaaacaaattatgattatagttcgtctggtggtgctatttacatgactttattagcctttttagtacttcattttactttgtggctactgccttattatacttttcttcgctttctctgtccccttcctgagggtcatgttttttttcctctctttccttttacggcaacatgtccatttatgttggcattctaatagaactacacataaggaagaacgagaaacaccaccattgagccaaaagatgtatgtaagagtaaaatttcacaattataattgtctcacttgacgtactacgatgatgagcacatagatgtggagtgcatgaaaaaatgtcacaatattattagaaagaaaacaggactatagaaaactgtgataggatgggctaatttttttttaggatatttgaataacaaaggatttacgtgatgcgaaaacttagctatttaatgctctctcttttcatgtaagagcaccacatacacagacataaagcaagggtgagatccctcgcctccatagcatgcaaaagtcatatgtttagttttaattcttattacctgttacatatccaagtacatgattccttacctgatacacgcaggcttttacctaacaaaggtttcatctgatcctggagctggggatgtactgatgggatttttgggttctgtaattctctcgtttgctttctcaatgtttaaacaaagaaaggtatttttccatttctcatattggatgttacaagctccccatttcaattttattttattttcttgttggtatctaacgcatgcacagaccactctatactggtttcgaagaccatctcctagcaagcagtgtcttaaatcatgatcaatacaaaaggattactccatcctttcatgcagtttaactaggataattattttcgtcatatagaagccaagtagtacaacatgcatattatgcaatagtaattgagtttctatttcctttttttttcacatggaaatgcaattatcattttccctggaatgtagctgttttgggttttttacttggtgaaattccatttgaaatgcttctttgagcagaagtagtttgatttctcttagctgtattgaaaaacctaaccattcctttggttttgtggtctactaaaacctctaaagactatcgtggaaaaattactacagtgcagatatacccaaatatttatttgtatcattatatattccttcagatttactattatgttgctaaacagagattattactgaatatattttcagctggttaagaggcatgcagctgagatcttcacgtctgtcatcctctcaacaatattctcattgtattcaacagctcttgttggacgtctacttgggttggaaccgaccttgactatatcaattctacccagatgtataactgttgcattggcactcagtattgtgtctctgtttgaaggtaagaaaagtgtgcttgtacatcgaggataagtaatcaactgcaaccaaatcttgtgttgcagctacctcgcttttctaaaaggtctccaaataatatatgaaaaatgatgataagcctagtttattttcttttcgaaacagtttcttccactcatcacccaagagggatagctcaaatggtctgacatgtggtttgctcccacattatttgaggttcaagtccctcctgagtacctacgtagcagttgctataatttttttgtctcccaaatattatagggggaggccgggatcctagtttcaaaaaaaaaaaaaaaaaaagaacagtttccactcatccaatgtcctatcaaattttcactcattttccctttaccaacttgaatattgtagtattatgataagaacatgaattttaaactcctttgtggtgtatgtatgccctgcggtatgaggcatacaactttactttcaaagcttagagttcatcaggttaattgagtggcttacacctctgatgcatgaggctctttcagttaactcattgttttcttttcattcaactttttaccactattgggaccttaagcttaggagttgggacccatattttgcttcttccaactgaaatacatttaggagaattagattggataagatttgattaagaaaaaatagagaaaactatagaagaataaatgagttaaataatttgtcaacaataaactataagaaaataagtattttctttttattattaaggtacatgaaaaaggaaggattgaataggataaaatcatcacaagtttttcaatttgattaagttgtctcattctagtgtgattaattagcttgttggaattatttttttaatatcctctccaaattttattacaaacttacattataaattttttcaaatcctactttttaaatgtaatcttagtgttagtacacataatagatagcaacagcttaaatatgctaaatattttgaccatttacacaatgacttttaagcattttttgtttctcattgttgtcagctaacctgactcgtgaaatatttttttcaggtgccaattcatccctgacggctgctgtagttgtagtaactggtctcgttggggcaaactttgttcaagcagcactggataaactacggtttcgtgatcctattgctcgtggtatagcaacggcttctaggtatgaacattgatacctttaattgaaggtctacttcccttttttcatgttttttacttctgctgttaagaaattactagttgtgataacaacttacatttaagaacggaacccttaacgagtttatactgatcttctgattgttattattattattgtcgttgttgtttatcattcattcttcaattgttgcagtgctcatggattgggcacagctgccttatcagccaaggaacccgaggctcttccattctgtgctattgcttatgctctgaatggtatctttggctctttgctttgctcaattccggcagtaaggcaaagcttgattgcgatcgttgggtaaacttgaacggctgattcttgatttttgctgccttgtcatgaacgttgttttatttggttatgaatggagggtcgtcttgcattgtgtacataataataatatataatatgaagaaaactagtatggaaatcattatgacatttattagaccaagttaaattcttgtcattttttatcctcttcgtgtacttatgaataacaactgaatacgaatcagataattatcccaacaaggtagttggtcttactttaaagcgtgagtgactcaacatgaacagaacaacattaacaatttaaaaaagagagatgcaaaggaaaaaagagatgcttcactggctgaactgtttttccttctttctataatgtctttgcgtacttgaaaaagcaggttagagaaatagcagaataaaatcaactcttagcaatcacgtgttaaagaaaattcacacctaagtcgagacacaacaccaaactttatttaattgagaatattacaagataactctctacttttttttttaaaaaaaaaaaaaaaacaatcgtctattaataagagaaaaattagacctgacgatcattacaaataatgtcagccgggatagtagataccttcgccatacaaattaagttatgggccaaagcctaattagcgatattgtaagccgcaaaattacatagtctagaaataaaataaaaaataaaaattaacaacccataaacagcttagagagtttaatacattgattaacataactatctattcttcagtcgacagaagaaccattcaaagaattaataactatttcaaagtcgctctctatcataacaaaatgatgctgcaacaggttcgtcgtcttcaaggcaagtaagcaagcagtagcttcaccaataagggcatcagcaaagtcaagtagatcagtagcagtccacaccacagtgccccaacaatccctagccaaagccaccacacacatagactcactcccaactctaacagggtcacaattaatcttcagccagtcctccggggggtaggagaccaagagagagtggctttagtcggcatcacaggggaagaaacgacgagttataaatctgcataactaagttttaaatagaatcaagat

SEQ ID NO: 184022 - DNA, 3202 bp, Cannabis indica
aaattcaaataatcaaaaacatacaaatcaagatttagaaatagttgagatatttttatttttttaattataaaacttaaatacatgagaaacagtactctttttttttttgagaaaatacttgtcattataaattaaactggtaagtcatttacaacaatatagtataaagaaggagcaaaagattccatccaatagctagcttcatccaaccctaaagtatatctagccaaactgtgagcgggcatgttagccgaacgtttgacatgtgagattgatacaccagggaaaaaggagagaagacaagaaatatttataattggatcattaaaagcagcaatacaattagatcggccatataaagcatttgtgaccattaaagcatctatctcaacatgaccaatttggagttcccattgtgaagcccagaccaaactgtggaaaagagcctttgcctccatttcatgagaggcaaaattacctaccagaggcatggagagggcagcaagcacctggcctgtactgttgcgtacaacagcacctacgccgattcgattggaagtttgatccagggcgatccacattcatctttaatgaaccaacaattggtggctgccaaggcacatgagcaggaggtgttattatgggcagattaggggcaggttgttgtttggctcgatactttaattgtgcagatctgtagttggacatgtagttgttagcataagaagctaattgtacatcaggtttggctttttgcccatgaatcacacggtttctctcagaccaaatacaccataaagtgcaaataattgattccatttcagcgactgaatgaagtgttgaaaggtgaattagataatcacccttttgcattaaagcatatgtgttccagttaaaatggtagttcagagaacgccaaacagctctggcatacttacagccaaggagagcatgaccgattgactcccaggcttgacgacagagagagcatgtggagtccgtcataatgtttcttcgcaccagtgatgtagcaacaggaatagcatcatgaagaactctccaagcaaaattttttattttttggggcagcagtaatttccaaaaaaaacttccaccaggccgtggatgaagaagaagtggaggagagatccgtttcttcgatagcagctgcaaaatgatatccttagtgcacgttatatatacctgaagtgtgaggatgccaaatgagcttgtcattagttgagaagaaacttagcggtatcgtcaggattcggtcaacatcaacattagagaaatactgctgtagcttattggtgtcccattgtcgatcatcagtgatcagattagcaacaacaatttgtgccagccctttgtaatgtgttggaaaaaaatttcgatggccaggaatccatggatcattcgcacaactgatgtttctgccctcgccaattttccatatcagcccagaattcaaaattctcttccatggagtatgccttgccaagtaagggaaggtgagtgaccgtggggagcctctagaaaactgttgttaggaaaatatcgacttttcagtaaccgacccaaaagtgagttaggattatcaagaagccgccatgatttcttggctagaagcgcctgattgtaatgtacaaaagattgaaagcccatactcccttcaaacttattcttgcataagagtttccaactatgccaatggattttagtgccattctcgttagatccccaccaaaagtttgacatcatggattcaatttgattgcaaatggtgattgggagcttgaaacaactcataagataagtagggatggattgaaccacagctttgaggagaatctcctttcctccaaccgagaaaagcttgtcattcaaagttctcattagtctccagatcttttctttgacatcactaaacagttgttgtttgtctttgtcagtataagcaggtagacccaggtatttctcatggaaatctcggatgggcatggacaatactctatggaaaagtatctaggctgccaaagttgtatttggtgagaatgagaggaccgatttatctgggttcaaaacttggcccgaagctctgtgatatgtgttaagagatctcttaatagcaaggcaagagctttcagtagcattacaaaagagtaagctatcatcggcaaataacagatgagaaatgtgtggagctcttctagtgagtgagtatctatgtaaccgacccaaccgttcctcgttttacagcaaacaagatagcccttcagaacatattaagaataaagaaggagacaacaggcagccttgtcgaagtcctctagatggggtaacagaaccagtaagctcaccatttaagaggaaagtgaagtggttctttgtcaaacaattcattataagtgatatccaaccgtctgcgaaacccatttgtaccatgactgccttgataaaaatccattcaacccgatcgaaattactcatgtctaacttcatagctgcaatccctttacgaccagtagttttgagcttaataccatggatgatctcaaaagctactaagatattgtctgttataagcctattgggaagaaaagcactatgcgtttcagaaatcacatgaggaaggacaaacttgaaacaagcaacaaggactttggtaatcaattttgagatgacattgcagagactgattggcctgaagtccttcatatgttgagctttctttacctttggtagtagagtaatgatagtagagttaaggggagtaggatctgcaccatcattaagaacactcaaaatagccttggtaaccatgtttcccacgatatcccaattattttgatagaacattgctgacataccatcaattccaagacttttgtctgaatccattaactaaagagccaattcgacatcggttggagtaaaaggtttgaggagaatctcattcatttccaaaagtgaccgaggtaggtataggagccagtgtttcagcaagagcatcatgatcagtagaagtggctttaaacaaatcagagaaattcaattaccatgctcatgtctgatttggaagtgacttttgtttccatggtcagtaatgagtgaagcaattttgttgttggacttccttgccgatgctttagagtgaaaataattttgtatttttgtctcccaattgcatccaatc

SEQ ID NO: 184023 - DNA, 1680 bp, Cannabis indica
cctcattgatcattcatcgaggatttagggttgatcagaggagttcaaggtaatgaactcgctctcttagggttttgattactagatctaggttttgtgtttgattattgatcgatatggtttcttgatttttctttttggttgtgtgtattaaatggtgtgtcgttttttgttctggttgtcgtatcactaaggttgaagttgaaaggtcatacatggccttgtattgattaaatctcttagttattggtgtaggtgagaaaggtaaatttcccacacttgttatctcctttttatatactaccactagattttgtctatgattacataattatgtgttaaactattttatttgttttattatttatggtaactttaattttaacttgagttaaatttttgaacaaccccttgaatgcataaccaaaattaaactaaaaaagactcaatttcgatcatgttgaatgattgataccaactgttttagcattcgttaaagttaatcgtacaataaagaatgacccaacaaagtgtagccaaatacattgatgaaacaaatcatagacacaaaatgtagatggatataaatttgatctaagccccaaaaaaatagagacaataaatgatgagccacctttctttgatataacattatagtaagttggcaaactatcacaaaattagcagcccaaataatcaaaacgtacaaaacatcaaactcaatgaagagaaaagatcaagctaaagaaaatgacaatagacaagaaattcccaaaagacatggatgataaacaaaaacttttatacaattttggagaagccaacattatacatatataaatatatattgttatacagcaatggattttgtgcatttttgttcaataaattccaagcaacacaaaatgatgactttgaactaattttaggaaagcctatacattatatatatatagtagtagtagtagtagacatataaaatctagagtttggacaattttagagtacattattgttatatataaatacgaggaaaatagggtgccaagccaaaacattattccttcttttattaagtgtaataatattgtattagaactttttgtcaatacccaacaaccgcaatgaaacaagtataatgagtacaataaatattaaaactttaattttgcgcgtggaaatacgattaatcaatatttttcatgaagtttcattgccaatttgcaatgtttaattatctttgtaagtctcttcaatgcttacgtgtgccaactaagctaatcaatatgattaaaacaaattaatgtcccaacccatggtgttattgttgttattttctttttcgtatacaatggatatggctaacttagaatttggaacctcttttttataagattagatctgaaactataggctacgtaggacctttattcttaccctaaagaacaaacaagattcacccgaggcctcaaatataaatctataacttactcttacaaagttttgtcactatctaattttttgttttttttttgtttgttataaaaaattatcctcaaactataaaaattattgcaaaatattttctttcggttacactttgctagtttttttagttgcattacccatgtctattttaactactttatgttagtcgaaatctaattttataaacactaa

SEQ ID NO: 184024 - DNA, 2403 bp, Cannabis indica
taaagtccattactcaattactcgcatataaatgataaacatctatctcttacaaaaaaaaaaaaaaaaaaaaaaccaaatcaaacaataaacatctatatttatttcaaattatcatctctattttgacagtttaattgtataattatatctacccaatattattttgtcactcctaacgtacacccactaatcacattttactattaaattgtgtttagccatagcaagaacactcaattggtaactgaaattctacaaaaacagaaatgatccaaagatttaccaactataacttttacagatcactattaaaaacagcgtgggattgggaatcatggaaactaggaatgaatgccttttaacatttaaacttaaaaggtgcatagagaagtaagtaaattgtgattatttgatcgggagtaaatttgtgacaaattcaatgaaggttttctatttcattggttacctcaaatggagtaatgagataaataaatagaagaatgaagactgttaataagggtgggtcctaactcctaagctaatcaacatttgtcccataacatcagtcagccgtgttacgtttgataccataacatgtcatcagtgtctgtgtctctgtcttcatctcactatcagtctatgaccgtcgctcgctactaatcgaaaaggccttcatcatgccaaatatctactaagaaatccaccatctcctgcataaccaaatttaccaaaacttttgagatcaccaatacactataatgtttatatatacatatattatggtattttcgacaagattaatgctaaaacaccaccacgatgcgattgaatacaaaatcgacacccactacttattactaatctaactagtattagacacagtttactatgcataagcataagctgtcacctcatatggtggacatttgcctaataacaaatctatttagacacataatgctcacgaaaactataaatacacaaaccattttattcttattttattaatttataattttaattaacacattcaattgtattttaaaactataaataaaataataataatatcaaagacaggtaaacagaaaacaatattttgtaaagggtcagttttagtggattttgtaaacagaaaattgttattagaattttctaaaataaagagtatggtattaagcaataacacataactaaaacaatattttcactataactacacaaacggactcaatgttgtaattgtagaactaaaatatgaatgaataccgagaagcttacaggtaaaggaattggctcaggaaaaggttcatgagttgagagtaaatcttcatatgcagttgaccagctgcatgaaattattacttgcattatatcctccacatacttattatcttagtcatagaattagaaaaatagcaaattccccatatcattgaaaattgcatcacaggataaaacacaacaacaaaaatagctttagggcaagcaatgaattttttgatgaggatgtaccttatgattggatcctttgccatcctttttacctgctgagacttatctccaacccactcttttctactctcattccaagcaatggcagctgcatgatacatcagccagattatacttcagagaataatttgaaccagagtaactatgtactaaagtactacttggtaatatgatgacaggctttgatttgctgatcaattagggaacatattatttgtgaacatgtatcaaagtaaaaaaggggaaacaaatgtaaaaggcaaccatgactaatacaaattttatactgaaaaaaattggaaatgtaagacagttggtttcaaattcaattgcttctctttccatcttacctagactcaccattcgtatatttttctaatgccattctaagagatcatacacaatgtttctattgcacgttttgtatgttttaagctagcagtgatgagacaaaagcaacaaaatatcttgtgcattgacatagctttgctgtgatgggcaaaatagtatctaaaaatacttaccgtagttgacaaaaacagatgtctttatttctttttctgcaggttttttattggtattggctaaattggggtgttccgaggcttgttttccattggaaggggagtttccagcattcacctccattatttccataatgaattaccattcattgccttctacagcgtcacaagaagttaacaagtaaatccttccagatagcaacttctaaaattactacaccagataagagcacctgaataagataaaccacaaaacatgtcacaaaaaatagctgactggtaatagcctgataaaagacaccagaactagcaaggaggatgttgactttgattttgaaaagtacacaaactatctacagag

SEQ ID NO: 184025 - DNA, 1674 bp, Cannabis indica
tataaagataccactttcgatatatgaatgattaagtctaacaacttatagaaagaggtcctcatggtaaatattgaagaaagaacttcaaaaaaatgtaacatcaatgttgagcttaagaaagccatgaattgaattccgtttaaaaattgtgagattagaccgtacaaaaaaacaaaaaagttatgagattagagggtaggctggtaggtactactaaataggtaggtaggtgcatctatagcagtctttaatatttttggtattattcctaactgtattaagagtcagattcatttactgaaaaaatatatgtttttttaaggatcaaaaaatatgtgtaggcgtcttctataattaaattcataccattttacaattaaaaaaaattactttatatattattttttaattttttttttctaaatttacagattgagtttctaaggtggttacatcgctagttgcaataaagttttttatacgatttttttttgcgatttagattgcagcgctaattgcaatataaatttctatttagaatttcgtaaaaatatataaaaaaaattagaaatgtaaaaataaaaaagaacctaaaaaaatcataccattatattggatattcattcttattgttttcaaaatataaatttgcaaacccttaaaaaaatataaatttgtaaaaatatggttattttatataaaaatattttatgagatttttttcttaaaaaaattgaaaaatatgagaattataatataagctaactggttacctactccttaattacccagttacttttacctgtattttccttatttttaactttttttttgaatttatcctataaaataacatttcttttgtaataattatatttttacataaattgtataattttctcatatttaaaattgaaatagtttattttacctagcaaaaatatattaggcgtgtatattgttttatgtataattttccatatctcataaaactaatctgttaacaaattaaacttaatagcaagtatttctgttttagttagttcataattaatttcgtttgcaaaaagttcagacaaagcaaactctaacttcgataaaaacgacaaaccaatccaaactaccaaagagttgttggagtaacactcagtgaaactgaaaagtactaaaatacacaatcaatagttcaaacaaacaaaaccaagtacttttttttacaatattcaattacttccaataatgtttaccaaaagaaagaaaccttattcctttcaaaagataaatatattatattaacttaacatagaaattgatcaatagctcctgcaataatggtgtaatgtaaattaaaagacaccaagaaaagttggatagagaggagttgtaggattgtaagtgaaacaatttggaacataagtagtggagcttcttcctacttttggagggtcccttgttttgattgccggttggttcaaatatgcatacttgctttttgtccacctgcatagtttcataaccaaacttccttaatctaataaagacatcaaaaacataagtgaattaatatatatatcttcaaactaaccagtcctttatcccaactctaatttcattagtagaagaaactctgttattctcatctttctcctcatccattaaagactcttcaaa

SEQ ID NO: 184026 - DNA, 4360 bp, Cannabis indica
tatttttttcataaatattttgtaattttcactagtgtaaaaaaaaagtatagatgtataacaaataaaatattctaaaataataaataggcgtcagatgccgagcagtatttttctcaagtacggcacctctaccacatgtttttgtatcagtggctttacttttatgctccacgttgtactattcaaatcctagtgatctcttgtgtaattttggtgtcgtttattcagtaatctgtcgttttatcattaattactggagcaagagtcatctttctctcgctttcatttctttcttgtttgactctcccagtgcaaaaccgaaccaaaccaaacccgacccacatcactaccactaaccgttttaaaggacttttctttgttttaagatcgctccattctaattttcagaattagaaacatatagcaccaactattttcttcaggctgaagaaatggcttcctttcggggattcttctgcgctatttatcttttacaggttcgaaactcgcgttttttgtttcgaaattggctgccttgtagtattttcagtagtgatcaactcattttgaattgattttgtcaattatatctatatttacatattaatattatcgaaatggatggttctgcaatatcgtcagaagtgtgaaaattgatggtttcatgttttactgtaattttgactatgttgtgaaaattgaaaagatattgaatgtgtaaactttacttcctattgctgcaggttatgttcatcgcttctttgaagactgtgaattcacaggcatttgggtaagaagcaaattgagcattaatgattggaatttgggtcgttgttattggtttatttattcatgcatttatgttttgtttgaagagatctatgttactccattgactagtattggatcatgtctagtagtggaacacaaacttcatagcttgttaaacttttttgttaatgccaaaatttcgtgctgttaatatcgagtgtcatgaccttcttgaatgctttcttctttgttgtactttaaattgtgatatggttgctatctgctggttaggaaaaaacatacaaaagagtactgtgcgatgtatgatatatgtggcgaacgcagtgatgggaaagttttgaattgtccttatggttccgaagctgttaaggtagcctctgctctctggctacagtaactgtggcatgtacatacacggttacattctatgtcattatcatttactaataattgctgattgacttattattttacttcctttgtagcctgacgagctgttttctgccaaaatccaaagtttgtgtccgtcaataagtgggagtgtttgttgcacggagacccagttcgatacattacgaactcaagtgcaacaagtaaggatattttcaacatatctgatgaagatattgttgttggcgtttattttaacagatatgtatttataatggttaagttttatccatctttggaaccatatatgacctactttttattgtggaaatgcattgtactccccagaattattttttatgaagtcatttttgttttgctttctttggtatattagtatacataatatttttatgaagtcattttggttttgctttctttgatatatttgtatatttacatctaacagcttggttatttgcatactcaagtcctttttctatgctaacttagttatagtccaagctgttagatcttactcaatatttgtttttgagatttgtgtttctttgttttggtggaaattaagctaatgtataaatcagtatgctctttcaattcttattaagatttttcagtaaaatttaggcctacagagacactgtatgatctagtattgagggatactaattttttctttgttgtgaacttttgtatatattttattgcaggccattccttttctcgttggctgtccagcatgcttgaggaactttttaaatttattctgtgaactttcttgctcaccaaatcagagtatatttatcaacgtgacttctacctctgaggtcagatatcctattttagtatttagatcatgttacagtggttactctttgctgctcttctgatgtattctggtttgttggctgtccagtatgtttgaggaacttgataaatttataatgcacatgttttggtgctaatattacacattttttttgaagtgtatgctctttgtttatcttttttgaacatctatcaccacgactgaacattgatagcaaatataatgaacttagcaggtgcatggtataccaataacatgtttaccattatttttacagaagctgctattctatccttgattatcattagtgtggtaaatgtcttttcaggttaatggaaatttgactgtggatggcattgactattacattacggataattttggtgaagggcttttcaactcttgcaaggatgtaaagtttgggaccatgaacacacgggctatggaatttattggggctggtgctaaaagtttcaaaggtgaaccaattatttatgggaaagtttatcagcagacacactatttgttattgtgctactttaactgttactaacggctgtcccaccctaagttccatgctgtttttgtcatttcttatgggttcactaaaattgcaatatgtgacaacatttttaatcatataatatacttattttaagagctgaaattctgttcagtcctaaatgtgatctaacatttcacagcaagtattgtcaggcagaaaatgaagaacaccaacaaataggggcttagtgaattcgatatgctaatttggttaccttcacttttgcaaatttgtttgtcaggggctaatttggttagaattttttttttttgttgaagtttaggccgtttttacttattaaaggctggcagttccgttctcgatttcttataaaaactgtaacttacaatatgagcggaccatatcatattagtaaatgcatggttgcatttgcattatcatttttctttatgttgttgtcgttgttttaattattattgtaattactttttgtttgtgactgcgcagagtgcctataatataatgaccattgaccttttcctacaaaattttgttgcctgtttcattatgttgcatctcttgatttcattgcaatttacaacccaatgagtgacttcttttttccaatctatttgtacagaatggtttgcatttataggtcagaaagcacctcctggatttcccggttcaccttattccatcaactttaagtcaagtatttctaaaccaaatggaatggatccaatgaacgtatctgttattcatgtgctgaaacttcactgggtgttcttgtgcgattgcctctatctcctgcatgctctaatattgatcctcttccccatctaaagaagatacctgcacacttaaattcggacctctcaaggttggagtcaacacatatagttaaattctctctgtttaaaatttttctgcttatcttggcttcacatactgactaaattattcttcttggctctttaaggatgttgtgagctcagtgtttttcagccatgtgattatttaagtaactaattaaaatttcaggtccgatgcattgaactttcagtcactatcttgtatatagttctcatatctgcattcctagcatggagtttttctcatcgtactagagagaggagaataccttcgtctagcgtggaaccactattgaatgtactccatgatgagatcgactctgtcaaggtgctatgatttctccactagtagacattacttttacttttctgatgtgttcaacttttataatcgaatgtcatttggtgttttagtaattctgtttgaaagttgttgcttgctgagtaggaagacatagtatacttatatcaatgtagtcttaagttacttgagaatgataatggagttcattgaatgaatttactagcatacaagcattgagaacattcttttaagtgaatcagacaactctttgttgtttggtatagccatgacgagtttgctttcaacatttggattgtaaatatttttctgtgggtttctgaaaagttgcagtaacataggtactagttgacttgagatgctcttaattcttatgcagataatttatctgtatatgtgcttattcatttctttttgacttttggcacctttacaatcattgcaggggattgaaatagtgtcacaagttccagatggaatccaacaacctgctgttcaaaaatacatgtcaaactttttcaggtttgcacttctactattgctcagaatacatgtcaaattttttcaggtttgactgttagattttggacagtcacatgggt

SEQ ID NO: 184027 - DNA, 21899 bp, Cannabis indica
aagaaccaagtggactctggttatgtcagaattttacctctttgtatctcatttgttatcagttcgctagtctctttgatcctactttctttatctttatacatttgtccagtttctcctcatcttaagaagtcatggttccgtcattctctctggaagttcataatactgatgcctttcctcggtttgttctattatctgagtcttaaactcagttcgcttgaaatttttcatactttattaaataagaccgctttctcgctatgggggcgatacatatcttttttattatattacaaaggggaagtaggtctccttttgtctataggtttttgtttgctgaatctcgaggacgcaaccactataggtaacatgatgtcaccttacagtggtagcccaaagcagcctcttcccgcatcatcacccgtatcgagcgagggcagctcgcaatttgcggagtggtttggtacccaaacgggggaggtggcatcagaccaggagaggccggggcagcaagaggcaaccggcgctggtccccaagaggagggcccggccactagcgccgccgccgccgggccctcttcgaggccgcaaaatccggacccggacctgaacctagacacaaacctaggggaggtcacggtcacggaggagctaatcgaggatctccggttcatcgatcggcgatttttcaaactcaccgggctgacagaattgatttcctccaaagaggatatcgaagcctgtcagctagagcaaaagaagatcgccgaactcaatgaaaagacctcccttgttctcgatagtatcagaaagcgagaacaagatattcaagcggccccggaggaggagaaagcccgtctgagggccgatccgcgtacgcgtgaactggaggccagtctccaggagattcttttagacctcgggagacgtcagcgggagaccgatgaagagtctgagcggtaccacgctaagcgccaaaaaaggtgccgctcctatagcttctaattcccccggccgggtcgaagtttagaccgctcacagtagttctacctatagaaaagatcatcagagcatttatgattccagccgagaagactcgtaaaaggaaggatcaagaatgtcatatatttcaggagctagatcagttgacgatgaacaagtaagaattgcctcatcaaaaattgatggaattggacctaaaaaagccattcaggttcgttatcgattaggtatcagttggaacataaagatcaaagagttaactaagtatcagatcgacaaaatggaacaaatgataggtcaagatcatgttgttcattgggaattgaagaggggagaacgagcagacatcgaacgattaatttctatttcttgttatcgtggaattcgtcataaatatggattgcccctacgcggtcaacgaactcatactaatgctaggacttgtcgcaagctaattcggaaatgaaagaagtctaccgaaagcccttggtacttgtctgatcaatcacactgatagcttcaatagttcactttcttttatttttttatttaaccgattactaatccagtatacgtatagtaggcctccttcaccactccactagtggctcggcacggtagcttccgcgccccggatgtactcacgttagggcagtgaggaaccgggtaaccaaatcacgatcgttatggtatgaagtaggagataattcctccggaagtgctggttcgaatccggctcgtgacaaggcctttattgtttatgtcctattactgctattcccgtatacctggaattactgtgagcccttccagtatttgatgtaacaccttagacaaggaagctatagtaatattatgacttcatctttaggtagcgaagcccccattcgttccctgggtgaaggagccgtagaattagtccttgctttcctaaatagtgtcagtcagtgcgaacgtacgctcgttgaatagaggaaaaccgcagggttcgaagtctcgtccacgccggactgctctaaggcctaatcagggatcaagtccattctctctgtaccgataatagcgtaagcttttagctgggaattaggcataggcagaagttcggttagctggaccgaaatcacttaactagaggggcattgttgttttgtttgccccttgactctttctattgaaagactcgagagtcgttgggttcagtcaggggaaagctttcataatcactcttagtcttagcggcactcgttggttcaacaaaaagagtagttttgattcgtaaataaggagtagttcttcgtgtcgtggtggaagccattcaatcgtcatctgatagaggctctgtgaatctgtgcctttgaacaggataaggggaaagagaaaagagctttgccaaaaggctacgtacgcgagaggcgcgagcgaatgaattcgattcaatccaaagggtagggatctataggtagagaagatattccgggaaaatgaaactacgtccatggaagagaagaaaatgacagaaatgacccaggaaaggtaggtgggtggggaaggctaagcaagcatctcgtagggaattttctaacaatcaccaacgggcttcctttatatcaagccaacagatcccatttctcctggaccaaccactttaggttttgggcatactaagtatgagtacgaggtcgaatctgatgaagaagctggtcccgagaccacgcaaacgcggtttttgcaaaaataggtgtttctccgagggatacttccaaaagatcttggtcaatctcgtcaggcggaggacgacctttgcttgacactccccacgggggggaggctctgttctccaacagaccagggagtgagtatagggcatcaatcaataaaataataggatcaagtggcatatggaactccaaacctaaggtctaaagctggccaaggcctgaagccggctctgaaaccatggggaggcagcaggcgtggggtaggtcagtgaagcaagtggacctctggcctctactagcccacattggttgcggggggtatctgtgagttggccgggcaggtttgactgacctcccatgtccataagggagcctcccaaggaagctccttggaatgaaaaatgagttgcaggcaacgctttccggatcgggccctttgaagctgaaagccagatcagcttagaacagcagcaagggagtacttagttttcttttgaattggaatcaggaattaatctttttcagaggcaggcagaaagaaaaggttgttaactaagaaaagacataaagaaagaagtatagagctatctagctcgaaagctaagcaaagcaattgcgcaaggcagggtttcgctggctacaagggaaaggttcgctgcaagccttggtgtcctatggggaagatggtctagctaaccaaaagagactctttctcctttctcctcctctccaccttttccttccccaccccccaacctctaaggcctcctctagtggatcatcttcttgtccatagcgagtacttgatatacgatgatactgaacttcactcccttttcaccgcacatgctctataaaaaagtagccttctacttcagttagttgtcccactctctaacatgctgcttgcgtaaaaaattgggtttgcaacggatctgcattcgtgggagtgacctgctccaaggccatttagtgaagcagaccttcgctgacggggataccgtaaacccaccctttcggatgaggaaagaagccagcccaatcctcacaaagaaagaccgttcagagccgctttcacgctcaacgttaggagagaaagatagtttagatgagaggggagcaacgcaggaaaacaagttagccaagggtacagaatcggggagtaagaagaactctgaagggttgacctgtgactaacttcgcttcggttaaaaggcatcgggctaaggtctcacgatgagccactcgcttagagttcggtgcgaggatcaacccccttccttgggttacagagggcgttagctcaattcatagccttcctttctccttccctgtcaagatgaacaatgcggttaagcgtgcagattgttggtttggcgcgaagtgagcttggccgctctgagtagaagtgctctcctgcagcctagatctagctcagcttgatagtttcgtactgacggatcgtaataacagaaactttttcggagtctggggaccgacagaagtcaaggaaaagtgccggtgggtgcaggttgctgttgcgtctattgcgatgctttgggtcggtttcttatctagagctgaactagcctgaaggaagggggttgatcctcgattcgagtctcgtgtctcgcgtttcgaattcatttcgattgggaaagtgttcagtgagccgatccagacctaattgatctggtttctgagagcactgacaaggctaaactcgccggttgaagagagcactgaatcattcgaaaggagtaatcttttttttagttccatttggaattgactcagagaggtctgtgagctcgagctggaagagggcggtgaagctttcctcgcgcttagctagtttggctcgtgccagtgggtgaagggtgcgcttcgcattgaagtgctacccggaacctacctgacttcctcgatgatttgtttggatagaggtcggaagaagcaggcacacccaccaagtttagggagtcggaggttagtgattcttaacctgtgactgtcccgttgctcttcgtgagccatagcaacaggatttcatagaaagaaagcattcgcagtaagcctagcggcttcctatgatcaccgatcaaatagcatcacgctcaggtctctcgagcctcaaatcaagtaagtcttccgaaagaacggatcaagaagtggtggttcagtcacttcggtaggggattcgcgatgccatctgtatggtcttgctgttgatggtacctcacaatgggggtgctgcccaagcggagctaactacaggtccgaatatactgcgatcacccagacctttctaatactgaatctaatactgaaatcctgtatacgaaatttcttcagttgcttactcgacctaagcaagccagaccgaacacccgaaaaagaagttctttctccatcgaacggaaatggacgaagagcgaggctcgagagaccagagagaagagcctagagaaatttcacgataactgaagagggaatgcggctttactagtttataagactatagacttggaaggctttcccagttcgccctaacgcagtgttagggtcactacgagctggactcgtcgtgaaactcacttattcttagagaaatgatgtgtgctagccttcccttccaaccatcggcgtatccgcttccagagcttatgctttatccaatccagtttgtgagtctattccctttcctttggtttctgatctctctgtccctcccaaccatacctcccttaccttctaaggaaggggcacggttagccaatcacctggcattgggtcaagaacttaaggaacgggcgcagagccctagtgaagcggtacctccatgctgaacaccaactcacaccgaatagcctttgttgcatcgtcactttcggatcaagatccagaagaggcttttgcgcccacctccttctcttcagagatatggaactccaagccctcaacaacttactccgaaacgggttcgacagctgcgaaaaccaaagcatcaaggtcggctcggttgattgattcaaaaaccttagaatcaaaggtatcttctttcacgggtgaggatacttcagtggtaacttatgtttatgttttggctgagggatcgggagaagccggagctcttggttcgggatccgagagatttggatatgttgtttcgggaaaaccttggtcctccggtggtttgggatacaccggatctattggttagaaaattattgcctttaaaccctctcgacccggaacccctttacttgatgaattgaatcgctcagcgcgcgaaccttacacgccctccgccctagctagactttcaacgcgctagctatcgtcaatcattccattcccaaccttgaaagtaaagattaggaacggaaaatagaaagggaaagaaagcaaagcgtcgcgagtgttcctatgaaccagatgatgtaaccttctagttatagaaagccacgaattctcatgtgcttacacctagaggtcatgctctagtctggtagttgactctcttttcttgcgaatcctgtactaattcagtaagcgggatggcctattgagacgttaccataaagcggctaggtttttttttgcttagcagaggtgaagcagacatgtgatttcaaagagttcaaagaagaataaatagcatggggattcatttacggcagaatccgaaggcaaggaataggcaaagtagtagtggtgttgagaagtactcaactcagagcttctagttagaacagaacggttctcgcgggcgagcgaagggtccttaaggtctctcgagcccgccttgattcttttgaatgaaaagaaagatcaagtccgtgcagaaagacaatcttttcaaagtgattggagaacggttcagaatcaaaagcataatcaaggcgggctgtctctgtagttgattgaatagacgcaggaagcaaattcggaagtttgagtttgaaagtcgggaatttcggaaaggtaggactttgagaatgagcttattattgaataaatagaatagcctacctaatcaagggcgagaattgtattcagtcaggccccgagaaaatgattaaaaaaaaagtatcatggagacgcgagacattcagtcagaaagagagtaggctttctactttctggcaagctcaggagcaattgaagacgaatagaagtcagtgcgcgcgcggcgggtgaaggtgagactactcaaactcagccggagaacccacttgaaatagacgaatttctatcacctgggtgaaacaaaccaatataaagaatcccagttgtaaggtcaacaaagcagtctatctacaagtaggagagtggttcaccaataaacagaggcagcgtacagcgggatcatctattagtattagccgaatagctgagagtgatgtcttgggcgattacagctttgaggccggaatcaggcctctttccacaggtcaattatgtctttactttcggtgtagttgaagtttttttcaagaaagcaaaggcaagaagcccacaagggcatatttagatggggtggcggtgaaactaggcaaggctgccccgtcccaacagctatagtctctctgttggtttttcgtgtttcgcgatactgacctctgcctctctccgcgataaggagcaggctttgttctcacgggaaaaagggtttttggttttgtgttattacattaattactaggaaagggcttgatagcaggacgatggacgctctaagcaaagcgagcacggcttagaggtacaatgaaattaattgtattgtgttgtccgagacgtaatttcagatagtgactgaggaagaaaaggaagtatgcaggaagaagacgtctcatatatcttttctgcctgtgcaggtggtgtagctaattaatagagagtgaaacttgtaagcccaggtaggtaagcttgtctttcttgttatagccagtaggactacaaggaatcggcttttggtttcggcagtgaaggatctaaaatatcagccaaaggtcttctgggatgggatattgtttcagcgcagaaacagctgttatcacgactgagaggtcattctcaagcttcaggccccacatagactaatcggatcttcattcagggagtatcctcctaataagctctacttggacaagtagaaaggagtcccaatcaaagctttcgtctcatctcaggggctccgtaaaggtccgcaggagaaaggggttggtagtgaaacaaggttaggtcctatatagttggataggataattcagaaagggcagaaatgatgaggaacggagtgaaagtggagagccgtgaaacagaatttatagtcttttcgaatcgtactatactaggtataatgtatgggtgtatgagatttccgtctttgatcgtcgtagctcacgattcattcccgaactactccgggaatgtgtccaacaaagttgcttcatttcaagaggacaaggaagcaaaacaaaaaatccaagccgttaattacaacattaccttactggccaacttctacacaaagagaggtccttagatcaagttcctcaaggcaaggaaaggaggaggtggttttaagcattcaaaaggcctcattcatatttacgagttctacgcagcgaaccaggttgttataactcaagtcagttgtgaaccccctaaactttctttattcttatataactacagcttgtgagagcaacgaaaggtcttgaaaagcgagtgtgaggttcaggtacaatgatggcaatccagtgaattcacttgaagcaaagctgctttcatcttaggaagaaacttcgtacgggactcatcacgaaaaaacttctaagaaaatgaaaggacttgctctaagagtataacatatttttttatctaaaaaaagtactcgacttccaattcaaaagtacggtacttaccacgaaattgatcatagaaggccacgcgctctatttgatcatttgatcaaggtactcgtactcaatcgagtccaatagcccaaagccagtcagtacgagggcaaaaaagtcaagtgcgcttattcaactttgagtctcataaaaagtcagcctttcatttaggctgagggttctatctagtagcaaaccagctgcaaaggcagttgtaggcaggaccttagagcggtcaaatagggggcaaaattccatgacaaggttcaactcttcaggtgcacaaggtttagttggtttcgaagtgattcatcgacaatgggcaatgcactagttggagtgaggtttgaaagcggaaggattgaatgaaccgacgtcgctcaatagtaaactttctagttgatagtataaggtaaataaaaaacaacagacacggtcaaaatctttctcttttttctgtttgacagtctcctctctgtctacgctcgttccttacctaaaactttctgcgtttggtcccttccaccttgctaactaacaagagatgatctattaccagcccgcccgggctgtctcgcaccgaagcgcctgagacatataatgtgaacaaacaactactggttacgaagtggtctcaaagaactctagttagaaaggagaatgcaaagtcctgccgctccatcagtagaaagttttgacttcatttcctgagactggtccagcctgtgaagaaggaagggagaggacacagtggggcgaaaacgactatgttatctgacatccctctggagcatgaagacagacagcgcactcaagcttggatgatgaatgcgagaaatcaaactaaccgagatcgaaccgatcaatttcgacatctatctctattagattttgggtcgataatcatgtgtatgataccggtatcaaattctgagtttcaatatctcactacagtacagggagttggctcaatagtcagctaataggagggtcatgggcgagatcaagtactaccactagcttgagcttcgtactcttgctcaactcaaccagacgacacagtctcaaccacccttgttttggaccttagttagatcaaaagaagtgctcccgggcttttctagatagatggcaaggagataaattccccaaggttgcaacatttggatatggatatgaaaggcagggcactctcactctattgctaatgcaataaattcatcacaaacctccaccaaggaacgagacctatatgtgtggacaggcaagtaagtcctgtaccaattcggtcagtcactccggtgaatctgtcccatcggtggggacaaggcaaggctttcgattgattgtatctttgaagttgcttacgaacctgttcattctgtattgtagtgcgagttcaaagaaggaatgagagattcacgtaagaaagcgagcagtgttcacgtgttttgtttcaattcaagctgatagaattttataatatgaaacctttcactgaatagggcgggaaccaagccagcttcaacttctgttctcctgctaggactagttcctacctatcctattgattcagtctctattcaccacagctaagcaagtgaggaacggagtgaaagactttcatgacttccctcgatagagccgaatcattagaaaaggtaatctgcccaatctcgtagaatgctgctagtttgtctccctgcttcaatttctgctctgaaagcgttcaggcaaggcacccgccttgagagaaagaacgagtcttgccctgtagaacacttgctgaagtttgagttcatatatatcctagataaaaaaaataaataaattcgttaaaaggcctttttcttgcgtgtcaaccgcatttcattaaccaatagtacctccagagtgagttatagccctgctcttcctatctcgcccatctctttatagttataatcctgactagagtcctaatctctctttcaaacccatctttcgaaagccggcggggctacctccatgcctttctttcttcgcttagagtgttgcctgccaaatgtcgtgttgaggaccgcgcatgagaaagaaacttcagagcctccaaaaaaaaagttgtgatcgaatttcccgcaccatagaaatgtgatcaaagcctgggcctggtactggtagtttttgcccttgcttgactggatcaccaagaagtttcgttgccatagttttctccagaccagtgcttgttcaaagattttcttctatcttgaccaccacaatcgttctccaatgcctttttttagcttatcctgcctgttgccttctaggagaaagtggaccattgactgagattgaatcgattaaacaactgatgattctgtgcctaatcccgtgctcagaggagtagacacaaaccatgaccttcctatcgggtttcatagcggaaatctccgattgaagcggaatctcctctcctgggcctagccctctttcttgaagaacctagccgggaatgaacttccttttcatagctcggaatgaatttccgtatcggagagattcacgtgactttcttccgttaaggtctctcgagcatcaatccggcaagaaaagggggttgttcgcttcctttcttcaaagcaggaaatatgcgctaaaggtagatattagatatttgtttcggggtaataatatatattatctttctttcctaggtgaccaaccactcctgcacttgttccttcttctcttctcttgctcacggatggcttctaccggctagcttctttcaaggcaaggggagctcatctattcatttccctcttacgagcctatgctcaggatgttcttcgatcccaggaagttcttcgctcgtaggctacccccgttctaagcttagatcaatacctactggtactggttccatcaatttcatttccttggccctttttgagatcaagaaaacaagccttttggtgctaaaataaccccttggtaaggatgttttggtaaggacgtcaagaatatacggccgagggtccgaaggagaaaattcagtgatcgtttgcaaacctcgcctttacttcaaactcctaagaagaattcctattccttcgagcagaactcaaagcgatcatagcgcggatccccttacctacatagccattcttgcggatccgggcgtggttgttttgcaagatttcgcaaacttctgctgtgtggatcaaacatgtcttccgcttgattcgttggtgagtcccttcgtttgctttgtgtgctccttcggttttctagtagcaagatctggcttttggtttgaagattgaatcagtggtcagcctgtgcttgaacgacggcattccaagaagcaacttcctatggtatgggatagtcccctattgatgaatcaaatcactcgaaagaaagtaatttcaccgctccgtaagcaaataaatattcttttataaagaagggcggtgggaatggtttagttcggttaacacctgagcaatcagggtaaggcaccaccctagcatcaactcaccctttcggataggatcggtaggatgccatagcttcaagcaggcaagaaatattaaataaaaagtagctagcttttgctctgtcgtattgtccgctgcttcactcgaatccctaagagggatgtggagagatgaaaggttcaaggcaacggatgatccttcgaaagagtaagtacaacgagggtgatcaaaatgtcaattcggagagaggaagatcgactagccaaccaaagtagaggacttccttgagatggtttgaccacaactaagaatgttcttcaatagcgcaccaaatgcgcgcaatacaataaagcagtgcgctagaaagaaagaggagcagaggttttcaaaccaattataaagctgaaaagcaaagaaagaaaaaggggggtcttgtcttcaaagggggccaggtcagccatagcttctttgatcatttccggaagggggaagaaaagaatgccgatcgttagcgagaagaaaaagcgagagcctctgctctctccacaatatccttatatatatctcttcagggggcgccctatctattaacaaatgatataggattggtacgtctaagggaaaaagaagttcgaattgccaaagtacgcacaatggaaaaaaataagatcaaactcctcaatagtcagataggatcgtaggctaccggtgaccggcttcgcgagaccttatcggtctactcaaggcgttgctctattgggcgcagctttctggatctagctttcttactaactgaataggctcttgtcaattctttcttctctgaagatcttatgaaatttcgagtttgtgagatttatcactcctaaatgcagccgtgatcttctatacgataaatcgccatctcgtagcaccacagcctgggaaacctcttatcctctaccttacctcgaaaaaaaatctattggtggattattgtctcaggaggtagatggagtggaatagggctactccacctgactcacggtcgctccacgggaaaccaccactaggagacgaagcaagccgagggtttcgaggcagatatcgccatgacacggtagtagggaaaccggtccttgtaagcagcactagagaggggatagagactcgagacttcaaactaatgtccttctccctctgagccaggttccttgtagagtctatctactagagacattaacggtgccggggttgggaaaattcaatactagaattgaacgccctccatagtacagttcggcggacacggaagagctagttcatagggctcgtgcagtcatgggaccgacggtgaaaagctcgggatgatgatggggctagcaaccggtcctcaaagaagctagatctcttgggcgctttgtttcccttgtagccaagtcatactcattcagtacgacgaaggattgggccttcgaggtcggaactcatcacattactgagtagatcagttgggggataagggttttagttcaataaaggtgcttctcattatatcgaataataagttaggcctgtagtgctccgggattctaacccgttccccggtagtagagagagagatccgcataagccgtgctggggaatacccgctaagtaactcgaaactggtaactatagcccctactgctcgcctacccgggtcaattatgggctccccctactactagtgggtgcctccggttcgagacgggactgtttaagaaaaagaaactcctccgcaaagggcggagagaattgagttggtcattgtttcgggtcatctaagctcacccagataaacttcgttagagtggaaaaacatagaaagactgctgcctcgcttccaaccgcatctcatgtaatgttagctaccattgtcactgaacactaacccaaagtcacctgccttcagcccaatagaattcccctccattttcacacctactgtaaagcagccttagtcacatcaagggtcaccgtcaattccacaaacttcttctcttatgagaaaaggttattgtcaccgtcaccataccaactccctctgccagacctaaacgaagctgccagtttcccttcttcgggcgacctcatgactgtaaaacaagtttgacaatcattggccgggtcaactatcctatatcctatagttcaaaatttcttaaaagggcatatgcgctagcaaagactaattgcctaagtgatcactgaaactatgtcattttacttaaaagtgcttgacttgattgagagacccgtcacgtattatggacctttctcattcggtccaattttaaccgcctttacgatatttcgtaccagaatcatcgggaattcgttctactttttttaaagccacgccggcaactcgcgtcttcaaaagagactttgaaagccctttaaaccagtgtaggttaccttagatgtgggggcagaactcactgctattgagtggatggggcgagtccctttgagctaagagaaaaaagagcataggatattatcacaaagcccgattgaaagaaactcgggtaaatgtaaataaagagtactagaccagtataaatataaataagtagttgttcccctttccccattgaagcagtagtggcattcccagtggtccttgcccctgtagttgcagtggaagttgcagaaaaactggaaacaagcgcaggaatccatttcaactgagaattctataagatagtttacatctcaaagttttcttctcactagagaccgtggaagatctcctttgagccctcttaggttatgccagattctctatcgagcgagcgccttcaatccaatctctttttaactgctgtttacttgctaaggaagcatctcgtgcaagttctgttccatcctgcccattgctaggctaatccgctgcattgccagttctcttggatggggtttccttcccggcagtttgagtagaaggggaagttggaggagtttctagggccattctcctgcggtttgagtttgagttccagtggcagttggactctctttcgatagcgagccaggcacagttggagtgtcagttgaagtcgtggggtaagcccctccagacaatcctggttttcttgctttccttgtaggagtctttgtaccagccttagccaatccatcagtgcctgtcccgtacttatattaaagtgatttcgcctgaggatagtatgcttattggtctaatatcataagcagttgtagtgcttcgccctttgattcctgggagatctaaagcgctaattgatacatttcttgctgtcctgtgtgagtagcttgccagacagaatcccttctagttgtaagctcttcccctgtcataagcccttcctatcttaatccctcgcatgtcgatccagccgagagaatagggagagtccatagtagcattccatagtagttccttggttacatccggctcaaaagaagactcggttgtagatcgcatatttttaccttggatgtaggtcgaataaggattctaatttctatgggcgaaatcggattttaagttaccttgctcccgagtccaaacacgctaaggggctaagagcctaattgtaatggcaatatgtttcatacccatctaccgatctgacaggctaaggtcgcgttagcgtctatctgtattctcctaacgttcttaggccttctagaatactctttctggaccttttggaatatctccgagtgaaggaaaaagagtctccatagttccacctttccaaagggggggcagttcccagtgatccaattgcttgccttctatctaagatggtaggttcaaaccatccagtttgagtgctagtttccattgctattgtaaagcgagttgaagtttttttacatctttgccggccagtttcaagctatctagttgcagtctctgcccggggtaagattaaggtttccccttcttcaaattaccttcttcaagcgatccaatagggtatagtgcccttttcgtaacacctcctattgtcctaatgccagttggagtgccattgctaattcagaggtatctagtgtaattggtaagctaagaacatgcatttattgatagtataaggaagccctcctctagctctagtgcttctgcttttcatctttccttttcacttatatagcctctggtatcggaactatctaaatgaaacttcctttctctcccgtgggctatagggacttccacagcaactgaaggagtttacaaaagcactgcaattggttcttttgagtctggaatatttgctatcgactatctttcaaacttgtgtcttaactgacttctcctctggtaaggtatagcctatattttagaattagattacactgctcttgtaagtaagagccaggaactacaaaaacactttcaaactcactttcgggattatcttagcactggttcgagggaagaaagacaggattagcttacaaggctctaacagaagtgctaatggctttacttttataacactcacatctggctactcgctctgttgcggatttagcttcagtgtccgtttcgactgattctttagttgaaactacggatgccctaacttaacctgccccaccttgactttagcccttccttatctttagaatgacgtacgataagcattcctttcatcatgtcctcgcttaaacaatgtactcaaccgtccacatgaatacaatattcaggaaagacagacctattatcctaggttaaggatagagcgagcactcaaagaggaaaagaatcattcaccaggtatggcttcctatgcccgccggtgaaaagctttcctgatcatagagcctgcagcctagaaagatcattttgattgtaagtaaactcgttatcagtcgccgatgtctcggatagttagactagctccgcccttgcaggtttgaaataagtcccttcctcggtctatacccaacgttcaaaactttcctgtccaaagtcacatagggggcttattctttgctgaggaggagttactgataatctccaaatcttccttctctcggcttattggcgataagaggaatagaagaacaagaggggaagctgctctttcgcttcgttccctccaccgcaatagaaatcgtattcgtgaataaatctcctttgtttgaatcctatggtatggactctacctcgagctaccttcccttatttaggacaatagaaagacaaggctttgacgaacaagaatgttcacctatggcattaagatctcaatacgagattcagaccaaaccctcactgcagtggcttgtagaggagaggtccataatcttacagatgttgatatcctgtgcttggaaaaggaagtcacagatgatgaaattaaaacagctttttttgacatgagccctttgaaagcacctggttgtgatggtctccacgctttattctttcaaagtcaatgggatacagttggggagtcggtttgtcgtatggttaaaacggtattcacggagccccagcggaactgaataaaactttacttgttctcattcccaaaacagtaaaacttacagtcactttaggcctattagcttatgtaatgtgctctataaacttttgattgctaacaggttgaagcctttgatggtgaagctcattagtccggttcaaacgagtttcgttcctggacgaaagattaatgagaatattctcattgcacaagggcaaaagcagcaaatattgaaatctgggatagcggatttcacgggttctaaagctctagagcaagtcagttttgccatatagatcaagggataattacaatgctaagtccatctagtatgagttcatagctaggaagccaatctaggctaggagttgttgataggtaatagatttcgggttaataataagtgaatcctcctttttttctgtatgcctgttcctccagcctttctatgttctgtgtcaccgcagggtaagcgcaggaatatttatttaaagctgtattaggtggtatatttttttttaagctaggggttttaaagtctttcaaaagccgtatcttactctatcgaatgccccttttgaaaccagatcttttaggaaagctagtcactcaaaggagtaaagcaagtgggataaacgaattcttatttgcttttctatttccggagcactctcgaatcgttagacctagcagggaatgaaatgaaggtattcaaaaaaccatatgatgataggagtccgtcctaccttggatagcagattctaggtcctaaggatagaggctagccagttccctttttggaggttcagtgctaggggttgagttcaagttgtagttgcgttccatgcataggatgttataggttacaggttcgatacatttccagtggagtagtacattccagaaaaccgacgctttcctctatctagagaacaaggttccagtgtaggcaatctaggctcccaactctatggattttccttagttgctcttaatccagctctcaagttagctcaggacgggaggctatgaaatagttgaaagcagatgcttaattagagacagtagattccagtatctatcacagatgaaagaaagaagaagagcagcaaaccatatacttagtattagtaggggtatctattgtgttttagaagacgttctaagagtcagtcagagatctatgtttacaaaatcctgaaatcagtctagttacttcgttctctatctttatccttcttctctgtattatgcatgagttgcacagcggttgtgttcagcaagcaaggagtttacctgttagccagtgacttgattgaagctgtaggccttgaagcagcctggtttatgagctgatatagaacctatctctttccttagatggaagcccgtgtgagtagcagggcttgactcaaatctcttttttcctccgagctaggaaagcttgatctttctaggtgtaaagacagtcatctcagttctattcgttagtctagttttcttactttcagtagcaggtcttgtctgcggttaatcaatagtctaaggaagatggcacagtgaatcaacagaatgccttgttgatggcgcgggtaaaatgaaatgagagcaggatttttatgtcattacggatgaatcttctttacctacccggaggttgaggtttgaagatgctcgaccgggaggaagaattttacttagttaaggaaggcaatgcaataaagattcttcatctcgaacgggagtttgctctttcaccccagggtgataacgaaaaaaggaagacagtctcttattctagaggaagctcttttctctctctgttgcccaggagcaggtcaagtctatgtgaccaaggcaggaagaaatcagtctgaactaagccccaaggctagcgaatccgacttacttcgacttaaatctttctttttttagttcttccccgcccggggcaaagtcctaatcaaagcaggcaaaggcttcttaaattcattcatttctcgatgggaacctttcatcttaatagagtagtggaaaagaaaaaccaagaaaagattcatcgaccgggaatcaactttacttctcagatgcggctgttgatggcggagtgatcgtatctgcagttcttgttgacgactctccggtcctatagaagaagctggtattggccttggctaaagtaaagggcgggcgaaaggttggaattgatttagaagggcttggccctactctatctatcggaattcgccggttaatattctttctactagactagttctccaataagaggaatcggggacggcacttgtttttacattcttgaagactttccccgctctagaacaatagtaagtagtcagtatagccagtagttggccttaagcctagctgtgttacggaatagtgttcaggtctttcctttctttaaatagaaagtcagaatgtacttctgctgtaagagaatgtcttgccgcgcccgtccttgttctagatctagagaagagtcaacctcgagaagaataagcgtggatgccggtcttgaactccgtgaaggctttacagagaactaggcttttcgcttcattggataaaggcggagatcactggtttgtaattcctttctttggctgtcactgaattcatctggcaattgataccgaaaatcggccttttcaaaagcatcctttgatccagctttctctgctttagggtaacaaaactgtcccatgccacacgggcagaaaaatgaaatggcaactagactagttagtaatttcgtacttctgtcgttggagagcagaaatggcactttacagcaagaagaaagaacaacgaaagtcgaagataggcttgttaacctcacctgaatcagattctgtagctgatacaactgatgttgcttcatctcctttcccatccgcccggggaaccgagtcttctttagtgattaatgaattgactgctgcagaggataccacttatgtcactgactcagtagatggacgagacaacctcttttcggctcggtgacggaggaagcaaagtgcccgcactaagaaggtctggaagcacctttgtgaattagacttacaagaagttatgctcgctttcctttcgccttggacgaggattctgcccatccagcagccacctaggtaggggaggaatttttaaaagaaaggatgacgagacgagacttattcatttcgcttaggcaggaggagagaactaggtctatcgagcctcacttttgaactaaagatagttcgtacaaaggtccatgatccatgatctttggtcccctcagctttggtctgctaagcttactaaaaggggttccgatctctggaaactgttctcaatccgtctctcttctagagccttcaccttctgcagtttctgaatctgtgatgaacgaagggttttttttctattgtatcgtcgcagttttcggtttattcactgatctgaaactgagcacttgcttgggctttccctttctttcgggcttttccgcaggtgtgactgttcgatacaacctatgatttgggatggtttccactggaaggcctaatctaatatgaagatatgatggcgatcgttttctgttggctaactggcttttcccgtttttgattgagttgaaggctcgagagacctgcaattggtatgactagtcctgctcctgttcataatcgatcttttttgtagcgctttcggccggaagaaagctttcaatggagaaaggggaaaagggattggctttctattacggttgttccttttttttgccctagttctttaataggcgattatgattcctccatacatcattcttactaattatcagagggcaaagtgactagcgggcctacgagcagacctactcaaaaactatacgcggacctactcgctctcttagaagctgtctttgattaaagctcacttggaacttgctcgtttgaaaccctgtccctctgaaacgaaactcactttgcatcttggatgacagggccccgtgcatggtgccagcgggcagcacccaacggagctttagtattatattagtagcagggccgtcaaaagcaagggataaagaaaggctgcgctgatgacgatgctatcataagagaggaccagacagttcccggttccgaaagcaataacagattttttgactgagttctcggatgtcaagccaccgcaactaccgagagctcttcctccccgaaggactattgatcaccaaattga

SEQ ID NO: 184028 - DNA, 2900 bp, Cannabis indica
ccatcactggatcaatacaccaactacatggttcaaacttataagtgaatgatggggaaactgtaaggcaatcacaactgaggtatcagcattctacagtcatttcatttgcttgtttgtaaagtcatgctccattttaaatttaaccagatatagaaggatatgggtgattaagaagtccaaaaatacacagcaaaaggaaataaaatcataactcccacaccaaaatattatccaaaaccccgatcagtttcttatttaaaaaaaaaaaaatacgtccaaactaccaacagatcaatgtaaaagaaaacaaaaaggctgaatactttctcattcatcttaccacaaagcaaatctaaaactcttatcactaaaaattatatcatggtagcccacaaaacagccagcactccacaattccgtaaaaagttaagcattattgtattatgacataaaagtttgagccacaaaatcaaaggaatttcttgtcatcaaccaaccaagccaacctgaactctgtcaagaatttccacaaagtagacagcatagaatcatcataataaacatgtgcaatctttcttacacaagatttcgacttggtagaatattttcttgtgtgttaatcttgtaaaagccacaatctaaccaaaaccttaaccatcgaaggagcaaccttctaaatgaaattcaattaatggttcccaaactgatggacaggccacggaaagacctcctatccattttacctactctagaaagaagaatgttgcacagggtgatagtctattattacttgaacatgaagttgtcatgaccaataggaatccagggtagtagaggaatattttatgtattttgggtagggctggccacacgaccgtggagtggagaaatgttattaaaaatgatgagttattgagaaaatggtcagaaagaattagttaataggccctgtgataaatatggtgagctagaatatagtaaataaaaagggtagagtcattgtttgggagggttgtgtgagcgaggaattactatacataggagagtaagagaatagagtgggcatgcaatgtattgagtaaaactctttgcatcaaaggggcctaagggctcccatcagttttctcatatattcaatatagtactctactgtttctctgtagttttgctactgttctattgtttaaatgctgctgtgttgttgaattggctactggtctgagtaatctaaagtaggttcttatcattatttctcttaaagtgggagaggccaggctctcaaacagtcctgtgcaatttcaatgcaatagtagcacccagctactttcctttcttcttctctgctcgtattttgctactatttgtgtgtgagctagtgttctacctactctccaggcttattgatcaccagtctactcataaccaatttgcaagagaacccaactgataattataacaaagtataaaattttaatatgatcaaatgcttttgtttattgaacttgttaaggcttcatattcattttaagcaccaattgtccaaaatactaatcaatgaggcaagcttattgtatgacaagcaaaaaagaagaaaaagaaaataaaaaaaggaatcagaaaacatgaaactgaagataaaatttaaggtaaagatcacaataccataggagcaaggctaacaagataatacgcagataagacatcctttttttaaagtcattgcatctactaacaactaagacattcatatttcaaattgttagaatatattagcagaatattactcataaatgagctaattacttactttcctattctatttcctagtttcctagtttagactctaatcttgtataaatacatatcatttgcttgaataaaatatacaattgattcaccatttttaacaattaagacactccataaaatattagtgtcctagtttagactcccaaatcttgtataaagtcattgcctctactaacaactaagacattcatatttcaaataaatacaacacaactgaaaaaaaaaatgttaacatggtgacatgttaaattaaggaacgggaatctagtttctagtccaattccgatacctgttttccagcaaagtagcgaccattgacaaaatgatgtgccagaaccgctgaatccaaggacttgaagtgcacatatacatttcctcgcagatgagatgacccatttctacatacctggcgaaggggttacttttgttacaagattgcttgaagagaaacaatacaatagaccatcagacaacatccaggcagtctgcattgttactctcttgcatgttccctttatttggtattaaagattgaaaagaaaactttcacttgttcaggataattaaaaaccaatggatatgtaaactcttttaaccccacaaaggtaacaaaaaaccatttcaaacctttcatttgcatgtgcagtttgtacttcataaaaacaagattgtcttcctttttcttttccattttatcttactttattgccagactcaaacatcttgtcagaaaaggagagttctcataaaagagaaagaaaaacttcatgtaagatgtaggtgagatgggtcaaaactatcttagtttcacgaatgtagatacattttgtcttttcatcttttagaggattgcaagtcccttttgtaatttctctctttttttcatttatgacaaaaagctagcaaaaactttaataaatcaaaaggaaaagaaaacagtttgaaaccttgaaattcacaatttccccaaatttcaagaactctgtatggacatcctcataaaattcttcataacagcgttcaacctcctcatcggtatactgaaaagaacaaaaaaaaaaacagaaaaattactgatatacagatca

SEQ ID NO: 184029 - DNA, 1825 bp, Cannabis indica
ctcacctgattcacattaaatttactccacacaacctttaccgaagcttgataatccgtctactccatttcatcagcccaactagcagacctaagggtcaatttcacactgctgggaccatcctttgcctccttcagaccagtctccagttcgtcgcaaaggtccaagaagaccttcatatgagcagaggcatctttttcttggattaaaggcagctcaatcttctctttcacagcactcgcagcaactgaaacaagcttcaatgcaaccttcttcctcttcgctatgggagcaaggagagagcatcacacgctcgaataaacaaatatttaatattgaaaatattaaatgattaatcgacagtactaataaatttttgttcatttaatttttttaaaataaaataaaataagatttttttcatttttatattttaaaatatttttttttcctttttatcgaaattcacataagaatctacgtagaaactaacggaacaacttaaattataactgaaattcatatattaacctacataaaaactagcagaataacccatatagtaaaaatatataaaaacaaaaggttaaagaatagtatatgggctgatttctcaataaaataaagggaaatttacaaaaatactgaaatttgggttaatttttacaaaaatactgtcgcacggaaatcttttcaaaaatactatatttttataaaacaacagtggaacacaaaacagaataactgaaaacaatagtggaacaacactgaaaacttaacacagtacacagtatttaaaaaaaaaaaaaaacgctccacaatgtaaaagtaaaaaagttggaaatttcaagtacgtagtgtaattatcaaaagggtttgggttagcttagacccgagttattttcgcagcgttgttcgggtcgggtaccgtggttaagggactagtttcgttgcttgatgtttggtttctggaaaagctcaattcgaagtctctgcaaccatagatcgaccaacccttttgcagctcccaaaggtacagctctctttctctttccttcttttacaccagcatattgtaaaggtctgttgaaattttgaattcattaaaccctagattaggtctcttgaatttcctttccttttcaaatggttatattttattcattttctctcctccttttacttgcacattgcatattttcatttacaatttcagttattattgtacatttattacgagaccaccatcagtatttgaattatgatgtatgtgaacaaatttagtttttttctactttgtcacaattttactagggttcaatgtgttgtgcaatatttgtttgtgtcaaaattacaagcaatgaacataatgaattttacttttgctattggtatagcaaaagaggatggagaatatgctgtatgctgaggagcttgtgagggagttcctagtttttagaggatttaccaacactttgcaagcttatgattctgaactatcgactgatatcggtaaagggtttcaagtggataggattctggatttaatattttcagtttatgttcctacttttcaagccgagaaattggttggtctgttaagttttttcaagaactgtctctcttcatctactgatagagtgtatattgatactctgagtaagttggaggtctctattttacgctattacattgtttacgctgtacaatcgggaaggaaggataaagttgtggagttttatggcatgaatggaaatgacttgctccaaagggggcaggattggactccctggtttggtgggttttttgtctctttgttgttttt

SEQ ID NO: 184030 - DNA, 4810 bp, Cannabis indica
ctctctctctctctctcttcccagttcgcaatgtcaccgtcaacccatctctccagcggtctgagtttctccgatgcagcctgcaataacttctaattctgcggccactgataactctcttcctttctctcttatttgttttcatgtgcaatttagattgttcccttcaaaattggagtgagaaattattccttgttattttatttctcatttcaaaatagaggttacaattttaatggaggttcagccgatttttttttggtagatgggtgactgggtgttggacattttgctggttttattgatatcgtgggtggttcagcagttttttttttaaaagtaaattaatcaatacaagttgtttgtctctttaatttttaatttttgaggatttttgagatttggagtgataaacggaagaaaattgtaggagttaatttgacttaaaaaaaattggccggtttgggcgagttaacctgatcaaactgcctaatcggtttactactaatttttttttttaaaattgggcgggttgtacttaaattttaacaatccgaactttagattgggttaaaaaatatataggataaactgtccaaaccgaacgatgtacaaccttacatataagtagtctaattaaccggctaacatcttaaatttactaagagtttaataatttaaaatattttattgataaatttaaacttaaacaattaaatacgaataaaattaataaaagttaaccgccataaactctaagataaaacagtgcatttgatttgtttttccttttattaagaagaactttcacacataattttgttttattaaaaagaaaatcttactcttttgtcgtttaccgaagtcccctagttgacagtaaagcctccacactcaacattttgacacgtcaatgacccagctggcagcataccattaccaacccttgtctaaatgtctaaacaatttaggctttatagtatactattacaattacaatagagagagaaaagagatatatattcctcaatcccctccgaaataaattgaaaaatagtaaaattaaaaaataaagacagtggtggactgctataccagctaagcattcattattattttatctcagccagaataaaaattattaattattaaaataaaaacaaacaaaaatatatgatttctattagctctcccttttatccctatttgcagatccaaatgaagaaacctaaactagataaatttacttccaaaaataaaaataaaaaataattatagtaagctcatcaacaatttatttaaatttattcagcaaaaaaaaaagaagaagaaaacaatttatttaaatttgaactgaaaccttactatggagttcttctctaatgaaaccctaccctaccatgtatagtttatttagtattataactttaaaagaaaaaaaattcagctttttttttttttggtcgttctgggtcccaaccttctttcccattttgtaccttgaatttgaagccaaaccatttcgtttctctcattctctgtgactctactctgtttgggaatccctagaagaagaattaaggaggggggaaatggcgacaagaggtagtagatcagagaaggtgaagaggatttttcagcaatttgatacgaaccatgatggagggcttaatagggaagagatggctgcgcttgttgttgctgtaaaccctagggtcaaattcagcgatgagcagatcaatgccattcttgacgaggtgtttcggacctatggtgagtttattgatggagagacgggcctcacttatgagggactcttgcgaacatacgacgatggtgctggtgatgttgaccgtgacttcgacgcgcttgggcttgagctcaattttgacgagtccaaaggggtttcgattgcgtctgaggcctcgtcctcttcgataattgacgaacgggttgtggagtcgcagaagaagcagaggacggcggcctgggcggtgtcgccgaatcacggcatcgtgttcgacgatacgtggaagattgtggacgatttggagattttgataaagagattgaaggccaagcaggccaaggatgggaaattgaaagcggacaacttcgacgcgtattctgatgcgggctggtccagggaattgggaccttctgctgagattgcggagaagagagtgttttgggaagagtctgggcatgactatgctgtctttgttaaggacttgggtgttttgaggaccagagctgatggagccaggtcgagggaagaagcttttgatgggcacatggcgattgggagggtcttgtatgagcatcagttgttcaaggaggctctagtgagcttcaagagggcttgtgagttgcaaccaatcgatgttaggccacattttagagctgggaattgcttgtatgttctgtgcaagtataaggaggcaaaagaggagttcttgttggcactcgaggctgctgagacaggtggaaaccagtgggcatatttgcttcctcagatttacgttaatcttgggattgcgcttgaaggtgaaggtatggttttaagtgcttgtgagtattatagggaagctgcaattctttgtccaacacattttagagcattgaaactcttgggtagtgctctttttggggttggagagtatagggcggccgtgaaggccttggaagaggcaatatttatgaaaccagactatgccgatgcgcattgtgatttggcttctgctttgcatgccatcaatgaggatgagagggcaattgaggtgtttcagaaggccattgatttaaagcccggtcatgtggatgccttgtacaatttgggtgggctgtacatggatatgggtaggtttccgagagcttccgagatgtatactagggttttagctgtatggccaaaccattggcgggcacagctcaacaaggctgtgtccttgttgggagctggggaaactgaggaggctagaaaggctttgaaggatgcattaaaaatgacaaacagggttgaattgcatgatgcaatatctcatttgaagcagctgcagaagaagaagatgaagccaaacggggcagcaaatggagaaggggattttgtcattgtggaaccctcaaaatttaagactgttggggagaggacgaccttgaggcaggagttatccactgcccttgagattagagcttttcaaaagatcaccagattgagtcgctgtgatgtggagctcctgaagaaggaaatgagtgataaagatgtgccattgtcctattctggtggtggtgttcctgagagatccatacgcaagcccaacttggaagaaatacttcgcagattattgaattttctaaagcctgagacctttcagggggctgttaaagccataaacgaaagattactatcttgcttggatgatacgggcacaggcagggtggatttaggcatgttctatgctgttttagctcccatttgcagcggccctccagaaaagcgtaaacgaattgctttcgatgcgcttttgtggcgtcctgtgaatgaaggtggttctcagctaagaaaagtagatgctactagatacatcaaattgctaaggtctatctatcttccttcttatggatcaagtgaaattatggaattccacggagaaacagatgcttcaatggtgtctttctcagagttcctttccatgtttgacgatgcagattggggttttggtataatgtcaacattgttgaagcttgaagctggggacagaaaccgccatggtaaccatatctgctctgtttgccgctatccgattattggttctcgtttcaaagagatgaaggctcattttagcttatgtaatcaatgctacagtgaggggaaggtgccttctgcttctaagcaagaagagtacaaattcaaagaatacggaagtgagaccgaagtaatgaaagataaatgcatgtgttttactctgcattccaataacgactcataggtagaccactcttatatattttttcaaagtttttctcttcaatcttgttgatttgtgtatgttattgtagttgttcagtgtgaattaattacacatttcttgaatgccccttgtataataaattgttttaagaagcgattccaatatcatttgggggacatcgcttgttttttttttccttaactctctgaaacacatgtttgtatagtgtgcctcattatgtactttgtgtacaatatttgttttcttcttcaagattgttcgagggttctacttgatagatcatcatattctagtttaacatttgttctcaaaaaaaacaaaaattcaaatctgttttagacattgaaaattatttaaaaaatttatagaaatgatgttgtaatataagaatcatcgctatggattctctttttctttttaaataagaaattgtaattaatactcttctataatatataatattattggaagattttggttagagcttaataacataatagcgttcactctaatgtaagtgcaaagactcgaatctaaatttaagcaatgtataaagaatccctacattttggcttaaaatttaaaaatgttattaattttatgcatatttgtgtcgttgtgttttctctatttataggctcgaaggtgaacgatataaaattatacatgagtcaaatataatgtttaggaaacctttaaatgctttagttttcactgttagtcacaactgaagttgttttgatgtcatcgttctttatgcgttatttactcgtaactcgcaagtgtgactaaattacgtcattttttagttttttttt

SEQ ID NO: 184031 - DNA, 8884 bp, Cannabis indica
tctctctctctctctctcctttgtcctcttgcttcttctatctttctcttttcccttgttaattctcattcctacgctgtcataactcttttttcttcctattttcagataacagatgcttgctcagcttgttttgagcagcggacagtatttacacagcaagtcttggcaagggccttgagccagatggtatgtgtctatggtctctaatatatttttgtacaagtgccctgttgtaatattttttggctgcaaagtgcttagttattattttattttcaggttgagcagactccactacctcttctctttatgagaacagtaattcagtcaattgatgcttttccttcactggtatcttttttcccctgccaaatataaatctcatctcccattaatttcaagagttgatatacttgttactggaatcctggattgtttttttgatgtcttctgcctgatggtgtcgccacatagtttagtgaatatagttctttctacatatgttttatctttctttatagcatataatgattaaaaactcttcgttcgatacgtatgttagggtatgagattcacttaaatacaagctggttgtacaatgagtgataggcattataccaaatatgaaatctagatactaatctttattgatattaaagtcagaactatagtccaagtttttgagacacttagcgatttcccaaagagtttaactcttccaaaatatacaattaatcagatcccctcaaatgaggctactgagatttaattatactcaaccctctgacctcttctatttgcttccctaggctacatgcaactaacaacaaaacttcttacagttcagctccctaatagccaaacaaaatacttgcataatgacagctaggcatcactaaagtaacaaagtcttattacttatttctatagtatgtggcctaacaatgaaatggtaaacatgagtaaatgatctacaatgatactcatttgtgatttatcccaggttgatttcgttatggagatactatccaaacttgtgagcagacaggtacaaatttcaaattaaatttctcctgtcataacttgtttattatcatgattccgaggcagttatgtgagctattatcaatgtcaacaaacttatcatggtcagtctttcatcttcaggtctggaaattgccaaaactttgggttggcttcttgaaatgtgtatatcagacacagccactattcttttcatgtcttatggcaggtatgagttgttagttatatgatgatcccctgtttgctttgatggatcagtttaaacattttttttcaacaacgtgcttgcttctttcagttaccgccaccacaacttgaaagtgctttaaacaagcatgcaaacctcagaagtccccttgctgctttcgctaagtcagccgaacttgataagttcactgcctaggtacacttttatttacttaattattcttcttaaggctcttaactagtggacatatgcagttaattatttatttgctgaaattgcaaaaatttggactcctggtaattgattcagtaattcatttaaagacacagtgaaccttttttgctcacaacttattgctgggagcttgggatcattttcaacacacttgataaatttatgcaatttttttggcagatcaacacttgcagttctgggtcttgcaaatgaaaggcaaatgcaacaacctcaccgttcatcatcctttaactcttcagatgcaagttcatcagttcgtggagcaacaccatcatgaccgctcataacctttgcaattctggaatttgatctctattgtatatagttgaaacgacgacgacaacgacagtgacatgtgattgaatactcgaaatatggtgattgattagttagctattccttccaatttctagcacataaggaggccttcttatgaatcatcgatcgtcctaaaaggatttgtttcactctcataatactcctgaccagcagcagctgttatcagagtgtatcatagtgctctgtctttgtatttgtaatctagtctctcaaattttgatttactagtttccttttggagagctaagttgatgaagccatcaattacatttggtattattgtaataaattctccacgttcctgttgttgatggctttggtttttattgtcatccaaagctgctgcctttggcaaaacatagtttcttaaaagggatccaatgcaagtgagtggacaaagtttagataaacatagtttttttttagcaataattagatttttatttgtagaaataaataaataaatagaattttttttttttgacgtagtgattagaatcacctatgaatttacgatgcagatattcacaaaccgcacaggaacctcctcgaactaggataacttatcgtctaattgaatggcatgcttgtcaaaccatgaaactggtaaaataagcgagcaacatgagacaaactgtcctcgaaaatttagacaataaaactataatgtgctcaaacagcacaccaaaatggctagagcttcaacttgtaacatcgaaaactacacgctaactcgtaaacatatcaaacgactccaccaaaaatctacaaaataaaagataaagaaaagtgaattacctctaggggtgaaaatcggtcggttatggtcagttttacaattttataaccgaccggtcggttacggtttttattttacgaaaattctaaccgaccatacggtttttggcggtttggcggttttatgcggttttgggcagttttgacagttttttggttaaactatttttttatttcaaaaactgaaaccgaccgccatgtcaaaaaaattgaaaccgaaactgaccgccaaattcggtgatgacgtggaaccgaaaattcagttacggtctggtcggtttgatggtcggtttcgatttttcggtttttatgaacactcctaattacccctaataatgatattaaaaactaataaaaatcttaatagtaaaaagaagacaattctcaaataaattatatttaacaacttatcagcaaagtctctgtaacaggagggcccccacaaaatcgacctacaagataacaataaaactctattatcacacaatttaataaaaaatatgtaatgtgaataaagattgtaaactcaattcatataataatatcaagacttgaaacacttatctgtcaaaactcaaaagttgtttgcggaagccatgaatattgaataggattatggtcttttagtatatcactttaaaatatataggtgtttaatactctaaaatttcttaaaccacaaaatacccccattcaaacacacattctaactctcccgctttctctcggctatccctccctccctccctctccctctctctaactctcaccaaatccacctaaaaaaacccacgaccactacaccatcgttgttcggctgcccatttggatgaaacccactcctctctacccctgacgaaacacaggaggccatcgcgaaacccactccacttttgttgtttgtggttgattataaggaaattgtttggattagattacattttagtgttttggttgattttcattgttttttgtttaagttttagtttttcgctaattatcgacatttatcaactttgtgagcgacgtctttcgacttcgtctaaaatagtgcaagatatggtagttatttgggttttagcaatatttatcgacttattttcaacctttgtcgacattatttggctaggctaggaagctgttataattagcgacactggtcgacgtaattcacgacatctcgcgatattagctaagttattgaaagttaagacacttagcgacatgaagcgatatgttgtcgacatagtttgcaactttgatgtcttttgattgcatcccaaggccttgctgtagttagcgacatgtggcgacatgtttgtcgacatgtcgcggcatattaattggggattatttctaacagaaaatgtgtatgatttagcgattactatcaatttgtggtgatttggttcgcgatatttggcgatttattttgcaattttttacaacactgttttatgtgttttaatagtttatctttttttttttgtgcagatggttcctgaacttaagtttctgattttcgagcatttcattgttgtctttcctaatgtcgtaaatttcatcacaacatgtcgctacttatcgttaaaagtcatccttaacatccagtgcactctaatgtcgctagatatcaataacgacatcgcaaaaaatcgctgaaattcaaagaaaaccagaaaaatgcacaaactgaggagttcgagtttcaagaacaaaacaaccaaaataaaagaatgatatatgtagatttattcatatcaacttaaatgcaactaaatacaacaataattactaaataaattacatgcccatttctttttttaagaattatattggtaaggaagtttggattgctcctacacacttggttgtcaagctaagttggtggactgtaacaaacaatgtgtatatgtgtatgtgactttgtagagagagagagacgagaaggagagaggaaagagagggtaagatttagttttattatttgagggatatatttggtactaaaaaaaagagtagcatattctgtttgatatttaatagggtggtatataattaagcatttatattgagcaccggtggtgcctagcactttttaaacgtgtcgccttgcgattagctagtgatacttcttaaaagttattacattaaattatatgagattcgatacttaattagaccaatagcgacattgacatgtaagatagtaccagtgccatttaacatttttctatataatttagaccatgcacatgcaacacattttaagcatgaattgtcaaatttctctcctttttaaccactaaccgggcttgaattggtaataataatagttgcgggtataatttctaaataacaaaaaaaaaaaaaaatgattgcgtgattcaaacacgccaaattgattacaggtcatgactttgcggtgactttgcagaggcgccccaatctctctactgtgtttttcttttgaaagccatagcaaaacccagcatcaatcctcctctcactcactcactcactcactcactcccgcattattatcacccctgtttgtttcccgtgaagaatcagcccagaaaggtagaatcattcttctgttgctttctcggggggaatttctccttccaaatcgacgaattttgctttgaaatgtaacttcattgatagatattacaactcagtccaagttacaatttgatctcctgctgaaactccaattagaattcaaccagagaagtgttcgttactgtattatattttatatggttcttctctggctcagatctcgagcttatttcatctcacagattttttcctgcgaaaccttaactttcttctaaccccaatgcacggctacagccgccttggtaccgcaaggtccagcaactcaccgccttcttcgcctcggtttcgccatggacggagtaagagtagcagcggaagaggatcgaagcagagtattgtacagaaggtcatctttatatttatatctgcagtgtttaggagaagaggcgtgctattgttggcgccgctactttacatttcgggaatgttgttgtatatgggctccgtgagcttcgatgtcgttagcttgaaaaatggtgtcgttgtagttcacaagcgtcctccaccgggttccgtgtacaggagccctcaggtctttcagaagctttggccttttatgaattatgaaagcaatggaaccgaaaatgcggtattttttctggctttattttgggtgaaaagtttgatttctgatttatatttgcaagtggttgtgtgctttagtgcttgaatttaattcaaatgttcctcatctagattggcatctttgctataatggtcattgattgtgattttattgcagtgaattttatgattttgtcttccagtctaatatagctcatttttaaactcttctaggaataaatgatatattacttccagttgtctcattacgtttgaaggatcagagagttaccatttttccacttaattaattaaattctcacctattacacggcctttcataattggcatgcttctgatttgtagatgaagttttcatcagcttctgaatggttagcattttgagaggatttgcaaaattgtgttcatattcattttaagtattctttgactacgatgaaattatacagcaaataaaaagccaatttgataaacttataagttgtgaacgaacaacatgcagttgctatcggtgtggaattctaaagtgcatcaagtttggaagccttgtgttgacaaggatatctcaaaagcaggtttgagatttgtatatgagaatcatactatcttgtattgcgtatgtctttttcgtagtaatatgcccttgccttttctctttttcagtgagagttcaactttctttcgtttatcttttttcttaatttagggacatgacaatgaatgcaacttatcttgtcataattataatcctttgaggaaataagacaattgttgcatttccgttgttaaatacacttagtttacttcttgcatttcttggttattcagaattgccaaggtcgaatgggtatttcataattgaagcaaatggtggattaaaccagcaacgtctgtcggtatgttctgaacaattatagatccatattgcagtttgaatgcatctactcccagcatctccgctaaaacattacaattttgttttgagaaaagaagatagcaaggccatttgatctctaaatgaagccaaaagacaaaaaagtattggaaaaaaaaaagaatctaatctaacctaacttaattaagataactaaaccaagacttgtttttcaagaaatttgacagtatatgatggacaatgattacggatatttgtttgaagttttaaatatatacaagtaattatgttaatgttaccaattctcttatagtttctttttcctttctctacttccaatgttttgtgattatttcactatttcacatgcagatttgtgatgctgttgctgtggctggattagtgaatgcaactcttgtaattccaatttttcatttgaatagtgtttggcgagactcgaggtgattattgcataaatatgacaccagattaccgcatcttagcttttgaagcatgatattgttcaccatgtaatatagaggttttgtgtgttagttgtgctcatgtttcccatattttatctttaaacataataacgaatcaataaaataatacttacatattcaatttttaatgcagaatatgtaatttgttctgcaattttttttaaaaataaaattacgagcattaatttttattgttaacttgcagcaactttaaggatatatttgatgaagaatttttcatcaatactctccgaaatcaagtgaatgtcgtcagagagctcccagacgatgtacttcagcgtttcgacaataatataagcaaaattgtgaatcttagagtgaaagcttggtcaagtccaacttactatcttcataaggtccttccaaagttggtggaattggggtatgcctattcacctttaaatttagatttggcttgaaccttggtgggcccttccttttaggagatcatgggcattgacaaggtcatgatttacgataaactttggtgtttaatttctttagttattgaaaccatgtccatggtggtttttgcaagggttttgatatctttaagaaatttatcctttctagagtggaaaagattatttgcattggtccaatctattggttttcaaaaatggctttagttttgtcaaggtcggtattaataattgtggtgttttaatcacctcgaagaacaatcaagaacagaactaacaattagtacaataatatgaactaactaatcaagagaataaaaaaacataaatgcaaaacaaaaatcaaatcacaccaatttaattaacgaggttcgatcaatcgcttggcagtggcaactgtctactctccggatggaacaacctttggctttaatctttattgattcacacttggtgttacaatggtgataatcactaacagctatgaactcacaagaggatcgagttctgtagttttatttctgtacagagagaatttagaagagggggaagaagaagttcaaaaaaggttatctccgaatgtagaagaggtttgtatttaaaggcaatgtccaagagtgttggagagacagtattgtctccaactaacttaattgccgagattgaagctttaagaaatttactagttgtaactgaatactagctagacttaactttaataaacatcacaaatccaccttagttgaagttagtgaaaccagtaatgaatagtctgttccaagagcccctaagggcattagctgctggtgtcaatacttagcagctttaggcaatgcctaagcttgctaataggaatctctttagtgaacatgtcagatggattatccttagtgtttactttgcttacttgcacttcattttgccaatgatgtctcgaatgaaatgcatattgatgttaatgtattttgacctctcatgaaacatgggatttttcatcaaatttaggacactttgattatcacagtacactgtgatactttctaagttgaagccaagtttcttagttaagcctttcacccatatggcttctttaattgctttagtggctgctatatactctgcttcagtggaagacagagctactactttttgcaggcttgatttccaacttatgcatcca

SEQ ID NO: 184032 - DNA, 1225 bp, Cannabis indica
ggaatgtcaacttaggcaatagatgttaacctgggcactggaacatgaactaccttcagtaaaacagttataactatcatttcaatttttatataattgatgtgattcaatttggattttgaagctatttaagcgcttcatcaagtcatgttgtaattttgtaagctaccgtcatcaaaatttactcttaaagagttattaatataagcttaagtaacctgtaattggattcgctgagcaccaaaaaatagctatcctcacgagaagctattctcactgttagatcatcatcaacgatggagaaagacttatttttaattttttttcatatttttgtgagcctcattcacctataaaagagctcatcttcacatcagaaaactatatatatatatataatatatatttgtatttatataggtaagaaatgaagaataatgaagcgagaatatagcgttgtgttttaacttttcacgcgatcgtattataaatcactaaaagtgatataatgtcatctcattcatggacgcattagactcatgagtagctacactaataaaaatgtgacagctttggctccagatctaaattatctaacaaatcaaatatctatcttatatagcaaacaaaaacaaattagtcagcaacattatgtaaatatatttttatatatataattagtaatttgatcagatcgaagttgaaagtaatgtgatttagttggccatcaaatctcatttgacatatgtatatgcatgtcactaaacgccatagaaaatagaagctaaactttcaaatatcaatgtcgatccacagatatatatatatatatatatatatataaacatcgtgattatatcgaataatattatacgtgaaaattattaacgacaaataagccatttgacgtgaattttatataagctattgtactagcaaattagataaatccaatattagctaggcaagtaaatacatatatatatagagttggataatatttagaggctattttttctcagggtaaaaactgatcaaagctaggaaagaagttggtatatgtatatgtataaatataatttggcgtattgtataagtttgcatggaaagaagttggtatatgtggttatcataattataaggggaggaatctgataccagcaaaccaagcttttaagattgtggagtccatggtagtgatgaatataactaaagagtcaaatat

SEQ ID NO: 184033 - DNA, 5350 bp, Cannabis indica
ttttttttttttttttaaacctttccacacaacaaataaaattttgacatgccatcataacccatatgccatatgtaaaaaaaaaccttagaaagtagtacccacgccaaattccaaggccaagtcatgactcacgagcctaaacattcagctgaaaaatattcatttacacataaaaaaaatgacatatatactcacgagccacaaatttccgctgcctttaggtaaccagacatcatactcatcatgtcagccttatgtttggctcaactggccaattaataatatacctatgcttcccattaatattaaatagactatatcgattctcttctcaaaatataatggagcaaaaagtgaaaaaagaaaagaagaaaaacgataataagtcaaaaacttatttataagcttgttgaagcactctgttctgggttttaaataacagcacagctcaaaaccacattctatattaatgcctttactgtttttgtttatgtgtatatgaatgtaataatctaataaattataagctgattaaatcataagtttgggattagaaaataatcacctgacaacataagtactcttaatctcagagcaaccattgataaagaagaagaagaagaagaacagtactaaacccgccatggctgacgaccaaagtagccaacgccattgttttctcaactgttggttctccatattttcttatttttataaatataaacctgaacaagcgaaacacataaaaaggaaagggttgagctttatggaactagaaacgataatgacaacatttttggcggcaaaagggaacaagtagaaatgtctcgatcgagagagagagagaacattcttgtttatttgttttcaatgtatgagaattttgaaagaagagaacaatgggtttggtttattaatatataattattacctttggttcaaggaaaactaagagagtagttgtgtagttaatcggaaaagcaaaggagaagaaaggtagatagttacacaaagcacaatttatagcaatgttatatgggtttctcttaatgtaaaagtatgcttttcttctctctctctattgtccttttaagttttgaggtggtttttatacttaaggttctattttcgaaaccttcacagctttaaaaaccgtaccaaaagatttgtaatggaaagtgaatgaggtttactaaggctttaaatagtgatccaataacttcaatatttttttattatttttatttattaggtatacatttgactttataatatactcttgatatgtttattattaaaattttggtctttttgtggtaatattaacatgttctttacgaaaaatttaattaaaatgaagaaatcatattaggactctttgtctttggtcaccaattagtctaagagaagaaaattccatttctatgatgatatgtatgaatttgaccaattatagctaccacacgttatacgttatagtataattaagacatatgtgtatgtgtatattaatttaggacaacataacttgaccatatacaacagaaggaatataataatgaaattaaagcatggtacagggaagaataaggttaactaattgtgccaactttttgacaagtgcaaaacatgttaacagaaacattgaattttttgtattttattacttttttatttaacatttgttctatctttgggggcttgttgtgtagatacaccagaattgggcgaaggatgtagtaatattttataatttatatacatatatattattatttattacatgctgtatatatctctaatatttgtgggcgtcaattggttgaacatctagatatttgcatgaaaattatatggcgtgcagggttattttgtaagcttaattttcgtaaacaaaatgttatactgccatttaaacattaacatgcatatatgcatatagaggttgtatgattatatgagtaataatttatatgcatttaacttattgacatgcattaatatgtataagactatttttttagctaaaaatctaaaattggtaatcatttttattttttgttactccaatattatttctacttttaaatagtatttgattattttaataatattttataatttaaatttatcaaatataaattaattttataaaacaacaaaaaattaataatatttttaattaaaatgctattaaaaatatttagcaaaaaaatagagaattaattccgtatatatatttagaaaactccatatccattctctattaatggagcattaattttttttcaagtctcactccttattttaactaaggagtatgtttaaaaaacatgattatggatgctctaactaaattaattatatgtaattttatatttttgtttttattaaaattattatagttatatatataaatttgtaaagtggtaggtacattaatttatatattctagtcgattcggattctggattttggtaaaatgaaagtcaaagagttggttaattaacgagaaaaaaatgaaatgacagaagttcaaagagttgttttgtaaatcgcatgagatcaagttgaattggctaattaaacttcatgtgtcttatattatagttgtcagtattggaaaaacgtccaataactcttgggaaaaatggtggctttataatgagttaattaacacgttcattttaaactaattagtctgcaaatattcattaattgatgtttaagaaacttcttaatatttttactttggttgagagaaagtacgtacgtagcttcttcgcaacgacaaagtagtacttgatcacaatataacgttcaaagttagaattctcatcttcttttttcttttctttttcagcaaaaagattcaaatgtactgtataccgccttgtcttcttttcatcatttattcgtttttttttattcgtttttttttaaaaaaatatatattatatatgtatatcattgttcttatatataaactgtacacatagatatagatatatcgttactcataaaatacgtttatgtagtcaaacacgacaattattgtacaaataattaatatgatagactaagaattatatatgactctatttctgtaaattatgactaattttggtggtgtgatcgtcctaaggagggaatggaaattaatttaacagatgtatttatgagattgggttattttctatagtcgatgaaaaccgtactaatgatgtcttcgtaaaaaattttattagagcactcaccaacaattatagtactaactaaaagttaaaaaattaaagaatcatccactaaacattgatgaaaagtgagctaaaaatggctaaaaaacctagctaaataacactatttcattcatattatttatttttcaaacttattttattactatttatattctatttatattctattttcttcatttctctatctttctctcttatatttttcattcaaataaataaataaataataattaaattatataaagtgaaaatatataaatattgatgtatggtataataatttgaaataaaatagggcaaataagatttcgggaagtatcttaaaaaaaataaagtaaaaggagctgatgagatttttttctaatttaaatttttagaaggacaaattaaaatatatatacgcaatagagttagattgaatactatgaacaaattattatatataaataaaaacaggattgtgtaccttcaatatacttattgatatggacaacattgatctaagatctgcaaagtaaagtgaacaagattagtctcataattagatcattcaaactctcactaatttttttggatgacgttataacttataatgaaggtgtataaactttggagcaaaacttaaattatgtcagctagattatttctcaccatattgtgtgttaattattttaagaaacttttttattactttaaaataattttttttatatatatttttacaaaattttacataaactcctattgcaactagcgctgcaacttaaattgcaataaaaaatcatataacaacccacattatataataatatacatcataaaattaaaaaaacatagtatataagataatttctcttattttaaatatatactaacttttaataaaatcaattaaaattatagttttggataatacaattatactcacattatataatattaatatacatcataaaatacggcgtcaatattttacatctctgaaaatttatatgtaccttttatttgcatttcaacagttcggtttaaatccatcgattatcatagattcatatactatattctatgcagtcttcccacccatatatagaagttgaaagtaggtataacctaactcttagaatattataggtacactatacatacatatatataggatttttctttgttaagggcatggtttttgccctcacccatgggagcatttttattgtgaatcgatgggttgtagagttaaagtgcgtgggcctataatatagtgaagtagcatggtcgtactttttattgttataataaggtggcatatatgcacaagatatctagtaacattatttatgaggtagtctcgtgtaattactaattggttaaacattttttatataatctttaacgaagtaaaataagagatggcatattaaattatacaaataatattattacacctgatgagaattattagtcaacacgggtgtcctttcctatttctctttttctatataccaaaaacataaaagatatctctacaaagtataactcttactaaaaagaattatttctatatatttatacaacaaaaattaaccggcctcaaaaacccatttgtgaagttgtgatatttaatccaccaaatgggaaaacaaccacgaaaatggtacatacataaccctgcatgtgacttcaaatatatcattagaccatgggtaccacattttcacttttagagcctcccgtgacgttttcttttctcttacttttacttgatcttcaactacacttttcgtttataccatatattttcgaattctttaaaaaaaaaaaaaaaaaaaaaaaactggttcttgtatttttggtattagtagtggtgtaattagtgtttcagttcccaacaattaattggtagtagttttcatagaaaaaggaccacaagtgtacaaaatgggggtgagtgtgtgctttttattttggcagtataataattgtaaggacagggacaagatagtgtggggctgtgggctatctctatactcctattgccaacacacatatactatatacattaataattaatttacttaattttaataat

SEQ ID NO: 184034 - DNA, 1433 bp, Cannabis indica
ttttttttttttcaatttcagcaattacaatcttgctttttacgcagttcatttctacgagaagtctagagttgataatggcaatagaggactaaatgaagttggtcttttatgattagtgcagattcgaatgtatgatattcgagacactaaaaataaataaagaaatacaaccagatgcaaacacacccataaaaaagatgcagtaactcaactggtttgggggacgctgatgatcaagctcattgtaagggtcaattactagaccacgcaccccatgtctcagaacagctgctttcgcaagatccagaacccacttaatatttggaagggaatcgtcctcacacctaattcgcatatgaaagaaaaggcgaatcattacaggcttttcataaattttcaattaagataacattgcagaatcaactcattcttaaaacattgacctgcatccattctaacgttatgacctccaaacttactttatataatagtgtgctaccataacatctaaattttagcgtaggttcaagaaacataaacaattaatacaatccagaaaaagtgaacgtaacagaatagtgggcaccaagtatgggttttacagcataactaacatgaacaatacattaacttattaccgattaccgtacggtttgcagctgaaacaggtgaattgaagcttcacactcaccttatgagatagaatgtgtccttaagccattcctttccttgctcaaactcttcagcatccattctttcagcactgtcaccgtatctttgtccagaaaagagatcgaaacaaatttaatttcactaacgggcagaatttaaaagaaaaattataaaatccgatcagtaatttaagagccaaataattaaaagtaacaaaatctgcaacggtcaatcatatcaatccttatagcacaattacccagaccaattcctgattagatatcaatattaccaataaactagattcagttggttggtagtaattttcatcaatatcagtatcaggatcaagatcaggtcctggtctaggtctaccaataaagattgatatattacattacaacctatgcaacaatacctaccaataattttaatctcacttttctctgatttttatttgtcttttgtttctgctctactctatctatctcaagtttcttcgtccattgtaatccctctgtgctaggaagaccattgtgttcctctttcattttccttgttatccttttaatatatcaactagttaaggtttgttttctgtttctacatttctattttctttttttttttattcttttcattattattcatatccctagtatcttgctccgtgaatgagaatttgctagaatcaaggtacagaatacagatttcggcaccttcattgataaagacaagagagacgggacaatattcaa

SEQ ID NO: 184035 - DNA, 645 bp, Cannabis indica
atcttcttctcaagttattgttctcaatcctaaaaattgataatgagaagaagttgggtattggctctatttcgggggatgagaattatcttggtaatcccttttcttttactaggaaaaggaaaaaaaaagactttgattttttgaaatctaaactctaccatcgtctagaggggtggagaatgaagactctatctattaggaagaatggtgactatctaatggacaagatactgatttatggtggcaaccttaaaatccttggttgaatattatggggagttcagagagactatggaatccattcgatataaagctccttctttgagaagtgcggctgatcttatgtatagaaggtcgagatcttggaaccatgtatggtctccttcattaagacagagagttagttatgagttagttattgttgtaactaacttctgtcatttctgtttttcagttagattgggttgttagttgttagtccttcattactttgttagtgcttagctctcttgtatataaactctatggttcagtaataaacattgagattctttcttctccattacacctttccttcctttcttctctttctttctctttcgtttagcttttatgttcatcaatggcgaatcggtttaacat

SEQ ID NO: 184036 - DNA, 4732 bp, Cannabis indica
ttttatagaatatattttttgaagatattttcacttttctaattacaaaacagaaaaatgattaaaaaagtgttaccaaatgcaccgtaaataactaaaagattgagaaattgctattttgtacatccaataaaattttagttaaattaattaaatgtcaataaattgagtaatttaaagagtaatttgcggtataaatatctaagtttaactctcagttgttgataaatatttaaatttaattttttatggtaataatacctaagtccttatttacgtgttatttttttattagtatatttaaattaatttttaaataaaaaaaaaacaaaaattcaatgacttaaaccattcaggattcaccacgtgatcattaacttgacacttaacgtttaagtacttacgaaagtttcgaaaatataattaaatttaagtatttataccgcaaattactctaatataaattagagctagatagaatataaaatcaatgtatatatggaatgtacaaaataaagaaaggagaatgggagaaataacttcaaaataaaaaaaaaaaacaaattcaccagtacaaaaagaacagaaacaatataaggaggctaacaagagtccaccaaaatgctgacaagagaatcttcaaaaatggaaaatgagtagaataatcatatttctgaactccttcgcaatggcaaaccatggacattgacccaaaaaagaataaacttaatgtcagcaggatttagctgaaccgaatgagggggctcagtgaagacaacatgtctttgtaagaagtaccaaggttgcccttccaaaatcctaagttcttctgctacagagccatacgttagcattagaagggccacccgcataactatctatagcaagaccatttcttattttgcacaggctgatctagtattagagagagttagataaattgtgatatataagatgaatgagctactcttctcattgctaattggttttgagatgaaactccattcattttatctcaaattctaacatctagtagatgatgaagaagaaaactgcaattgaggaacactttcctagtcagccgcaatttcaaggaaggatcttgtgctataaacatttcgtcttcaacagccaaaagagaaccagtaaaatcaacatagtcacaaagacaagattgtatttgtagtagagaaacaagaacgataagtagtttttgaacaagagaagagaaggaaaggtgacaaaaattaacattaaacaaatattattacagcaaacacgtggaatattaaaaaaaaatatcacaaaaagatatcatttatctactaatataattttcaaaacaagcaatcaaagattattaattatttgttaaaaagaaataaatattgctatgttgtctccagtaatttacaaataagaaatggaacttcaatcaatttatttttggtattctgaactttcaagaggtggtgcccgctgtgatcaccaatttatttgctcccttttagttttcttttgataaagacaaaaaacgaagtggagcttctttcaaacaggacactacacaagcttgtctgtactctcattaccaaggaatttcttgaccatcccaagcaaaaaacttcccgttgtcgccgctctttacatttttaattatatgcaggagtttctgtgctgagaattctttagtgaatagcttgtctttggcaacattcctctgaaatggcctagagagatctgtgtcgactgtgcccggatgtagtaaaatgcatgcaataggatccttctttcgggctagctcaacagatatggtttttgtcactgcaagaatcaatggaattatgaagctgaaacacaacttctaaatctaaggctaatttttgttggtttcttttgatatcaagacccttatcgatttattgcaagatcttatagttaattcacaaggcatagaaaagttgtgggtaaacttgcactgatttaatgcggtcttcgaagcacgatacgagtgccaacccccaaggtgattatccccaatggatcccacccttgcacttaaattggcaataactgcaacatctctttctgtcccagagccacctccaatctttagaagcggccacatatgctgtttccacaaatgacaaacaatattcatttctcaacaaaaatgcaatcatgctactacaagcaatcaaataagaaaaaagtagactatataaccttattcctatttgaaacaaaagcacaagaactagtgtcaaaacttttgtttcttagagacagataataaagggaattgtttcttggaggattataacaaactgctgtcaaatatgaaaagatatgccacttttttttatgcttgtcttgactctaaaattgcagtttctataaatatgaatatgtggtgttgcatgtagattacttgccatattttgttcaagaaacatgttaaaccaccaaatacaatggaaacattcacatttatttagttttagcactcaaaaagaaaccctatataagtcgggtcaatgggaaataaaatatacatgcataggatgaaacagtactagtttatgaggaaaatcaaatattcaaggataaaattagagtacagaataccttaatcactaaaataggaccgatagcattaacctcataagcaaacatcaaagacgacttttgtaccttgctcagtgttgtttctgtattggaatttaaagacaagaaaaatggcattcttagaaactagaaatgcgaaaaagttttgccaatcataatttaagctcctagttgtaatgttgtcaaatttgtacctggttgtagaacatcgggtattgacaaaatcccagatgcgtttatcagaagatttaagcagccatatttttcactaatagattttgcggattcctgaatgtttgaagagtagtgcaacataagaagataatccttcttgttaatctttcagaagcatgaaaccaaaacagagaattaatcatgtctacaccagggaggattgaggacatgagaaccactaatatatgatatccgttcatataaacatcactagaaacaagcaaggacttctttgaaacaactcctagataagccaatacaagagtaaaagattacaactcaagtattgataccagtgcaaccaaaggcgtgtcactttcagtaataagtaagataatgcagaattataggaagagtgaaatagcctcaataatgcttttttaggcaattccaacaagaagaggcaaaacaaaactaaagaacttggaaacattgatatctcaagagccactaagttttgaaattttgaagttataagcaagatcatatacacttaaaggaaaatgagtgaaataacctcaatggtgctttcatcagtcacatccagcggcaaaatactaaggcgttctgcaaacttgttttgtagatcataaagcccttttgccccactaggattacgacaagtggcaacaacatggcctttatcatccttctcaagcagctgtttaacctaaacatgagatgggacataaagcataaacaatctgttgaacaacctaaaacgacaattaaggtagaacattcaaaattgagcacaagtataaaggtcatcatcaaatataaaccaaaagccagataaattactgcaaaatatgtaactagagacaaagcccagaggctataatgtcaatgagttgcacaaaacataaatacaaatcagtttaaccaaaacccatttgagaaaggattattctgcacgaatgttggttattagtgaaacgatataaaattcttgagatatgaataaaaatcaaagagaaatgttaaatcattatacaaaataaaagaaagaaagtgattatacaaattcaaggccgattcctctggaagcaccctgtaccatagaaaccccaccttcccgcttagcaagagaagaagaaaatgaagctgtacgggtaactgatcgcatcacccgcgtcagaggatgatgggtcgccatgaatctttcctggtgcaccaaaaacttcatcacatcctattcgagcaataatatatgcagaaagagaaaaaagaagtgtgcacaaattttaatttgaagtgcgattaaatatttcctagtaaatgtgtaattttttttgcgattacagctatttgaaatagtgtcaaaataatttttttttttaagtttactaaaaaaaaaatattgaaggtttccatttgatagttgtcaaaatttaatgtaaattttttaatttacaaagacatattagcattttaaataataataagacaaaatttaataaaaagactaaatttctttaattaagaattcttaacaaactatatattttagagacaaattagtattgtcgaaagttcaaagaccaaaattactaattatttttattacaaacttagttattaggcaggccaatttggtattatgggacctacatattatttatttctccattagcaatgaatgaaacttcatcagcaatttaattaagcacccaataatgtataacaaattatgtataaggaatttaaaatttcatatacaatttttatattaattattttgtttaattggtgggaaagaagttagaagttagaggatcatttatttatttattttgatattaatattttattatctatttttttttttgcctatctagttttcttttagaaattattacatagaaaa

SEQ ID NO: 184037 - DNA, 1546 bp, Cannabis indica
gccactcaattaacaattctacctagaaaaggtttggtcttttcttgaaagaatatgtcattcacaagttttggagtttgttcttttttacaatttatttggtgttagaaagaactacattgagaatgtgaaatttattaccaaagcattgctataaggtatgaatggttagagcttttttataatcattattaaagtaaagtaaataggacccgatattaaattgtactactaataacaatatgacaccagataagagtgctattattttcattgcctattgattttgagtttgatcctgtacatcttacaatacacctcatcctatcctactttcacattcttaacattcattaatgttctttatcactatgaagccttactttaccataagcgaaaaattgtttgattgctttaatatgaaacaatttgttaagagtatgttgcaatagttatgtacttctttctgagttgttatgtgcttgcagaatctcagaagggatgcgaaaaggtcaactgaaaagccgaagggtccccgagctattgttctatgcatcacacaagagcatgctgaggaggtttagtttgttttttcattatttctattttaaaatggtgcaaaaagaatcctatagcttgttacacggattcacttagcattgaccttgcagtgctttcaagcagcaaagttcatactcgagcatttgaagtcgaaaaatgcaatggaaaatgattcaattggcttgttcgttaccactcctgatgaggtacttcagtttattgaagagggtaatgtggcacttgatgaaatcaaatacttggttagtatcctttccctacttcacttttcctaccattgaaagtagatttattttcttactatttttaatgatgacataaatttcgaataggtattcgacgaggtggatgacatgtttgataacggtttaggtcctgacattagaaaaatcttgagtccactaaaagagcttgtgtcaaattctgttcacctaggcttacaaactattttgaccacttcaatgatgatgaaggtatgacatgatgtggatgttgtcttggtagaaactgaagatctttgtctttacttacacttgactaagtgttctatttgcttaaactttttaggttctgcataaagatctatcttcccttgtggagaatcttgaaaaaagtcatgctgggcaagttgctgcggtgttgcttgaaatagaccaaacagaagcattctgtcttctcgagtcgccagaagctctgaagaaaaaagtggtagaactaattcactctcttaattaaagaaaattgacatatatatgatctcattactaacttaggagctagccattttgtaggttttgagagttgtcaagttgttcattgatttctctgagtaatatatattgaacatggactcaatgaaattggaaccttcatttgaattctattgtgtcaaaaattgaaggaattagtgactgattttctgttttacttttcataataaacttaattgtagattataaatgctaat

SEQ ID NO: 184038 - DNA, 4832 bp, Cannabis indica
gtgtttaaatttttaggttttattcggttcggtttttacgttttgttttagaggattttgagtagtttgacgtatttttaacataacgtgacgtaaaagtttacggtactaaagttgatcatttgttttttttttgtgattgctgtgagcggcttgcttgtaagtaaatggcaagaaattccgtggtcttagtggaattggtggaaagtgggtgcaattgaattacctgtgtgtgtattcacgtaatgtgaattgaatacgtcagcgtaatgcggaatgaatgtgaatttagttgaatcagaatccagcgaatctagcaaagagtcggaattgttttaagaatgacttcgatgaaaacatgaagctaaaatttgtttcatgcatttttcatgcctaaaagcatgaatttgttgccgtggtatgatttgggaccgtgagtcatcagagtagtagaatatagtttttcatagcaccaaggtcacaattgaacaaaagatcatttactttttttttttgttccttttgttattttaattttgttcggcaaaattttgttgaagtaatatatctgagcttttgtatatttggtcttaaaattattggtatcttattaatattaatttgtaagcatgtttatgaatagtttgtcaaataaattgacttatctgattattcaacatactaggatagaagagttttgacatttgtggttacgttctttctttaagtgattaagtcaaaaggacagttccttttaccgtcgttaagagtgtgccatagaaaaataaatatagaacatatccaaacaatagaattttctctgtgtcgatgtttgatgcatatatgtgaggagatacttgcataggatatctttttcttatgtttacaattcatttgatgtttctacaacacagcagaagcctccaggaatatgactgataggatttgaagaatatgagcttattttgctgatcttttcaacatcaagaagagttcaagacaacactagggcctagccaagatgaaagtgggaactaactctttcttgcggggaagaccattttctttcattttggcttgcctacttgcgacaactttattactttggttatgtgaaaagaatcctttcagcactactttattgtcgaccccaaatcaattttccatccccgctataggtatgttttcaaattgctaaagcttaaatatgtttttgatgtgtgcctccacaggtatataaattgatattgttttctgctgttctgtattgaaaccatgacaaatgtttaattaattatttagtagatgcacagaaatacttgcagagaaaacttaagtggaaaagtattagctgcacaataatcatctaaagactagtcttatctagatcataattcataactgaagagaagaattttaatgtatggaacttggggccgaacatttcatcgtgttgcacttgcatgagcatggaagtcttgaaacttgtcaaacttaataccaacttgattcttgataaactcgattgttagctggccctgtaagtactaatttggatgtaattgttcttaattgactcacaggtgtcagcttgccaacttttaaaatttctggcgatgattccttgattcatctcattttaactttgcagggcatacagttatatatagcttatatgggtcttttaaatatctacgttaagtgtttatataaaagttggggtgttgcaagacatctatgtttgttggtaaccaatataacgtttttagaattgcaaattgagatgtagcttattttgacaagctaagaacctttaatttttcttttcttttagatcagggacatgtaagtatgtgataataattctttattatgtttctaactgctctattttgtctcttcctaactgtctctagacaaaagaattgtgttggtcatattttttggtgtgcaaagtatgttggtgatctaatgaatatagtttcatgtagggtttgttgaagtaagccctaacacttccttgagtgttacaaaggcaaatgaaaatattgaagaaaaagatatccagatttctatactagaagacataaatgaggacaaagaaaaatcagttgctggaccagtgggttctccacctgaaatttcgtctgaaatgcagaaaagcgaagttactggggaagaagaaaagtcagatgttggaccagttgtttctccacctgaatttatctccgaaatgcaaaaaactgaaggagatgtgccatcgttatcgacaaagaaaggtagagttccactaaagtcatgcaaatataaatagctccactgaactcatgcaaatatacataaaaagagctactgaaatttaccttgtcgtcgaattgaggtgcatgtcattatgagtaccatcacctgttctaaattttatcagttgtatccttgcttaattctttacctgctttccttctgacttagatcaggcttactgtttacaattttggtgaggtgtttcgcagcttagtatgtttcttttcgtatgaggtggctacaaaaaatattgttgaaaagtttagaagtggatgcttgtaaactgtataaattttatgtctaacaatgttgtcattatcaattttgactattattggtttcctgtctattatattattattttgggtcaataatctcccatttatcaggtttacttcatctcatattccataatgtcagtttactatctatcactgagtttgttccctttccagtttgcaacttcgccaaaggtagatgggagaaagataatgagcggccactatattctgggtttgattgtaagcagtggctatcagaaatgtgggcatgtagattgactcaacgaactgatttctcttatgagaaatatcgatggcaaccagaaaattgcgaaacatcgaaatttgagagatcttcattcttgagaaggttgttatctttggtttgagctactttggaaaaactatttgtcggcgttgtcattcatttcaaatacattatcctgctgcttcactagaaagctttcatctgaatatgctggtttattatattgttactcttccattcctgccaaaattgcctaaagtttaatggttgaggcaaaggagatgcatgattctctccattttttcaccaacaaatcaaaatggcatgtgattggaaacagttattgatggcttcactttactccgatttatttatatgtatccatttcgtataaactttggaaattgtttttgaatgatgcaaaactcagtgctttaaatgcaaatgtactaaatgtgcgtgaatgtttcagaatgcaggacaaaacaattgctttcattggagattcattgggccgacagcagttccagtctttaatgtgcatggcctctggtgggttatatagcccggaagttgaaaatgtaggaaagcagtatggtcttgtaaaagctcgtggagccattcgtcctgatggttgggcttatcgatttccaaaaaccaatacgaccattctctattactggtcagcaagtctgtctgatttagttccacttgatgccaaagaccgagcctctgatgtagccatgcatctagaccgtccaccagctttcttaagaaagtaccttcaccgttttcactattagttctgaatactgggcatcattggaacaggggaaagctgaatgcaaaccggtgggtgatgtatgttgatggaaagcctaatgcagacagaaaacgtgcagaaattgggaatgccaagaatttcacagttcatagtattgccaggtgggttgattcccagcttccctctcatcccaacctcaaagctttctttagaactatctcacctaggcatttctctaatggtgattggaacacggggggtagttgtgataatacaagtccattgtctggtggaagtgaagttgttaatgatggatcaaaggatccaatagttgaagatgctgtaaagggtacaaatgtaaagcttttagatatcactgctctctctgaactaagggatgagggtcatatttcccgctacagcattagaggcacaactggcatcaacgattgcttgcattggtgcctacctgggattccagatgcatggaacgaactacttattgcacagatataaggatctgacacatggtagcaggtaaagaagagaaaggagatgttattccttttgtggtataagggaatgcattattttgttttcatgaatctcaaccagctcctcactgatctgatcatagaataggtacagcagcaatcctttttctcccatttttatttgtgaattgatttcttattatgagtttacatttaggtttgtctaatctgtagttaaaaggaggagtttgccgtaagaatgggagagcatgaaggagctgcaggcaatatgttatgtgctgctttcaaattaaaactgacattcacttaactaatttttttctcttgtgcgggcatattactaataattcttttctctccggtgagtgttgtactatattaccagttcagtgtgaactatttggaaattaaaatgaaaatactaattcatcccaacgatcatatcttttaagacttttgaagttgggtaggtagagaacactttcaaaataataataataataataataataataataataataataataaataaataaataaataaagaagttgggtagagaatcaatgaatgcattcagattgcctattttgggtatgtttggtttataagaatgggaattgtagtaatcaatatgtttggtttataatatgtctattattttgtaatccattacattgta

SEQ ID NO: 184039 - DNA, 2910 bp, Cannabis indica
  modified_base (4)..(4): a, c, t, g, unknown or other
  modified_base (7)..(7): a, c, t, g, unknown or other
gtgnggngggggggggctttttagtttgtttagttgtgtgagtggggaaggattatgggcatgcttgtactcagagtttggcatcttggagagacatagatctctcgaataccagtagttgcttttgggtgatttcaataatattcctctattttttcttgccggtttctggtatttttctgctccatagtgactgacttgcaggtggagcacatcatcttggaggcatttcataatgattcacgcttcaaccctctattagaccccttcgtccatgattgtgtgctccctttgcagaatgcctttcattaaaacccaggatttcgacagcctggttctctcccaatatttacaaactaaaccaaattcttcacacccttttccttcactattgagtcctatatatataacaatacccctattacaattacacttatgccctttttatttaatatcccaatgcctatcaaatatatcttaaaaaggttttactgccatgctggtatccactggcatactagatcttcaaacatgtgtatttgttgccaaagctgagtgagagtgttgaatattgtgtgactagcatttcacattgtcacaaataaaaaaagaatacttttatttcaaacaactcagcagtattctctgttaagagacttgttgtatccaagattccttggctgttgagttgtaaaggacgttttctccaacttcaatagtcatggaattgatcagccatgacatagactattaagtttatgccatgtcacggtgtgaggccttgatattagtctcttaaagacaattgattaggattatagaggccgagttgtcaaatccttagttgctgagatgaaatgtctctaagttagctggcctaatagtcctaaggtgttagcttaaaacagtagggctgcgttagtataaatagagggggctgattagttgtaataattgtaagagatttggacttgatttgttacaaagagagtaatggattaccaagctgtctcaaaacgtttggacaattcgtaattcttttgtaatatcaatgaaatacctatattcttattctttccagaactgaattggaacaatagtgtatcagatggaaatatcagaactttgggactgcttgtgggggggaataattgactggtagtaacctcgaattctttgtgttcgtctgggggagatatcttaaaaataagggaatttctgaggattcaaaggcagatctgatggcaaaatgaggaaaatttactcaagacagctaaattacaagataatatatgtagagggaaagataatagctctcagcaaattgaaaagaggcaacaaatccctaatttctctaaaatacagttggaaggaaataattatcttatgcttaaataaatcctgtgtatcatagctagtataggcattcgcacgaggaatcctagctggcaattgcctcagttcggattgttctctgcaactaggtaatatgaagttggtatagcttttttccataattacatcatcttaaaatccaagctaagtcagaaatctctttctttcttttttttttctctttctgttctttcttctttcaaaatgccctttcttaagccaatcgaccctaattacgtgatacattttgtaaatgcattcggttcatattctatagttactatttaaacaagaatgtcgtgtcatccagcggagcgctttgaactttaccttaaagaattggactttcttagccttcttaacccggttcattatgcgcgccactaactagagtgtgcattcttcatttgatcaatgcgactagacaccatttaggttgcagtttcctaattttcctgtagattgactaatactagcaatttagacttatataaaagagaaaataaaatggaattgaactgagtaaatgaaaagttcaaaaaagaaaaaaatgggaagttcccaaaccaatatttatgcatgttacttccaaactcgtgggtgtgtaagttactttaagattgatatctcttctgtctactgaactcattacatggatttaaatatactgttaactgatcacacgtctacttgatatgcagatcagatgaagcagaactttttgccaggtctacccagagagcctatcaacaatttcgtgataaggcagctttttccagatcaatgagtgtatatcaactattcctgtttacattctgtaccaactgtttgatctcattttgttgtatatgaagtcactaatatctttaattatacttcaggaagataaaatggagaaggttgcacaagggagagtttgggctggcaaagatgcagcatcgcgaggcttagtcgatgcaataggaggcctttctcgggctgttgcaatagcaaaacagaaggccaatataccacaagacagaaaggtttgaagattagttttcatcaatgggactatccttactgtttttatcagtatacatgtattttttccttgtatactttcagctccatacagctgattctgttctggttcttcatattctgctgcaatcacactgtttgttatggtgccaggttacacttgtggagctctcaagaccatccccaacgttgccagagattttaagtggcataggaagtacactagttggagttgacacaacagttaaagcattgctgcaggacatgacgttttcagagggagttcaagctcgaatggatggaatcttgtttgagagactggaaggaacgtccagttccaaccccatattcggtttgataaaagattatctcagttccctttgatcttcattagctttctgtttttttttcttcttcaaaatgaatgataacaagctgtcccttgtgtgtctcctattctcgatgattatatctcatttatgtgttctctga

SEQ ID NO: 184040 - DNA, 2771 bp, Cannabis indica
ctctgatccataatcttgctactttctttcttaacctcttatggttaaatctaaaaaatgaagaagaatagaagaaatctcccattccataaccttgctactttctttcttacctcttttggttaaacctaaaaaatgaagagaaaaaaatatttgggacctaatattattttacaatgcaatgtttatacttttctgaaggaattttacatttgcatgcttatccattatattttgttctgcaaggaattccacaactttagtatattactttatttatttaataatattattttaaattttttgttttgtaaaagttaataattaagttatctgttttgataaatgataaaataaattttgtgttttttatttccaataattttatttcattctctacatttttttttatataattaacttgaaaataatttttagcacgaataaatataaaaaatataatcaattttgtcataaaatatttaaatcgagttattatttaattttattttaataaaaaatcaattcagactattatttactatttagtactattttgaaaaatacacagttcacattgttattaaacaaaatagattgtcaaaatttttataaaacacaatctcgaaaataatatttaccaattcttcgaatcaaacgacatgccgtttcgtagcgtgttttactaaatgaatcagtcaaaactaaaattatgagagaacccaaattctcgttgagacgttatgttcgttactctcagaaacttgaccgttggttcccgcctcaacaactctttacactgcttttcccattctctatctttcaaaacctcaaaccaccaatttctccaacatcttctcgagaaatgtaaatccatgagccaactcagacaaattcatgcccaaatcatcctccaccgtctcaccctccaaaatctcaccctaggaaagttaatagctttctgtgccgtcgccgacgccggcgatataaggtatgcccagcttgttttcgaccaagttattgaacccaataagtttatgtacaatagtctcataaggggttactcaaataccgataccccattaaagtctttactactgtatcgtaaaatgattagttcgggactttctccgaacgagtttactttgccgtttgttcttaaggtttgtgccggaacagctgcttttcgggatgctgtggttgttcatggccaggctattaaattcggaattgggtgtcaagtttgtgtgcagaatggtctaattaatgtctatataagtttcgggttgattcgatttgcacgccacgtgtttgatgaaatttcgcagaggacactcgtttcttggaatacgatgattggtgggtattctaaattgagtttttgcaaagaggctttttggttgtttagagagatgagagagtcagagttgaggcctgataagttcactttagttaatttgttatctgtttgttcacagagttgtgatttggctttgggtagatttgtgcatctttatatggtgataaccggagttgaaattgatcaaattgtgagaaattctctcttggatatgtatgccaagtgtgggaatttgagatcttcacaaactgtttttaatctgatgtctgataagaatgtagtttcatggacttcccttgtttgtggatatgctaaaaatgggcacattgagtctgccaaagcggttttcgataaaatgcctgtgaagaatgttgtttcttggaatgcaatgatcacctgttatgtacaagaaggccaattcaatgaagctttggctctattcaacaaaatgcagagttctaaagtggttccggataaggctactctggtttcaattctctcagcctgtggtcaaattggtgatttggtcatgggagaagaaatttacaaatacatatgcaatagcaatatggaacttggtttaactcttttgaattcacttgtcgacatgtatgcgaaatgtggtgccctcgaaatggctttgcatctctttctcaagtctcccgaaaagaatgttgtttcgtggaatgttatcattggggcccttgcgctgcacggttgtggactaaaagcgattgagatgtttgaagatatgcaatcaagagaagttttccctgacaaattcacattcactggactgctttcggcgtgttgtcacagtggtcttgtagacacagggcgatattacttcgacataatgaattcctattatgggatttcgcctgagctagagcactatgcctgcatggttgatctcttgggcagattagggctcttagatgaagcggtcagactgatcggtggaatgcctataaaaccggatgtagtgatttggggtgctttgcttggtgcttgtaggattcatggcaacttagagattagcaaactaatactgaaacaactgttggagttagagccacatagttctggaccatatgtgcttctttgtaacatattttgtgaagccaaaagatgggaagacgcaaaaaagattaggaaactaatgaagaatggtggggtaacaaagagtagagcaattagtttcattgaaattaataaccatgtttttgagtttatggcttatgaccaaagacaccaactttcaagtagtatatacactatgcttgatcaattaactgatcatttaaggtcttgttcattttttgacatagatgaaatgcaggtcttggtgtagtttcaattattacctgtctaagtataatttccaaggtccaacttggtattttaaatt

SEQ ID NO: 184041 - DNA, 3612 bp, Cannabis indica
acctatttatctgagagattatcctcattttttgctactgcccaaatgtacttaaacactgcagcaatgttccaatcagccactgctttcagtcccaaaccacctactgattttagaatgcacaccctactccaagcaatagcaaccacacctgtcaagtgttgcttcccactccaaaggaaacatctacaaatagactaaatttccttaataatgctcttgggaagaaccattatttggctcaaatatgagtgaattgccattaagactgagtttataagcacaagtcggcatgggaaagataaattcccatagctctaagatctaatccgagcaaccatcttttcaactaaaagagtgcactcttttgttgaaatattttttgggcaaatgggaatacccaagtatttgaatggaacatcttgctttgaaaaaccagaggcatccaatattctttgaatttccacatcacccatgttattacaaaatacaacagttttagaggggttgggcttcaaacctaatgtttgtgagaatagctcaaggccctgtagcatgtagtaaatgctcttgtagtctccattgcaaaacaacaagacatcatctgcaaaactaagatggttgagcttcaattctccacatctctcgtggaataagtcctgtttgaatccaaccttcttcattattctggataggtattccattcctaatacaaacaacagaggggacatcgggtcaccttgcctcagccctctttttgcttcaaagaaaccgtgcatagagccattgaacatcagggagaatttgggagttctgacacaaaccatgattaacttaacaaagctggttggaaattcgaaagccaaaagcatctctttaatgaaatctcgttccactgtatcgtatgctttttgcaaatccaactttatcatacaattcgccttagctgattttcttccataatgtcttattaggtcctggaaaaccattatgttatgtccaatgaatctcccttaaacaaaaccactctcattttgcgatatcaaatctggtaacactaatttaagccttgaacaaatcatattcgttgcagctttatatagcacactacagcatgctattgtcctataatctccaacaaagtttggacattttgttttaggcacaagggtcaagatagtgttattcacctctcttagaatctgtccagagtgtaaaaaagaggtaatggcttcataaatgtcattccccaccaaattcctgttgtcttgaaaaaagaagctacaaaacccatcaagtccaggagctttatttctagggatttcaaagatagctttcttgacttcctctcttgaatactgcataactaacatctcagcttgttgagtagatagcacagagccttgcttgacaatgctcttcatcaccgatctcctattgttcatcttacttcctagaatatgattgtagtaatctaaaaacaaagatgttaccccattagaattcatgatagaaagaatctggttctgacttcttctagcatggatactattatggcaaaaggctgaattggtgtccccatccttgagccataacaactttgctttctgttggagaaaatatgtgtaagctgcttggacagtagcgaattccacccttgcagcagcttcaagattctgcaggtctgggttcaacgggttctggtgtagccttacttgacaaacatccaactcctcctttgccttagcattagcagcaggtaaatcagcaaaaaaaaaatgcttattaagttgcttaagttttggctacagacacttcaaattggatactatctgaaacattttcgtacccttatcattttccttccatcgatctcaaaccagactattatactcaggatgagaagaccacatcctcaaatatctaaacggtttctttcctccagggagagatgtgaagacagttagaacagctagagaatggtctaacaacccctcattttgaaatatgacttcagcaatcggatgtaaatcacgccaagttggatttgcaaggactctatctattttagatttccatgttggaggagctatatatagtggtgtattgctaaatttataggtttccatgttgattcacgagctagccaatatggaggttgtcactcatcatggtggtctgggcgcattcccatcatcttagtttctatattttttgtgctatggcgtggacgtacggtatatgaagcaattagtttggttgaacgagttttttgtaattttattagtatattaataaattttccttaaatctaagactataaagaaacaaattttattattatttaaaagtgtaattatatttttttttatataaaatgtaataattaatttctttttttaatatattttagtttgcttggtaaacgtttgttaattttacaatgattttcttaaagaatattaggttgagatatagttattacgcaagatttcactttgaataaaataaatctagaagctgcatgcttttaaaagtaataataattgggacaatttggggccacaccattaagctttattgcatataaatgactaattgacattcaaaattttatttatctgaatattaatattcatgtttggtcatatgtattttttaggtggcatttggttgagaggaatgaaaacataaaaatatgaatgagaatggaataaaatttaaaatacaaaaaaaaaattaataaaaaaattattaatattattaattttttttcatcatgcattggaatgttatttctttctatttcaaaatggaatagtaattccaccaaaatagtaaaaaggtcattcaaaatgaaaattatttcatttatccaattccaaataattgacaatcatataattatatttatataattattatgtataaataacagacaagaaagaaacatgttaggagccattaataaatagagagtggttagtggccaaacaaaaaccctaaatctgtattaggctaatcacattattttatcagatctggaccatctaatcatgttattcatgtcatcatttgaaccatcttgtcggtaacaaaatatgtaaaagtgttatttgtctttgtactattatatatgttaacccaaaattgtgcattttgtttccgcttaaacagtcccacttaattcgttattatattcatttcaatttctctttagtagcctagacaagaaaaatatcgcatgactcatcattgtacatgaaattctttactcacgatggttagtacttagtatgaatagatgtgctatttggttggggtagtgatccttaatggtgatggtagagtggttcgagtatttacaaaggttatggtagatcgctttctttctgctgagtgattgtctcgatgcaattcgtgcaattataaaaggaggaggcttgagtgaagatggtattattgttggtaatatccaatactttcttttcgatgtgtaatgttggttcttgttattttatttttcgttgagaaaaactattatgacccatatattagataaactatatttttagaaagtatttcaattatctctctgagatggatatttat

SEQ ID NO: 184042 - DNA, 4057 bp, Cannabis indica
tcgattgaaagccaatgatcatgaaaccatgaaattcgagactttgtttcacaaagactgaaataattacaacagtagctacttggattcagttgaagggcatggatattaagtatttggtggaaaaatccctattcgagatagttgagcaaatagggagtccactacaagttgatgagattactaaacacaggaataagctcctgtatcttggaatactcattgaggtaagtttcgcttaagactttcctgaaaaaatctcatttactgatgaatatgatcatgacatagaattagatgtgaaatatgaatagctgccactggtgtgctatacttgcacagggataggccatgaaaccaaaatgtataggaacaaggagccattaaaattgaagtagagaagaaaatttgggttccaaagaagaacaatatgcttagtaaagaacctgttattgatgaggatggatttcaacaggtttgtaaaagagaagaaaattgtatcagatgagcaacaaatataaacaaagtggataatatgtttgatgctcttgataatgagaaaggagaagatggagatagagaagttaacataggtgagggggagatccctccaactctaatggataaaattttttgttagaatttaaggggaattaacatccagcaaaagcataatgaaatcaagaacttgatttactctaagaaggttggtgtggttaggctcagaataaaaatttggccgggctagtttatacaagtttattttcgggttagtgctttatgaaaaacaatccatagcttgacaaggggagaatagtgcaggcttggcaactaaatatgtactctatagatattagagtgtgtactagccaactgattcagtatttagcacagtcaagacatcaataggatgagttctatataacttttgtgtgtggatttaatgaagaaaagagaagaagttaaatatggcacgatttgaaagacatctcggttcatgtggatagagcttggattgtcttaggttattttaatgatattctaactgcaaatgaatcagtggggaagaactcaaataaacaaccatctctattttagaaagtgtgttgagacatgttttctagaagattttaaattctcacgatcgtttttcacctgaaataataagcaaaagccagaatacagggtgttctcaatgattgattgagccttagtcaatgagaaatgggctggttcttttcagcattctgaagcattaaccttcttacttgatggtgtgttttaccatagtctagttttgttatttcatcaaaatatggtatgtgggaaaaagcccttcaggtattacattatgtggaaaaatgttgatggctttgatcaaagagtgaaacagagtttggaagaataggcatctggtacactaatgttgaaaatggtgacaaagctaaagagattgaaagcaatgtttagctagatatcaacaaagaaggcttcaacgacatctataaagctgaaattcaagcagaaaaaagtatgatggaagctcaagagaatcttaacaaggattctttaaattctattttaatgcttgatgaacagaatgcaaaggagaagtacatggccattcacaaagcttacatctctttctttgctcaaaaagccaaggttacttggatcaagagtagagatgagagaacactgatctttcatgcctccttaagacctaagagagttcaaaatagaatttattttattgagaacgatcatggtatctagtgtgatgatccaaccagtgttcaatatgcttttctaaagtattatcaaaatttgttgggcactgtcatggaaggaagatttcatgtgaatgaaacaattatggatgctggacctaagatttcatggtcacatctcaatattttacaagatgaacatagagttaaggaagtgaaagaggctatcctttccattctaagtatcaagtctgtgacagttagagtcccatgatccaaaggggaaagactaggggatgtacaattttacattgcctggggaaagtcatgtgtgatgactgtaagactatgtaggtatgtgactgggccaagctacaacagcttcctctgtcaggtgttgcttgctattccaaagaaagcctctgtagatagactcaatttccttaacaatgctttttggaagaaccattattttgctccaataagaatggattgccatcagggctgaattaatgagcgcaactcttcaagcaaaagaccaattcttagtactccatgttcgaatcttgacaaccatcttttcaactaggagagagcactcctttgctgaaatcttttttgggcagatgggaatgcctaaacattcaaatgggacatcctgttttgaaaatccataggcatccaatattctttggaaatttgtatcacccatgtttatacagcagtcttattgggattaggcttcagaccagatatttgtgagaatagttcaaggccctgtagcatgtaataaattctcttgtaatctccattgcaaaataacaagacatcatctgcaaaactaagatgattaagctttagctcaccgcatctctcatggaacttgaattcttgtttaagccctactttcttcattatcctggacaaatattccattcccaaaacaaacaggagaggagacattgggtcaccttgtctcagccctctcttttcctcaaagaaactgtgcctggatccattgaacatcagagagaatttaggagttctaacacaaagcattgttaagttgacaaagctagctggaaacatgaaagccaaaagcatttcttcaatgaagtctcattccactgtatcatatgctttttgcaaatcctactttatcatacaatttgccttagctaattttcttccataatgtcttattagatccggacagaccattatgttatggccaatgaatctcccttgaacaaatccactctgattctgtgaaatctaatctgttagtactaacttgagccttgaacaaatcatctttgtagtagctctatacaacacattccaatgctattggtctgtagtctccaactgagtttggatacttagttttgggaataagtgtcaaacagtagtgtttacctcaaaatctttccagagtgcaaaaaggaggttatggcttcatgaataccattccccaccaaatcccaattatcttgaaaaaaaaagctacagaaaccataaggtccaggagctttattgccagggatatcaaagatagctttcttgacttcatctgttgagaattactgaactaacatccttgcttggtccttagagagaacaggtccttgtttgataatactcttcatcacatatctcctattattcatcttactaccaagcagctggaagtaatattctaaaaacaaagaggatatttgttgaggattatcaattcttaccccattagaatccatgatagaaagaattcggttttgacttcttctagcacggatactactgtggtaaaaagctgaattagaatccccatccttaagctagagtaactttgctttctgttgtagaaaagaaatatatgctgcttggatagtagcatattcctttcttgcagcaactttgatgctctgtagttcattgttcaaagggttttgatgcagcttagattgacaagcatccaaatcctccttagccttagcattagcagcaggtaaatcgaaaaaaaaaaattgcttatttaactgctttaatagtggcttcagacctttcagtttggagaccacctgatacattttagtgccattatcaatttcctgccatctgctttgaaccaacctcctatacacaggatgagaggaccacatcctggaatatcgaaaaggtttctttcctccaggaggagatgtgaagattgttaacacagctagggagtggtcaaataggccttcattttgaaagataacttcagctgtatgatgcaagttaagccaagttggatttgcaagaaccctatctattttagaataaat

SEQ ID NO: 184043 - DNA, 871 bp, Cannabis indica
tatatatatatataaatagatgaaaagaatcaccagaaaagatttaagctttttcaaataaaagggtcaacaaaagtaagtacctttttttatttttctgctataaagtgccaaaaaggtcatattttgtcatagaacaaaaaaaaaaacaagttccaacttttattcaattgggattcaaaataaaaaacccttttaactcaaaaactaaacaaattccaagtaaacccagaatctgaaatcaaataagtaaaactcaattcgataaaaacgaggaaaagaacctaaaaacaaacaaaaacccagaaaagaaaaaataaaatttaccttctagtttgaggaagaccaacagttggtgaatacccattaaagttaagagattgaagagtgttaaaaactgaatcttgagcaacattaggtgtgtgaaagcaagaataagctgttgggtcacccataccaagagaaataactcttttttcattactcacagcatcatcaatggtttccattaacaaaccaagaatgcctttaatggtgattgttgttggggcattaatattagtattattaccaacaatgactccatttccattgttttccatggtttgattttggataaaagagagaaaaagagaaagagaaaagagttgtgaaaaagagagagagagagtcagagtatcttctggtgttttggtcgtgtttagtggaaaggaaatgcatgaccccaaagccacacgttctatacatatttatatacatatataaatatgtaatttctgcatggaaacaaaattataatgttaaatcgtttatgactattaattcttatgtgtcactattattacccaatcaattagtctattgtgtcttt

SEQ ID NO: 184044 - DNA, 726 bp, Cannabis indica
atttcagcttgagatgcttgtaacagagagtatgtatattgtatggcctaatatttaaaataaaaaatcatttaacaatttattgagtaagatttaaaataaaaattaatgagtttaccaatagacatatagcaaggctgagctagggagtttttcgcagaattatattcaatgtgttgtattacgagctcatagttgtttgtcgaggaagatcggtgtgagatttcaagaattgttatacgaaaagatagcagcaagaatggactttagaatggtgaatcaaaacataaatgaaagaaaatgaatgctaagtcattggtagtatatgcttagttggttacgacagttccaagtaagctagtggatctcatcacatggggaaagtgtttgtggaaaagctactaaaaaatctaaaattcttgaaggttttacctcgtcaagtaaagaatttttgacggtatataaaagagcgtcacgaatactaggtagaatatgcaatggtgaaaaaatgtcaggaaaatgaatttctaatagtttaaaactgtcgattatagtcagaccacggtttaatattttcggctatactataactgaaagtttttaactatggcctatagtatagctaacagttttaaattgtcgctatagtggattaaaaaattatcgtcttcatcatcctggaaactacttctcgcatatatcacagctgctccaaaacctttacaa

SEQ ID NO: 184045 - DNA, 8044 bp, Cannabis indica
gtaagcaatgagtgattcattgtattgaccctcttttggaggtagtgttcaatgattaatgaaagtagataaatacctgaggagaatccagagcgttcttcttgcatataaaactcatagcacgtccaggataggctccaactaaggtttctccgagtcccttaacaacctatcccagtaaagagacctagataagtgtacttgattaaataaaaggaaatagagcataatcaaaacgacataaatacctcagcatatatctcagaggagtctcctgaagatggatttgttgttgtggatgacaaatgcatagtcggcatttataatttcctggacaaggactgccatgcagagataaatcgtgatcaagttttatttttctggtgctgaaagaacgctctctcattccattttgaagcccacacctgggattataatatattagaggcaatactatgacatgttgttcaggagaagaaaaaaaaaaggctaaatttctcatgttgttcatggctaacattgaaattcaaattatcttcttatttttctgattctctcaccacagcattgcatttgataaaacggcgaatagaacatgatttgggaaagaaaaaatgaatacagcaacagggccaatcaatctatattttcttctctccagcattgatggaaactaaaacactaattgactcaataagttagtacatcatggcacaaaaaagtagacttactctttttatagccgtccacgcttgattccatcgctgttcaccttcgtcaccaggccaaggcatccctgaacttaacattgtcgttttcagctcttgcacctgaaaataaactttcatataagctagtttccagtaaaattactttgtggaatagaaatttttccacttataaaatcgagagattgttttgtaggtggcttcttatctagcaacttataaaatctggataagcattaagcatacgatgatttaattagaaattagaattatgcaggttcttgcataattgaaaaaatatagtcttccttatgtttgtttgctcatccaatctttggtagaatgccacagacacacccaatacaagactcagcagaatggtatttactattgccacaaccatgctgttggacaagtgattgatttaatattaattaatagagctaccagtcgaaagagcataccaattggggtggtgcttcaagctgtaaaactgtctcacgtatttccttcagcgcatcgaactcttcatttttcaactttttcttcaaagattcgagctttctagccacttcctgtaaattaaaaatgcagaacatttcattaacacttacaattacaagccatagcctaataatttttgaccaattaagtggcgacatctttataccattgtccacaaataccaatatttattcttttaaggaaaatgaaactagaaggaataaaataagattaaagagaaaaaaaaaggtgcatggtcaatatcttaagccaataagtttagcaataatgcatcaaatagtagaaacatcaagacaggggagttctgaggagaggaagaccttatttgaatcagccgagagaaccttctcaaaacatccgaatgggagggccactgatgtaggaattccaacccaagatggaacttttccttttagataagaaatattacgtgatttggctccaacctaggagtcataaagaaataaatgagaaggaaaaattccaacagataaaaacataacttcttagataaaaatcaaaagtaaatgttgcaaggtttaccatttcgtttgtgaattcctcagatgatatggcatatttaccaagaaactcctttttgaccaatttcagattggatggaacatctttgacagagcttgcatcagttagctcaacctccttcacctcacttaaattatttaagaaaaacaagtaaaatttttatatgagttcttttaatccatctattagtgcttactataggaaattcaactataattcagaacaacaacatgaaaggaagagataaaaatacctgtaagttacatcagcagatgttggttttacgcgtaacaacttcccttctttggattgtaggtcaagcaatatattgggatcaaaacatgtagcaaaacagacctgccaataaaagagttggtcatttttattgtcgtgtcatatgtaggcgtaaaaaagcaaactcatttgataattgtttaccttgccatttcttgctcgaacagaaacatgagataggacatctggcatatcaggtgtcagcacagcaacagtaccatcaggaatttcttcctctcctttaacacttttcgccaccaaaatggttggctgctcgtaagttttattttgaacagaaagcaactgatcgacaacaacaacatatccaacgacttcaactggactgataacctgccaactgttccaaagcagaaaataatggtgtaagaaactcataatacaatgtagtggtacaagctacaatgccacctgacagttaaaccccttaatttaaagctgcagtttaaaaaaataaaaaataaaaccatatgaattcagtgctttgctttcatctggttttgatgaataaattattgtttttccatcttgagtgacagtatattagtcagtaacaaatgatttaccttcctagattagctgtctttcgaagaacagggtcaagtctattaagaagtgaagataacgaggcagcagatccagcgcgaataatttcttcagtaaatatgtttacctgcaaagagaaattataaggacgaaacttgggtagtaacaagaccacaggacaatatctctttgaattttaatgcagatagtatcttacagcccattcatcaacattcagaagtgatccaagatactccgcagatggctgcaaaatttgatcataccactctgccttgcttgcaagagcaagacgagttctgtcaaggactgattttgcatagagtgcccattgattattttgactatttaacaagttggtagcctgattccatcccttacataaacaatataatagataaaaaaaaataaaaatagaataaaattagagaaaacgaaatggttaagcctccatctagttgacagacaaatgaatataatctcaaactcttagatattcaacaatggtacataaaaacattactataaaacaagagtatattgggtactgttacaggtatttaccttcaagcagtatattaaatcctcattatcatctgatgagagtgccaggttttctagaaccatactgatgaagtacattattttctgcagaatgcataaataaaagctggtcaagaagatatacttttagtgcaaaatataaatcatgtaatgaccaaattaacagtacaaacctcaggtcctgcagtatttagttcttcatatcccctttcaatggcagtcctaacagcagaatcaagagcgatgtccaaaaataaaagatccttcagacgattttgagacttggagagacatggacgaagctcctgacgagcctctaacaaaccctgcatcagattatttaaaaagtttaaaattgaaccagagtatacagaattggagcaaaagatcattgttaaaattatccaaacctcaagaagggcttcaacattcttgtcttcgatatgttctaggacaaattgaagcaaatcctggttgaaaattttgtcagttagaacaattcttacatttttttaacaagcagaagtcacaacaaaaagagtcagcaaacattactggaaatcccgaaggcaagccgtctataggatttatatgtactccaaccatgaagccttgaccctgaggagaaaaacatactatcaaaaggctaactatagcaaccgagcctctttaggaggtgaatctagtttcaaattacctctgatttgtagcccatgcaatttgttatagcagactcaaggtctgcacctgaatgcacggcctgtgaagaataaggatttatcaacatcatcatacattcaagttcaacacattatacttgaccaaaaataaaagcacgggaaggaaagttgctgaatggtatcagctagcactgaagatcaactgcatggccattgtacaataattaaatttatgtctctcataatacatcagcagactggagatagaatcttttataaaatggttcattgatgatcagtgctaccgaaaattcaaagacaaatcctagctgatgaagatggttcattctgagaaaataataaccaattaaagaattagaacttcaaaaacctatgaagctaacctttaacgttctcatgtagtttcctagatcccgcagaagaccgtccttctgctctcttttgaaactgggttcagaatgaattgcacgatcatagctaagaagacgctcttttgttattccattatcattcaatgttttccaataaacactcatgtcaaagtcacgttcgatgtaatcaagtagagcctgcaatgaaaacaagagtcaataagtgcgaactactagagaatcataggtctcatgaaatatttataggcatacctgacagataacaacatcatcagggctagtgttattatgcaacttttgatgccattcctccatcattccacccttacaatcattgtttctctgaaaataaccaacaaacattgtacaaaaaacaacaaattaaggtgtaagtggttagacttcactagtaaaaagggatgaagaaaaaaatgatattatttccacctggataacaagaatctcatctcgaattcgctgtcctacatccccttcacctccacgaccaaccgtagacattatcatccgcagaagttcccggtactctgggtgacttgtataaatattttgaagaaggtctgtgagtctatcctgtgctttactgatctcactgcagatcaagacatatgacttatagcacaacccacatatcaaaatttggggaaacacagttcccatacagaattaacaacacaggaagtagaaattaacagatttagagtttctaattaatatttagtaatacatcatgcaagactcagaagcccaacaataagtatgataagtaaaatccagagctagttatagatgtaccgtggtttcacattataatttttattccaaatgagctgccttgtagccataaacctcatccacaccaaaatagctgcaagacctaattcaccagaatctttggcttgttctgtcaagtctgctgcaatattaaatctgagaaaaagaaagaaatgaggcaaataaacaatggacagtagacttaatcaattacatcaatggttctaagagtaatttaattttgaagaaagaacagaccgatgcatgaaagatttttgtgcctcactctccaactcagctatcctttccaacaaggccttcgcagtacccttgccatcaccagcatccttaatgtgtaaaattcagtcatcaaatttgtaaatgtaatgatggagtagaatacagagtaaaaaggacatacataagtgagtttcaagaaatactaatatatagaccaaataatagaacaatgaaaaaccttcttgactcgcttgggtgcagcagcaaagttaatatagaaatctgatccactgttcttaatccaattccccgcagacagaataacaaatggcattcctctaaaagattcatcttcaatttctagttttaaatactgaacctgtagattatattgtgaattttcagactactgggcgcagatgttaaatctagtagccctagttttaaccaagaaatatgaagcaggaaatatttgttttggaatacctcagtagaagagtcagaataacttaatggtgtctcggcagccccttttagagaaacagaccctggtggcagcacttcagaaggtggttcctgaaaacatcaatttaacttaattctttgatttacactaaatacaaacgtatgaaaagatataaaccaataaatgtagcagaaatcactgatcccaaattcaatacattagaatattaccaaccactctccagcattgcttttagacaaagcccagtgaagggtaactggccctttgtaatctgtagcaatatgaatctttgttttgccagcaggtttggttacaagtgcctaaaaagtacatcgagatacaggagttataagttataccagttcttacaactatgttttcaacaaacagtagaatcaaacacataattgtctcaccagaagttccttatcttgaagcttgaacatgatcctattcagaacaggaccatcctgttcttccttttccttaacgaaaagctcaactgctgacaaggatttgggttcggtagaaaaacttagttcaatgtgtttagctacatgtttgttttgaatgtgcaccaaatctctcttcttgcgctgtatccgaccaattctataattctttttactttgcttggcaaccttagtttgtatctctcctttggtgatcttctttcgtatctcttcaagtgaggtacctttctctaattccttttgcaaatctttccttgcttcctcaaattccctctatataagaaacatcacatttatcacaataaagtactaacattaatagtgggtacaccatatgcacatttcaatcaagaatttagaattttcaaagaagaagatcttgggaatatggaatttacaagttgttcatctttggagtagttgggtttccctgctttctcccagcgtataaaagactgaacttggatgagatcatcaggaatttcttgagaaccagaatgagatgactcctttacatcactaacatcatttttctttgtcagtcttgctctaatgtcttgtacagaagtgcccctggccacttcctctaataactcacttcgagctgcttcgtactcctcctatgtcattaatcaaatgcaccacttaatcagtactgtaactcattttcttgaaaacattaaggggactccaactcaagctataaatatccaattacagagaggatgaatgaacagattaaatcagacataattggtaaaaagtttataggcaaagagcaatccacaatcattcttcttcctcccctgaataagaaatgaaataagaaaaagagatactttggacatgagcatatttgaaataccttctctttctctggtgtgtacatttgtttaccctttctctcccaccttagatatgcttgaatctgtacaagatcttcaggaactgaaacatttgaaattgatttcgatttcgttggtaacttaataaggaagttgccgccattatttttaaacctgtgaataatagataaggagaaagaaattttccattcagtattcttttttctttttcattgagaatggactgtgtcattattatgatagacatagggtaatgaagggatattttacatccaaataagctcattctttaaccaaagaacgtgttaaacacaacacataggctgtaagccaacatgagaaagagatgccacaaacacaccatttagcctacttaaataactacatgttataaaagacaaatttgtgatatctcaccatttatttcgcttttcatcgactatcagaaactctattgcttgtatcgtgggatcatcaatctcaattttgagaacagaattggagccagactggacaaagaaatgaaccaacattaattagaactcttaagagtttgtgttaaaaatgagccatttttgaaacaaatcatatgctggttaactgtactttggaaaatggacttctaagagctttgttcttgtatactttggttccttctggctgccgagaaggaagtacccactttctgaaaatagtaaaaaaatggccaaaactataaaaaaaatctgaaattccaaaggataaaagtgcctatttaaagccatctatagccgaacttactcttttttatcttgaattgcaccccagtgaagaagcaaagagtcactactatacgagacttgaatgtttacttgagc

SEQ ID NO: 184046 - DNA, 1732 bp, Cannabis indica
aaaaaagatttgaacagataaagacaagctgcatgcctgcacaggtagaagcatctctagaagcccaaacctccataataacctcatagaagcctctgaagatccaaatgccagcatatagttcatttccataaggatccttccctatagcattagtagacaatgagttgataaaccaaatgctgctgataataagataactgttgaaaggactccaagttttggaataccttgtcaagtctttttattgaccaagacagttcttttatagaaagtgctagatccttagtgaacttgaaacgtaatcgagctgcaattctaattgcacgtaatatgcgagctgcgtaaccagtacagaaaaagatgacaaacagttgataccaaacagatgaaaaccgttctagataaagaaattgaaactcaccacaatcctccacaaaggaaacttttgcaggaactactgtcctcatctacataagaaaaaaaaaactcatgagaatgagcactgaatagaattatagaactgccttacaactttcagaattggaacaacaatgaaatacattcacacttttgcttttctaatatcttgtatccctcccatatagtcatacacgatcttggtataaggatcaaacatcaacctgtacaaaaggaaaaagttaactaaatgtacaactaataaaataatcattaaaagcatccaaggaagaaagagttcacccattaatagtgaagtcccgtcgtaagcaatttctccaacgaatataatcatccatattgcagccaggaggccttctgaagttgtcatggaacttcttattagaagttcttccacaagtgctaaaactagaaacctattcaaagaacaacaagatttagtttttaaaatagtaaaaataaacacttaactcctaaaggcatgcataaagattagtactttgtaagtaattaagccaagaatggatcaatagtgtatacttaaaggatcaagaggtttgatttcatgagttaaaatcagatataagctggtattggagaaagcttatgaaactcaaagatagtttctccctggctgatcttcttaatgcagggaaaatgggaaaattgaagatcaatctgatgtatgaaagctttttagctaatgatacaaaggtggaattcactaaggttgtttggtgtagtttattttcatcttctaactagagacttgcttgataggagacatgtatttgttgattctctgttatgcccagtgtgtgaagtagaagaggagagtcactcccattattctttgagtgttctttctccggcagagtgttggtttcagttcagaagtggcttggtggtgctttgtggcctaagaagtttgatgagtggaattattgggtaaatcagagaagaacaaggagtttagttactgagatagcttatgcggcctaggcaggggttgtatacagcaatgggttaacagaaatctttgtatatatgagaggaagtgcttaacaattgagcatattggcaagctgataaatagaagcatcaaagtgaggatcacaatggtttgtacagggaatcattcagctagagatagattggcttatgagtttattgatcaattgtaattgaggaattattgtctgttttggccttagttggctttggttgattcaatttgtttgtaacatgcttgtcttgattaatgaaaatttcttttttgataaaaaaaaaa

SEQ ID NO: 184047 - DNA, 7717 bp, Cannabis indica
aaaaaaatcattttcttttgttgtagtgagtaattttaaggaaataaagttacaattgtcaataaattgatggttgtgaaaaatataaaatttcaaaaggaatattttgccagcattaaatatatttatttataaatttttgtagtacatcttctaaataggtttttttatgatcgtatacattatatttatttaagattatttgtaaatttttaaaaattatgaatagtttattataccgaaaataaaatttaaatagttttttactacacatataagaaaaaataatcacgtgtacaataaaatatttaaaatttatttttggtattgtaaattacttagaattttcttaaaatttacaagtaatcttaaataatacttataatgtatatgattatggaaaaaataagatgaaaactctaaatagatgtgagatctactgaaaaagttcctttagaggagtgtactatagacacacacatttattttatttatttatttatttttgacaaaaatttaccctttattatatattgataaattatatagtgtaatatgtatgagagagatagagagagagagagatttactgtaaacatttagaagcaagaagacaactgcaaagatccataatggtatgctgcaaaatatatacatatataaatgtaagtatcttcttaattgataataaaattaatataatttatgaagtaaatatttgatacctaataccgacgaccttttcgaaatcatcttccatggatctctttatgtacttacaaaagtcaaattttgcatctggagcaaaatgagcctgcattttatatattgttatataaatcttttttcaaacacaaaaattaaggtagtaattaatcaattactaattaactaacgtttataaatccatgacgcattgtcatatagtccacttttgttactgaattaaagaattgtctgaagaaggccacctgcataaatatatatttgtttttaattatttttagaaattaagattattaaataaaattaaaaataataaaataaaagaaagagtttaattatgtgacttacaatccatctaattccaggtgttctagaaataccagagtggcgtttcacaaaagatgtttgacgagtaaacctaaatctctcaggatctaaccaaattaacaaaccaataagtcccattattaattattatcaccatataatacgtacgtcatcaaaaatgtttttgacaattatactttcaacatatttaaaatcactaataattccttaaaaatcttaacaattaatttttttgtatttatgttttcttttctttcttatcttgatgtttttttttttgaatttctacgcatatttatatacattaatgttataatgcgaatttttcatttaaaaatataagtacataaactttatgaaaagttgacatatggacccaattcctgattgaaaaggattacgtgtcactaatatgactcttataaaactaaccttgcattgtttaaacttgtaagaagatacgatcaaaacagggtctagtcgtacactatgcccaatatagtcaaaagattaagaggatcaagagatattaatattggtcacgcatatatcgattgtatgcgacaaacatgtctctcatgtgacaagtaaagactacttctttacataggtttggtcagaatgatcaatgtgttcgactattcgttaagggctcgcgtgttctaagttatcaacgcagagaatgtccaaatatctaagtaaggatgattacatgcgtttattaattaaagctaggtccaaaggcctgttatgcgagtaaaaacaccacaaagcctgcgagctcgcgtgttgggaatatgaatgggcaatctgcgacgactcagcaagtccgagacgttttgagcaattaatcagtaacaaatgaaactgtttttacatttattctttgaaacgtttgtattagataagttatgtaattaaatgtaataacaatcctgtttgaccaattatgtaagatcaaaagatacttactttttatataaaagagtgatttaaattaaataaactaaactttgccttctttattttcatgtccttgtttttgcatatttgataacctaaactttgagtacttactactctaggtactcacataactgtgtaagtgaatgttcttgttttgttcaaatactcgtattttttttgtgttgtttaaattcatttgacaacaataaatactaatttttcacataaaaataatttatattaatacagttaagttttaaaactcatcatgacatgattaacatattgaattgaatatttttcagactatatatagcagaagtattgagaagttataaaagtataagtataaaaatctttaaataattattaattaagtataatatatataaattatacaaagaaaattaccatttgtaaattgatattcgaatgaggatgtttccgattcccaaaccttccatttcttcatctgcttaattatagataatattgatcattcatttcttaacaatatattttatgtaagtaaaacagtatgtgttattaatttttatagccatttaaatatataatattttattagtgtaaattataatgataattaactatcttattattatatataaagttatattgttctattgacttagttattaacaacaggccaaactatttgattggctacattaattaatttaatgaagtccaaacacataattaaaaataattgtaaaagaaaattatattaaaaaataacttactttggctttgccgagtgcgatggtaataacgctgtagagaacatgaaacactgcaagaacgaatatgaatatatgcaattggtgcactcctgtataggtaattaatggaactttcccctaatcaaaacaataaacaaacattaataaattaatatatatgcaactagtgactctttcataatgtttttccttcttttttcaagaaatacttaatcaggaccacatagaaaagaggggtaataattgccctctaaaaaaaatcgcaaaaaaatgtatatatattttaattagttacaacatatatatatttgtaataaaagatgatatttatatatatactattaatttttgtgtaatgattaagctaaattgtatatataatagagtcaatggttcaaatcccatcacacatttttttttcttttttaactttacttttgcccctatcttacaaaaatgaaattacgccccttcactttatatcttgagtccgccactatacttgactcttttataatgttgttttgcaataaatacatcacaatggtgcgtgcatgccgcatgctaaaaacttttaactatttttttttcatggttcgtttattacaattatagtgagtgataaaaataacattaggggtataaaagtaatttcacatcaataatgataagaaagagctaatatcacaatatggcagactcccagaaatgcatcattttactaaaaggagaagataactcaagggaaacagagcttggccagaaaagaacatagagttgaactaagggaaataaagaacagaacttgaagagctctgagaatagaagcaggaaaggaaagtatggaagaagcaaagaggaactaagcaaaggtccaacgatcctttccgcctataaatactcatccttcaaaaaaggggataatttcttgcgcacattagactagtcgaaactctatcgaaatacattctcgagatcaagtcgagctcgggaaacatgcaaactacagagaaccattgtagctgagatggaattgtgtaaactgataaagcaattgaattcctgataggatcagtaaataaaatctgggatgacgatacaaattgcctttagtacttttcctttgaggaagacctctttatatcggtccatttgtaattaatcaccctagggagtaggggaaacacttgcacgtgaaattcactgttatacaaattgaagggcctataaagtggaagcaaaagcttcgtccgaagcaccaattcactgttattcaatcactctcaaaaaattctctttgaagaaattttcttttcaaaaaatcctttaataatctcttcaaatactttgataatttttccaataaatgaaaaatcaccataaaaaaaatccaagcatctcaaaatattaggttttcagccaacttaaaggcaaaaacgttcaaaacaccaaatcagcagcatggtgttcatgaagaatcgaccaaggctaagtaaaggaccacgacgactgaccagtgctaagcatacgctttagcgctctgggttccttggtgttgtcccaccagcctcatgaaaaccaacatctcctgaaaaaggagtatgttaggccaaaaattaaaagcattagtcttacagttatggctggtgggaagaaagtgcagagagtgctctagtgctaagttaaaagaagggaaggaaaaaatcaagcaaattatgaatgtttatgtcttttcctctctgataactggcaatagaccagaaggagaggaaggcaaatgaatatccgagcctctaaccacatgtgacagtccctatctatgattgcttcttcactagagcgtagttcaatatatattggtagctgtaattttacttgagaggatgcctgagagaccaagttcctctcatggtcgaaaatggcaactccccaactatttcttcactgagcacagagcgaggaagaaggagaacaagtttccatcccaagccaagaggagtttctaaaggctcagtaagtccaagctcttccttcgatttagacgtcccgcataatgacgagttgcttgaaggccaacaagcaattgcagaactcattaggaaaattacagtacctcaaactgccaaaggttcagtcaaaggaaacgtaatttggtctagacgtcccacctattggatgatgtgggtaggagaaaaatgtcaaggacatgaataccaaagttcagatctgtacaagttactaatagagctcgagctcaatgtctacataaatagaatagaatgtgattgtatatttatctgtactgaaatttatatcgtaaatgtaaaaagtctaattttttttttaaataaattttaaatactctaatatctttgtgttgtacttttaatttatttattgattaattcttttcttctaaagctcaatcacgaagcttgaaatgcctaaacaatatttcaggacttcagtcatccattacaaacaaaatcaaagctcgaatcatgcagctctacgtatagaccatgagctttgaaagagcgagaatgtactttgacatttctaataaaacagttctgacttcatcatctgttaagtataaattttctcaataactaaattatttttcgatacgattaactatcttatggaaaagtttagaatagaatagaacaagatataataaagttgagaatagtcgtgaagaataagaaacactaagatgtttcagagcagaactcctgaaaaactcatctcaggatattgaaatcaagattcaaaaagctcgagaaaatttaagaaggattgaaagctacgatgagatggaatcaactaaggcaagtagttcttccatttaaaaaaaatgatgaccggaggccaacatatttgtggaattttgcttacaagaaaaagagttcataaaaattatttacaaaattttagttaatgatgtgaataatggcttagattttaaaaattcgtataaagatagtttactactaatctgtgcattaaagcttgtagcaaaacataattttaagagatggaatttttatttcaagacctggaattttaagctcaacacatgaaatttagagctcaacaagttcgtatagaagtttcaaaggtaaaagtgcaaagctcaacacagagcgaacttaaataaacattttgtataccaaggacaatgttcagaacatagcacaaagtaaaattaaaagaacgataatatatgcagaactaggtaacaagaggattcaattaatacttactcaaaagatcatttgaaattaaagtttacacacctaaatgctatatctgagatcctctcaaaagttttacatgtataaaataaggagttatagttatgatctcctaggctttacaaaagtaacatcttacagataattacatttaaaaggacttctttttatgaaagccaagtcaattgtagtgatctcagggctaaacatcaaaatcctctaatttttaaatggttgaattataaagattcctagcaatatttgatgagcacacaaagccctctttattctctaagttttcaaaattagctcaaagacatttgctatctccccaagagctgaaaattagccaaaccactggaaagaaatgaaaaataagggtcagagcatgataaacaaaaatttagataagtaaattgaaattgaacaggattagagctgaagaagacacatgtgtaatgttcccaccattagtatgaagagaaaaaatgtttaagcagatgaaatggtgatgaacaaactacagcaggggcaagaacaaggcctatccatgaaaaataaagggatgttcatataaccttcataacaaggacatcagaattcaagttaaaatttatcatcaacttaacgaagcaataataaaatcaagaagaagcaagaatggcagaatttacaagaataccaaaaaagaaagcaaactacatctagaggaaaagatgtgacatgtacagttaagtacccgtgatagtttggagatcataggtaagagggacttggtgaagatcaaattcaaatatgtcaaaagttacttcatcaggagcagaaaaagagggttcatgatccaccacttaatcatttacagtcggggtattagctaaaagagctctgacaggagaagaaggaacgtcgattccaaaagattttctacctttcaacacagaagagatgagcttgttatcatcaccatcataagatttagatatctcttcttcaagctcagacacttcattcaagtcgttctcgatttcaacataaacaccctttgatgtgtgcttgctagccaaaagacccccttgctccctcaattttctcaaatagtttagaggatagctaattgagaaatcacccatacaagatagataattgaaagaaatgtaattctcatgtcgaatcttcagagactcacaaaatgaacgaaagttagcaatttgatcttcaattagagctcggtcagaagcaatcttttccatagctttagcaaaagagattttatttgagcagccaataaccttctcaagctttgcacgatcctcgagtctcagacaagttctctcaatatcaaaggcttcccttttctgaagattaaaaattatgaaaataagcaaaaggttatgaaggaggagtagttttaacaagctcgtcaaaagacaagattacctcctttagtattttgaatttttcttcaaatgcaagtttctccttgtgcgaaaccagcgttctcatgagccttcaacatatatattatcatgagccatgtgaagagcttgtttcttgacatctaattcctttgaaactttggagagctcttctaaaagtttttttactctcctcctctacattcaataaattttcttccatgctcttgaaaagttt

SEQ ID NO: 184048 - DNA, 4617 bp, Cannabis indica
tttagtatttacttcccagtaccaccacaccttctttttaatcttgtcgaaatcatatatctatagcaattgtagaaataggtcgtttggcactttggcagcaaccaaattgggaagagaaaaatgggaagtcaaaaagtagtacatgcctcattatttagagaaatttcacttttaggattggatttggactagatgtacgcctacagcctcgatctatatacactttttattaaaatatgtattagaaaaatggtaccatttcttaagtaaaatttgaaatttttttggttaattagaattactctgccctctgaacgaacttttatatgaattaaattgcgcccttaaagttttaaggatattaaatattctttccaaactattaaaacaagcttaatatgacgattgttcatgtaccaaatcgtgcccttaaattttgatacgtatcaattgtgccttctaaacttctgtctatggcaagcacccatcagcaaaattaaacggaattgaacggaaatctttgaatctaataaatttaataattcaacaaaaaattttaacgaatggctaatttagaaacttagccccttgccctagaaaaaatgaaaaatagtaaagaaaggctaggaaaatggaaaaagagaaataaaaagaaaaaaaaatacacgtgattataagaaaaagataagaaagcaaaaagaggtaaaatagagaatttattcaattctattgatcaactagttttaatttttgttttgtatagtcattatgctcaattttaattttgtaaagtatagtctaatataaatacatcagaaatatgagtatagtcaattttaattttgtagagaatttattcaattctattgatcaactagttttaatttttgttttgtatagtcattatgctcaattttaattttgtaaagtatagtctaatggagacgagaacaaataaattttaatttttacattaaaaaaatatgagtgacaatattatataaattttaatactttattaaatatttaatatttattttgtaggtgttctataggtaagttggaagtttcaactctagatatagaggtttttctttttaatattaagattttattatctagttctcctgaggtatctcagtatattcttaggatagacaataaacttttatagatgaaagaaaatacttcattcttgtgtaatttgttacttttattattttaacttgtatcggttccccaaaaacctagtactttccaagaaataaagaaaaaagaaaaagaaacacattttcagccttaagtcttcaattttaccaattagttatagttacagttacatagaagcaatgacttaatttgggttttagatcttggtaaaatatatataacatgaagccttgctaattttgcagcaactgagggaactgataccataaaagagattcaataaagcaggtccagtggaacaaagagtgagtgagaagaagacttatgactaaacaaagccagctttaacagcgactatttgtaaattaacaacagttttgcttaaacattacatgcattgtacagaatcagctttgagcagaggctgcagggttgttgtttggaaatgttgtcaaaccagtgccactctctgaatttccgggatcctcactggcatgccgaacaaactcttcgggggacatgtgggaaccatggcaggcacagacaatacgaatttggtttgcgttatatttgtaagtaacaccagaaatcgtcctaccatttggtcctggagctgtggtagatacccatggcagatttgggagggaaccagagcctccaaatttcacatctgcatgaatcccgggctttatagttgaaaattcaagagtagaaccatctgccgaagcgcggtcaggagcatcttttcccctgaggttagtgctgcttccttttccatcttctgcctgtgaagaggagcctccttcagtggtatgctgtttgatgtcgcccttgggccgttctgaactcctcccctcatgttgtgcagcctcagatgaattgtgtgatattacttgcattgcagctacatcaataaaaggcatttaaacatcatccattattccatttcaagatttagtttatgaaagataagagaaagcgatgccaaaagttagaaacacaaaaatgacgatgaaaaaaaatcagtggaatagtgagatgggaaacaaagctacaattagtcatggcttgataaacttgtttttcttcaattccattattctgattacctgaatttggcgggcctctaccagcataggaaggttgaaactgttgcgactgagagaccaaaccccaagaattatccttatccaacataggcatttggacaggtgaatacccaaacattacaggcaagtttccaggatgagtccctggtccttcactatttgcggtaggaattacctgcatcactccaggcatcataggagcagaagtgttgggcgcagcagtgctgttagagtccttcagaggtaaggagaaaggcatgttcatcatgtttatcggttgtccagtgaagggactaccaaatgacatgttcccaagcttaaatccattttccaatgatccattgaatctttttggtccattttggtccacagccttcgaatcagaaatcccacgagcctccttttgaacatcagacgaaccaccatttcccatggatcttttcgagccatcatcctgctgcaaaaccaaccttgaggttgaaccctctacctcagactctgctacgtcttcattttcagctgttgagccatcttctgttgtaacagaaatacgtgatgttcttgtcttctcatttaaatcgccataattagcctccctctcatgcttcttttgttggtgcatctcctcaaaaaacatcctacgtttgctgccagattctgctcgtttttctgattcgaactcagcagatttattattgctctcccagactccttttccattcaaatccactgaagcatctgcatcaacattggccttggagaggtcactaaagaagttttccttaggtttcactggctcgcttctttgggaggaagtacttgagtcttgtttctgggtcccaggatgtagaaaacttttaaaatcatccactaatttatttcctttatcacctttttcgattctaagatctgtggagctgctacttttagccttaggtttgccagacaaccccccaaaagatagacccaaactaagctcaagtccactatcgtcctccatttttagaatcaaattattaatgttggtatcacttaagcataatcttctccagtcctcttcattgaagagattacacagctcagttatttcacataacaacaagtgacccctttaagaatattcacctgcaacaaagctcattctttttcacaaaaatttcaaaacaaaatgaatctcacacgtacagacagcattgaccacaaaaaaaaaaatgagaagaaatatcatcatggcttttgtaaactgactcattcaatatataaacatattgagtgacaaagaaatttagttattgaactacacataaccatttcatgtttagatttaatgattacatgtttactactattattttgaagtgtgccaaaacgagtaaccagagcccgtgagcaataaagaaagcattcaaatctaactttagattattatataactggaaactcaaaatcccatgattaaacactcaaatcttgttgtaacaaacagaaggcagaaatagaagggccataatagttcatgctaataaaggtacagtacacttacagtagatctaatactcaatctgggactaagaggatgaaaagtttaaaagatatcaaatcattcaatccaaaacttcacgtcacttgaaacccagaatgcaaaactcagcaaaaacagtacagaggaaagtcaaagacatatctcagtattcaattaatttaatttcacatatattatcagcaatcacagacgaggtctcagatctgcctattaccaaattatgcatacaatctaatggattatccagaaaagattgaactactcctatattaaccccaaaactaaaatctaccaacatctcacatattccatcccaaaaatgaaaaatataaataaataactgaactttttttttttcataaaatcaataaacatagaaacaatcgggagagaatagttgaacagggaaaataagaaaaagaaaaacctgaacttgaagattggtgatgaaaccctagtaagttgtcctgtaaaagagaagtggagaaaaaagagaagaaaacatggtgacgtctttttttttggcgcaaaataaatattaaaaaaaaataaaaataaaaataaaataaaataaaagtcggagaaatgttcaaaacaacccattttttctctcacgtttttaattttctcatttatttgtttttattttacattttaacttgctcatcattttattttcaattccaccttttttttttctttatgaaaacacaattatgccttttaatagggcaatttcttctacacatgtgaatctcatgccaaaaaagaaaaaaaaaaaaaaaaaaaaaa

SEQ ID NO: 184049 - DNA, 4957 bp, Cannabis indica
cactaattcaggaaagggaatttctgatattcataacagcccccctcaagctgtagttggagtaatccaagttcagcttgttacaaagaaattcaaatctaggagaggtaatcggtttagtgaacaagtcagctggctattcagtggaaggaatgtatctgacttcaatccgtttttcagcaacttgagtttgaacataatgaacatctacttcgatgtgtttggtttgagaatgaaaaacagggttgacaattaaagcttgagctccttgattgtcacaccatagagtagggaccatagagatcttgattccaagctcagtgagtaaggagtgtagccatataagttcagtagcagtagaagcaagtgcacgatattctgattccgtgctggagcgagcaacagcttgttgtttgcgtgaaccccaacttataagatttcctccaagaaataggcagaatccactggtggattttcgatcatctaaattggatgcccaatccgcatcagaataagcttctaagttcataacagtagctggcttaaagtggagtgcaagatgaacggtacctcggatataccggagtacacgtttacaggcagtccaatgattgacactaggcgctttgatgaactggcttagtttgttgaccgaaaatgacaaatctggccttgtaagagtaagatactgtagagcaccaaggacactacgataaacttctggtttgtcaaacagaggactgtcacctagacaaagtttgttgctaagtatcattggagttggagcttctttggaatcatcaagacttatcttttggagcagttcagtagcatattttgcttgcgtgaggaataaaccagcagctgttctaatagcctcaaaacccagaaagtagctcacaaacccaagtgactttagtgcaaatttagagtgaagatcatgaatgagttgagtaattgtggatgagttggcacctgtaattaggatgtcatccacatatactagtagaaataaaggagcaccttgtttggttgtgtagaagagtcatgtatctgaagttgaacacttgaagcccccattggagtaaggtgctttttaattggtcaaaccaggccctcggagcttgcttgagaccgtagagagctttatgtaggagacatacatggttaggtcgtgtaggatcaacgtaccctgggggttgtgtcatgtacacctgttcatggagttctccatttaagaatgcgttgttcacgtcaatttgttgtatgtcccaactaaacgttacagcaagagtgaatatgactcggatggtggaagctcgaacaattggactaaaggtgtctgaaaattcgataccagccgtttgttgaaagcctttggcaacgaggcgtgctttatatttattcaaggaaccatcggcattgagcttgatgcgaaagagccatttacattgaatgatatgcatgtcttcactaggaggcactaatgtccatgtgcgtttacgcttcaaggcaacattctcagtgtccatagcatttttccaaactggaatagtgagggcttgtttgacagaggttggaacacatacccgacttggagcgtgtttgcattgcatgaccactaggtagaggtggtggtgctcttgggaccacattagaagtatcatgcgtagtgtcagtgacagtgatgtcttgtagagatgttactgtctctatatttggggctgcaggcaaattttattgtgttgttgtagcaacttcaatgttctgtattggtgcacttgctggtgctatctcaaaagtaggtggattaatctcaatctcagcatcattaggagacaacatacgagataaagagttagtaggcatatgagataattcacttacttgattcatgttgggatcattagcttgagtaggtgctacttcagagaatgtgggaacacttgttgaagcatcatccgtgtagttggtagacagagaggggatagatgtttggagagacatatttgtatttgagggtgatggttggggttgtggttgggctgtagcagagggaggggaaggaatgatgaaggctggagatgtaagattctgtctaaaggtggatgatgaatgcatattagttttagaaacaagggttgagtaagggaattctgtttcattgaagtttacacttctagctatgtatattcgcccagttggatgcaaacaacgataccctttgtgaaagggactgtacccaagaaagatacacttagaggttttaaaagtaaatttgcatgtgttgtatggtctaagaaatgggaaacatgcacacccaaatactttgaggaatttatagtcaggtgggtgtttgtggatgtactcaaagggagatttatattggcaagtaatagtgggaagacgattaatgacaaagacagcagagacaaatgcatcccaccagaacattagtggtaaattggcttgggcaagaagagttaggccaacctcagtgacatgtctatgttttcgttcaacacgaccttgttgttgatggtgatggggacatgggtgtctaaagatgattccaagtttctgtagagggatttgtaattttcgaactcaccccccaatcagtttgtaaggccttaatggatagatctaattgcttttcaaccatagttttgaagaggtgaaaaatactgagagcttcagatttttgcctcataggatatatccaggagtacttggtaaagtcatcaacaaatagtatatagtatcgatatccttcaggagaaggaatgggtgagggaccccataagtcagagtgaactaactgtaagggtgctgtggttttaattgttgaactagaaaaacgcatgaggtggtttttgccatattgacaagcatcacaatactctctaccagatttggaacaaggaacttgcattttattaagtacttttgctagaataacattggatggatgtccaagtcagttatgccaaagggcactaacacgagaagactgagtacaatgagaagtataaaaaaaaatcaggaaaagtacaatgagttttattccttagagtagtagtattggaagactgtgcagaagatgtttgattgctgatgtaggcaactggagatgatgatgatggaagctccagctggtagaggccatgcttaagtgttccctgaaatagttcctgtctcgtagcaatgtccttaacaaaacacaagtcaggtgtgaattctattgttacatcattatcaaaagtaaatttagagatactgataagatttttctttatctcaggaacatgaagaacattctttaaatgtaaagaacgatcagctaggatatgagtatgaccaatatgatgaatagtaagttgagatccattacctacaaccaatttttctttgaccttataggaggttggtgcggtgaggtttgttgtagcagcagagacatgatgtgaagcaccactatccatgtaccagttgttgtcagcaatagtggatggagtagcaataagggcttgtggggttggggtgtctctgaagtggtgttttcagcaccagagggggagcttcaccttgataactcagatcgaagcgatgatagcattttaatgctatatgtccaggctttccacatacctgacatatcgggtgattggtattgttattgcctcggccagcagaggatcgtcctcctcgtccacgattgttgtagccacggccacgaggtccctgattagaaggggggaatggctgatttccattctttttgttggtagaggcatagttagcagatggattttgaagatccatggtggcaacagcattgtgttgttcgatcctcatctcatgattctggagagtgaactgcagctcaggaaatgtgacattctctcttgacgttagattttaccacaacagattcatactctggtcctaatgctcccaagatgtacaagatcaactcctcatcagtaatcgtttgtcctgctgccatgagcgcatcagcaatgcatcgcatcttgagtatgtattcatcaactgcagtggagcctttcttggtcatttgaaggtgagttttgagttgaaggattcgagctcttgaatgactagagaagagttgagcaagttcatgccagatttcagcggaggagttgtagcgagccacatgtccaagcatgttttccgagattgagttgaataaccaactcatgagaaattgatcgagtctcacccaatggctgaagtctggattggggaccttacgtgtagaatcttgagggtcagggatcattgtcgggggtctgatgcgatcgccggtgagaaatccttccagatcttgagcacgaacagagggaagcacttgagaccgccaatatgggtagttcgttcgagttaggcgcaggttgatgggcgccatgtttgctggaactgcaaatccttgagcaatgggaagattagccggagccgggagctgcggtggaattgtaggttgattcgtcggagtcggatggcttgagggcgccattagagagagatgcgaagaaggaaggagacctaggcagtctgataccagttaagataatgaaagaatcaagaaatgaattgactgaaaagtctgaatgtctttattgataagaatgaatatctatatatacaagtgagctgttattacaactgttaacaaactaacaaactgttaaggtgagtaattgactaacagaataactaaaagacagttggcccactaattcaggaaagggaatttatgatattcataacagtaccaagccaaagatagaatactaccgattaaaaaattgaatgatgctagtctattcatttacttgcagctaaagatcaaagaaacaaattttactacatacccattatgcatcaacacacacaacaactactacgacaccattcttcgcatcaagaacaa

SEQ ID NO: 184050 - DNA, 4665 bp, Cannabis indica
aaaaaaaaaaaactaaagtggaaatgtttattaaaaaaagaatgaaataggaaatattttgtacttattaagtaaaaaaataaataaagagttcagtcaattgtcatccctctctcaagtcgagacataagatgggataaaaatgctattttcgtgaataatttgtggcccacatggttgcgattggctaattactgttgtggataacatttccttttttcactttatatttttctattctaatctaaaatctaatgtaatggtagaaaagcaaaaagcgatttcaacgccagaagaaaagagaaaattagctggtctttatgccccaacagttgcgcccacatactagtacaaacaatgacacatattactactttctgacatttattatcaactgtttcatataaagataaaacaaacttcactttatcaatcaattcaaaccagttttcctttttcttgtacacagattatatcgttcaaaacgcctatactaagttgaaaaaacattaaaccagctcatttgcacatgctcatattaccctagaaacatgactcgatttcaattatgaacatatcatgccatccgtggtcgaagaaaacaacccatttcagaatcaaacattacccaacaattcccacttgaaatgcaattaaagggagagagtgagttgaaagctaatctactacaaaagtaactaaatcccctgttcactgtttccaacgactattttttttttcttacaaaagaatttatccaaaaacgaaagaatgaaaataaagttgaaaagaaaaaaaaaaagtgaaacctaaatagtgaaaagaaatcaccattttaccccaaaactaaggaattcttttttccataattatcacaaccttttttttcttcttgttggggtttctggtatttggtgaagcagatcaaagtgtggagggctagcatctcaaactccctctaaatgttccgagtcaactgtacttgagttgagaacgttgaccactcatgctttgtattatcatttatatatatatttctacttaaaaatgtccctaattcatgttatgttcactgaacttgctctccaattaagtcaagaccaaccagaagaaaagctataccctgaaagagcaagaagtagaaatgaataccctgagcagagagcaagcttcttgctgatgctgcaagtaaaaggaaggccaaagccaattcttttgtatacatcctattgtgtttcgacttcttcttcttagaggccttttcatcatgctgtttgatttcttccttcatatcattaaggtccggaactgagacccctctttgatgcttcagctctttctcaaccaaagaggtgagatcaccttctgatgagcggccagacttctttgtcacgacccactcgtaagcactgccaagctggaatagccccgagatcatggcgttgaacttggtcactgacatagtgttctcaaaaagaaggtaagggacaatgaaagggaatgatttgggagctgggaggatattgagaaaggacatggtagcggggatataacacacaatccatgctgggagctgagcctctggaatgaacattgtcattgggagaataatgcaaaaaagtgtgaaggagtaaaagggcaatatcagttttctgagaagaaagaagaggaatatcaaattgaacttcttccaaaagctgatctgtaaaaaaagaaaaaagaatgtattagaaacagtttaggaatctataaggaatctaagtaaagacaagccaaactcccaaaattgcataaatttaactctagaatagtgaagacaaacctttgacttgattatatcaggcaagcaaagcctaaacagctgcataggccctgaatgccatctgtgttgttgtttcctataagcttcataggattcgggtaattcacactggcactgaaaatttggatagaaaaagacaccaggagttaagttgtgcccaaaccaaatgaagaaaatgaaaaagcagccatagatcaaagcctaaagaagtaaaaactactaaaagtaaaatacaagacaaatacctcaacatcgttgagaaagatgaatttccagccatgaagatgagcacgaacagcaatgtccatgtcttcaacagtagttctctccaaccatccaccagaatcctccaaggccttaattctccacacaccagccgtcccattaaacccaaagaagttaattaagcaaccattcacttgctgctctacctcaaagtggaacgctaaattaatgttctgtaaccttgtgagtaagttctcatccttgttcacaaaggaccatcttgcctgaaccagaccaagttcctcgttatcctgttagaatgaccagtaagtatattcaagtcagtttattaatggtatgataatttggccttttcttaacccctagaacagtaagtatgtaaatttatttatggcagaagtaaaataaataaagggtaccttgaagtgaggaactgttttcataagaaaatcagaggtgggctgaaaatcggcatcaaaaatggcgacgaactcatagtctctaacatagttgcaattcatggcagacttaagattaccagccttgtaaccatctctaagcactctatgccgatatacaatgcgggcaccctgacgttgccatttattgacctcttctttgataagtgtttgagctattgggtcatccgaatcatcaagaacttgaattagcatctttgactttggccagtctaagttgcaaacagcaccaatcgattgctgataaacctgaattttcaaaacattgtacgtaagacacaacagtctccacaaacatttaataatcatagagaagctttacttgaggattcaaatttgcttacctccttttcattgcacatggggatctgcacaaggaccatagggaagtaaccattctctccagtttcaagatccaatacaccattcttaggaacaggtttgatcttctttaagcggatccagaagcaacccaagcagaggagtagcctatccaagctctggataaggaacaggacaatacaagcattagccaagaactgcagaggaggagcgagatactcaacccgaacgaaaacccacttgaaataaacccaatcgaaagcacccttgaccccaagttgtgcattccacaagtactgcaattgaaggttcgaagccccaaaatgccatcccttaaagtatgccgctacttcaaacccaagcataagcaaagacaaccacagaaacaccttaatacaaccataaaaccggcttttcacagccgggttctctgtttcccgacgtccacggccaccggcgtctctatcatgctcagtgtccgtacgacccgaggctaaacggcgtcgtacaacggcggcgaggccgaacattgcagaagcaatggaagttaagcaaccggcggctctgtgggccttgaggaggaggacccaagtgagctgcttggcgtttctgctccggcccttgtcacgggcccgaaccggtgagtcggccatgaggaagtcatcatcgatcggaccctccagctcgaccatggaccagtttggattctccatcttgacaaccaccggcgtacctcgccggctgtcctttgcccaccaatcaaacgacggtgccattgttaacgtctgatctcaaaaacaaaaactcttttctttttctgggttttctattgtagaccgaatcccttcttctttcttcttcccctggtttcaaggctatcaagccggttgaatgtttgtaacaaaaccccagaaaaggctacgactttgatctcattgtcagagaacgataccagaaaaacggaaagagagacgcgtggagaagaaagccgagcaaaacgtctctaaatcatggtgacattggtagataatttatacgagaaaagctcttctagaaaaagagagagagagagagagagaataagagagcagtgtgtgagtttgaagaagaggagatttggttgtggaggatttaagtccaaaatcagctctcattcaattacagcttgcaaagggggtgtaataataagaagccgaaagaaagagagattggtaacagctcaacacgtctttgatttttgattctgaaaaaacaaacaaatttaaatttatattattaaaaaaataaaacagaaaacaaaaaaatggggggaaacaaataataattctaacaaaaaataaaaacatacacggacaccacgttcttaggtcacatcactaatttttcgtatttgatttttttttactggtttacataccaacaacgccaccggattttcttacaccataatgcttcatatatatattttaaaataaaacaactatatatatgactaataatattttatcccattcaaacatatatatattatgatacatgggtctaggttttaaaggacagagagacaataaatgatactgtacaaaatcatgtaaataaataaataaaatcacacgcactgatgatacgcaattttcctttctttttttaattaattttcctttctacctactcttttaaactagccataaataaaatcaaataaaacccagaaatgtaagccctatccctggttattttccttctcttgttctctaataaaatatatatatatat

SEQ ID NO: 184051 - DNA, 6471 bp, Cannabis indica
ctctctctctctctctcaaatttgtgtgcttaatgattgagatatttctctcacaattcaaggcaatacttaaattagtgtgggagactatgcagaaggtgttttggcaattcaaaggagcatccaggttcaatactggttactattttgcgacaaaaaggaataagggttagagtactgagcagaatgagtcatattgtttttgttgaaatcaatataaggttttctgaacttttacatgtttaattatcattttacagtttttatatttaggatattatattataatatttataatcaacatacattattagtaaattaagatcctagtaaaataagttctaacacaaatattgaactatattgatataaggtgatgcactttagactgaagaatgttggtgctacatatcaaagactagtcaaccatatgttccatgagttaatcaggaataatatgaaagtctatgtcaatgacatgttggttaaatcaaagaaatctcaaaacccattaatgatttggaagaatgcttcaacatcctacaaacttacaagatgaagcttaaccccctaaagtgtgctttcagcgtccaatcaggaaaggttcttggattcatagttaattcaagagaaattgatgcaaatccaaaaaaaatcaagacattgcaagacatgaagtcactattgtgagtaaaagacgtgcaaagccttactagacaaatcgctgcactaagctgatttatctccaagtctattgacaagtgacttcccttcttcaatcttctaagaggaagtaacaaaaggtttgaatggaccaatgattgcgagcaagccttcgaagctctaaaacatcatttattcaaaccacagatcttatcaaaaccagtagatagtgaagaattattgatctacatggctatcactgagcatttagccaatgctgctctggtgcgtgaggatgaagggacacaacatctggtgtactacttcagcaagcgtctcattggggccgagtctaggtatccgcccattgagaagttggcttactatttagtattggcctccaaaaaactaaggccatacattcaagcctatccaatcaaagtattgactagccaaccattcaggcaagttctaatgaagccagtagcgttaggacgtctactcaaatgggaagtagagcttggtcagtttgaaatctcctatcagcctcacacaacaatcaaaggccaagcactagctaatttcattgttgaatgcagtggcatcaaagaagacgaccccatggtccatgaagaccagaaccacgtgcctgagactatagttaaggaaagttttggaccttattggaagctttacgtagatgtatcctctaatgagcatggctctggtgcaggtctcatcctcgtaaatcctgaaggacttctcactcattgtgcattgcagtttaaatttaccgcaaagaataatgaagcggagtatgaagcactcatagcaggactttaattggcactagtcatgaaagctaaatcatcggagatctatagtgactcttagcttgttgtcaatcaaattcttggcgaataccaagcccgagggcccaaaatgatagcatacttgaggaaagctaaggatctgttagcgtagctaaagcaatactccattcagtaagcaccacatgaggaaaatgaaaatgcaaattccctagctaaactagctagtacaacggactccgacattctaaacatagttcctattaaataccttactcaaccaagcatcagtgaagacttagagtctattctcatgatcaacagtagtccatcatggatgacctcgattgatcaatacttagaacaatgtattcttctaaaagaccagaacaaagctaagaaactgataagaaaaaaagattactttatcatcatggatggagtgatgtatagaagaagctactcagtgcctcttttaaggtgtgtcatgaaagaaaaagcaaagctactcatggtcgaggtacatgaaggtttttgtggcaaccacgtttgaggaaaagcctctcgaaaaagatattgaggtaggggtacttttggccaacaatggtcgaagattcaatggactatgtcaaaaggtgtgaaaagtgcaaaagattctccaaaaatacccaggactaccctaaacgagctcaagagtatgcaaagtccctggacattcaccgtccggggaatcaatctcatagactccctatctaagggaaaagacggagtccaatatgcggtagtggtagtggactatttcaccaaatggaatgaagtagagcccttagccactataacatcgaagaaagttctcaacttcgtagtcaagaatatcatctgttgttacagacttccacaaaaaatagtgtcagacaatataatacagtctgacaacgaacttcttattgatttatgtgaaagacacagaatcattaaaagtttttcagcagtcacttacccacaagcaaatgggcaagtagaatttgttaatcaaactcttaaagatacgctagagaatcgcctggagtaagctaaaggaaattggctcaatgaattacccaaagtgttatggtcttatcgcactacaaaaaaaaatagcaactaatcacactccttttacttcgacttgcaggtatgaagcagtgatacttgtagagctcacaccaccgtctcactgaagactcacttatgatcaacacgtcaatcaccaattattggttgagtatctagacgaaattgaaaaaatcagagagaaatatgagctcacaaaggtcgtgtatcaacaaaggatcgctcgacactacaactccaagtttaaagataggaaatttaagcatggagatatggtgttacgacgagtattcctaaatacaaaagatgcagtagcaggagtactcggaccttttgggaaggaacatatgtcatcattgaagcactagaacctaggacgtacaagttggcctgctatgactgccacttgaatccagtgcccgtaccaaggtacttgaacgggttgcatctaagacgatactgctaataaagtagttgtctccaaaacaactcgcttcacaatgagattcattttaccacaagcaagtgcatcgatcacctcttgaatcgactagatgcagcaaagtcatctctaggtcaagaggtccatcgccaagttatggcccctacacttttagtcgagctaggcatcagtgtagtagggatcaactcggctatttttgatgaaagtgcaagtttgtgaacactttttttcaatttaggtaatgatttaatttttaaaggataaaaaatgttgaaaaaaataattttggtacttcgttgttattaatcaattatagctcacagacctaacaacgctctcaagcactgagtaaagcttgtagagttagtcttgaggtaacttcggttatttctttagtgagttaaacactgccaacccacaaatctccatataagtggacaagtgctcaacatgtaaaacctcctcaagattcatgatcaagaaagcccaacaggatttgatatggcaagtgaccaatgaagatacttctttgatcacttaggggcatatacaccctagtaaatatgagctaggtgttacatgggcattcaaaattttttgcacaaatgagtagtactttcatgggaatgacacgttataaaatattgacgttactcccagtaattgagtttctcaagacatgacatactgtgcaagtgttaaagttcatacggtaactgataaagtaaaaaaaaacaaaaattattggactatagtctagattcaattggaatttatttctaattaaattggaacaaaatttgatttttactacggcatatccacactaaaaggccacctgagaggaccaactaacacactaaagctaaatactaattaaaaaaggagtaagacaacctcctcaaaaaactagcagctatctagttttggaatagctcctcaacttttgttgcattctcttctagtacatcttcaagtgcagccaattttgggtgctctagattgtagcctttgactcctgatgcatctccgatatctgggacgtcaccattcaactcaaagttgacgtcacgaagaattgcctcatttgtccaccgctcgcattggctcgaaaagaatgtgatcttctcttcatcaaaggtttcccaattaaagccagcaactcctccattggctgaccaagagttgtaaatggcatcaaagaaatatcccttgtaaagggaaacatctgcatctgcctttgcctctagggctgccatttggccctcaagacaacgaacttgaccttccgattcagcaacacttaaggtctttttgtcaagggacttgcgaagggactcttctacttcacaagatttcatctcaaagttgtgagctcttttttcaagatcttttcacggtccttggcaagatctgtagcacctcaaagatctgagacactagtttcaagctcattgactatgctctctaagtcagtgaccttggcctccacaacagaagctcttcacttggcgaatgacaatttctctgcaagctcagccactctcttatgctcgttgtccatagaataagcgaaacccacacaagcgtgcaagtgaaaaaataaggtcaaaaaatgactttgactaaacaagagaagtaaaagtaggataagatactcaccccaaagatttcactaaaacccttatgggaaataacatgaggaggcttgatagacaccaacttccccaagggtttactctcttccttagaagtaatcaaagcctctacagatgctaacaatagtgtgccttgtgcacgcaggttggccacaacctccgactaatgagagatcggctcagccatatccatctctcccagaaaaatgaccatcgaagaagtagaaggctcatcttcaatttaatgacttctcttttcctttgaacgaatcccttactagagaagaattcttagtcacaacaacttttcccttcttcctagacctcctcagatgagcaagagaagcagtaggaatggtttgcacgacctctcgagtgggaggttcgtcagtcctggttacaggtttctttctcttagagcaggaagccatggtagcaaggaaactcatcttatttgcaaaacatcaacaccctggtgatttcccaactcgctcgggcacacaagctttagtgtgactcgaaggttcaactttggcttcatcactagaaccaactccaccatcttctgacatcacttcagacccaatggaagtgccactcagcccactttcttcatcttccaagggcattgtccaagaatcatcagcaaagcgagcatcaacatacactcactggcaagttgctataaaccctacgcgacggatgttgtcatcagtgaacaacatcttgccatctctctcccgtaaatcaatgtcagttagcatggcatttgctctccgcttcatgtcaatcagtggagcaagtcttttaaaagggccaaccttttggaaggtaaaatgtcttgaagggatgatgagaatgtagaaatactctttatggtaaagtccacagttactcttagtgatgttgtcaatgtacacactaaattgatggagatggtagaatccttttctttgtgggtggaaatccttttcagatcacacaaaaaattgaccttaagaggagtcagaataggccaattctgtagacgataaaagatgaagaatgtcgacagaattaggtaacttttcaaattcatctaataaggacataccccaaagtaatagcgatcaacacataccacgactgtagaggaaagaatgcactcgtgttcatgtgaaacctcgaccaagcactacaatagggatttcaagaaccaatgggacaccagattttgggttctgacaacagtttcgggtggagaatactcatctcgaatcagttctacttggtgcttagtgattgaactaaatacaagaggccttagctcaaattcaagatctcttagatctttccttttaatggcagtagtgagtaacccaattgccataactttccccccatgggccttatctagattcttagactttggcatagtgaactttgcacggatgaattgcgtcgtgtgtaggtcatagtcctcgagttatcttctagttcttctcacacgaggcatttttgcttccaacccaaatctcctcaacttgaaccagctgaacatcaacttaatttagctcaaaatagttcctttcagacaaattgcaccttctaggaaggtagaatttcaactcaaacagctgacatgaaaatcgcatatttgattttcggagggcttattaatggagtttaaggattcccaataagatctagaatccttaaactaagctttacaaaaggagaaggagaaaaaaaattgaaaaaaaaa

SEQ ID NO: 184052 - DNA, 7778 bp, Cannabis indica
aattattttaaaattaaaaaaaaggtgaaagcaatttaagaaaattaataaaaaaaaggatttttttgggctttatattttatatatcttcgttcagtgaagaaaataattaaaaaaaaaagaaataaaaagagggaaataaagaaagaaggaagaccagaacaaccagaagagagagagccagagccatggtttcaacgaggcgaagtggatctctcactggtaacagcaacaaaagatctccgccggccgacgacaagccgccatcgccgaagcgtcctaaggtgtcaccgtgaaagaaatcaatttcatatatttatatatatttttttggagagttcttgaagtgtgggtttttattttttgggggattttatgggggagacttttgagttttttcagggtttttgattctgttttcttttgcaggtcgaaaatggtggaggttcggaaaagtcgatgccggcggcggagaattcaaaggaagtttctacgccgactccaccgccagctgatcttggtgaatgtggttccggcgatgctccgattgccgaagatgccgttacttccgctaagaacgaggttgcatctgaggacgtagctgtgtcaactccgatcgcggaaggtagttgttttctttcttgtgttatttttgaagaggaagatctattcgcatgagctaagttattataggtgattatttttggaacatttctggtcttggtttgagaattttgaatttttggttggcttaaagggacttcccctgcggtggataagcgtggcgtttttgagttttatcagaagcgaaactcaagtttcgacccacttgcgccttggtgcaggcttttgtctcagtctgggcaggttattactacttatgcttctgagttttcttgctttttctttttttagataacagtatagttgcagttccaacctatactaaatttaaagctaagcagtgattttgaacatgggttttacttgttttacggtttcttgaacgtaaaaagtgtttctctttggcatcagaatcataacattcctatcttggggacgagtttcaccattggttcacacagaacctgcaattatcttttgaacgaccaggctgtcagtggtgttttctgcaagatcaggcgcacgcaggtattacctgaaagtgttttcagcagttttttgcggcattgatagcttgggagccgcttacaaacactagcttgcagattcgtttctcggcagcgagtgtttcttttttcttttttaaaaataaaatggagaggggttttgggaatgtgttctggggtgtcttttaattagttttcattttcaagttgaacttcgtaaatgtacatgcagtatgaccactcattctttgtggacatgatcagcgtgagagcaatgctattgctgttctagaaaatatgggaagcaaggggacggtgcacgtgaatgggacaacagtcaagaaaaactcgagccacgagcttagctccggtgatgaggtggtgcttggatttctagggagccacgcttatgtatccttccggaatcattaatttgtagtatactgtgaaacctttaaacaacaattatatgctttagttttctaattgcatataggcgtctttataccatatttatgagtgttatacttgtgtagtttccttaatattattttccatagatttttcagcaaattatgacagatgttgctgttaagggtatggaggcccagagttgtttggcaaaacttcgtatggaacgtcggacaggagacccttcagctgtggctggggcttccatactggcatctctctcaagcctgagacaggatctatcgcgatggaaatctccagctcactccactggtaaaattcatccaggttctgaggttcctactcactctgttgttcatgatggcacagacattgagcttgacggtctggaaggcaattcaactccagatataggaagtgaaaaagctgatgatattggagcaatcgacaagatgcccccagaattcaatccagactctggcacagaagcaggcaatgtaaaactctctgggatgactgatttgataaggcctttattgaggatgtttgctggatcacctagttgtaaactgaaattgagcaaaggtatctgtaaacaggtcttggaagaaggaaacgatggggcgaaggattcacagccagcgtcattatctggtctgtctctgcgatgtgctgtatttaaagaagatattcttgctgggattcttgatggaaaaaatatagacgtctcttttgataattttccatattatttgaggtagaattctagttcatctctccctcccacaattttcttggtcttgtctatttttcagtcaaagttattttttttaaagtatacatttcagccaagtaaattttgggtatgaaagatttcttgtgatattttggatttatctgatctggttctttctatccatgcatatatatgaagagtttttttatggctttggtttgttatgatcatgtattctttactcactttgtggtataatatttcaaacaagtgttttttgaaaacactacagagcacttatttccagcaagtttttgtgctaagatgttgcaccttgattctgggacttgaacaggcacaccattcaatagacatgatccccccctcccccatccctggcaggaaataagctgttattactcgaaatctgtatttgattgaggtcactaattattttgacccgtggggaggttgggttgggtgggtcaaatgtttgagatagctttaattttattttgaatcggctctatgaactttgttaacacaactcttacatggttagtattactgtgagttctgtatgctgatgtagtttgtatatcaaatcatagaatgttcctgattggtgctgaaatttgttcttattcttggtatttcctttttatgtattgctagcttttgtgttgcttgatttgcaatttccagtgttcaatggctctttagtaaacatatatggctctttatttttcttatttgcagtgagaacacaaaaaatgtgctgattgcagcttcatttatacacatgaagcatagagaacatgcgaagtatacatcacagcttagtactgtgaacccacgaatattgctttctggtcctgcaggttagtctgattcactggttctaataataggttcatgatgttgatgcttttgcgttccatgaccattataagttgtgttttattatgaccagggtctgaaatatatcaggagatgctagccaaggcccttgcaaattattttggtgctaagttgctaatattcgacagccactcatttttggctgtaagacaaactgcattttttgattatggaatttagcagtttcaaactcagtagtcacggctcctatctaattggatctgtctttttaagaaccaacaaaaaattattgtattttacattgtattttcattattgtcattttttttgtaagtcatattgagaaccaatcaattattattatattgcatcttcttttcgttatcgttttcttcttcttcttcttcttttcatgtacttattttcctgtcagaaaaaatgaaggctgacaagctggagttattaatatcaaatatgatgtagggtttatcatctaaggaagctgagctgcaaaaggatgaaattattgcagaaaaatcctccacctgcattaaacaaagccttgtacccactgacccttgtaaggccgtggaacagtcaactagtgaagcagagacaccaagctcttcaaatggactagaatctcaaacaaagttagagtctgatactgcgccctcttcctctggggcatctaaaaatttatttaaaataggtattaacactttaaattgtccttggaagggtcttggtgtaggattttgtgtgctctcttttattttatccttagttgctgctgctgggatttttgttccccttccccgaagttttggtatgacttcgatagttatgaatcatgcaggtgatagggtgagatacagtggtccaggttctggcttgtatgctgcaggatcttcttcaaggtacaatctttagtttttattgcttaaggaattgtttcaccggctgattctgttgtttatcattgttactaaatattaggggcccacctaatggaactcgtggaaagattatgttactttttgagagcaatccttcatcaaaaattggtgtaaggtttgataaacccatacctgatggcgttgatcttgggggtatctgtgaagttggtcatggattcttctgtaatggtatggcttggtcttattactgggattttcattaaattaactgtcacttggttttgcactctgcgaattgacatgcatactgatgttctcatgcctacctcctctctgtagctgctgatcttcgtctagaaaacacgggtgtcgaagagttggacaagttacttattaatacattgttcaaggtagcctttagttttctcaaatttttattctcctccagtttttgagtgcaaattgatgtaatataattataatcttcttccaggcagtacacagtgagagcagaaattctcctttcatattattcattaaggatgcagagaaatctcttgttgggaattcagattcatatgcctcatttaaaagcaagctggataggctttctgataatgtgattgtaattggttcccatactcaaacagacaatcgaaaggaaaaggtattctatcagttctgatattattatgtctgatattagaagaatgaaactatggaagctgatttagtatttaattggggaataatagtgaaaacaatgaaaaattattttgtgggtaaatgaatatttaactaaaattacatataattttttttaagtaaaaataatcaagttgaggtttttttgtcttttttggtctctgcccctgaccatgatcaaattatctataatttctagattagtttatactaaggaaagtgttttggagattattcttcctaggggcaggtatcatgcacctcttttcaaaagctggatctgatatttttcttggagacaatactgaagcaaattttatattatcaaatgatcagactctaaaatttctttctagattcaaaatgactttccgacaatttcttgggtatctattcatggaggcaggtttaggcctgtctacaaaagtggggctgatactctcaaggcccgactagtgttgagagaattaatgcataatactgtgtgaagacaaacctatttgttaagaagaaaagttggacttctagaagcctataatgattaagactttattttctgctcattttctttagtttgttctcgaagtttcacatgtttttttgttttatctttaatactttttcagtcacatcctggtggcctgctcttcacaaagtttggcagcaaccaaacagctctgcttgatttggcatttccggtaatgttctaagctgttaaagttgttatatttctttattcttgtgtcggctatctttttaatatttttgggtgttgtttttgttgttgtttttgtgggtatcttttcttttggtgttaatatctgtttaactttcacaggatagttttggaagattacatgatagagggaaggaagttcccaaggcaacaaaacacctggctaaacttttcccaaataaagttgcaattcatttgcctcaggtttgtatagctctaaatgattaagtttcaactttagaattttaggtgctcataatggatgaattatgatacaatgttggtaatgcaggatgaggctctacttgtttcatggaagcaacagctggatcgagattccgaaacccttaaaatgaaaggaaatctcaatcacttacgcactgtgagatcttttctcttgctcaaatattgttgaatttcactttttttttgggggaaattagggggtctgtgttgtggtggtaggagaggaggtacactgttgggggaagctgtataacaataacactgccattgttaatttactggtcagagcaattattaagtaaataatatttaatagttacagttgaattctgtgtgtaggtgttgagtcggggtggagtggaatgtgaaggacttgagacactatgcatcaaagaccagacacttacgaatgaaagtgtgtgttttttttttgaaaattttggatcatgaattctgttgatttgttcccttttcccctgctaatcttttgtaaactttgtcatttatttcaggtgcagaaaaagtagttggatgggcattaagccaccatttgatgcagaatcctgaagctgatgcagatgcaaaacttgttttgtctagtgagaggtgattgatagcttattttgtgatgtcatatacggtagcagttatagctgaaatattataatagtggctagtgggcgattactactgcacagttgtaatgcaatgttgtgattctggcagcatccactatgggattggaatactacatgccattcaaaatgaatcaaagagcttgaagaagtctcttaaggtgataattgttagattttgcactttttttagtttttagtattatttacatttttattctgtgtgaaagctagtttcagaaataaattgtcagatatgtcagctgcatttgtcatttatgaaactgattggtttggattaaattaggatgttgttacagagaatgagtttgagaaaaggcttttggctgatgttattccgccaagtgatattggagtgacttttgatgatattggagctcttgaaaatgtcaaggatacgttgaaggaactagtgatgcttcctttgcaaaggcctgaacttttctgcaaggggcaattgactaaggttggaattcatattaaaatgcttagtgatgtcaaggattccttatttgtccagtttcagaacttctattttttcccactgatgctgatttggggattagctgaatttagttaattgatgtgtactttattttggttctgaagttggcatgtgttatatgacttttccttcttgttcatttttaaaaaagtcttttattttccctctttttgcagccttgcaaagggatactactatttggccctcctggaactggtaagacaatgcttgcaaaggctgtggctaccgaagctggtgccaattttatcaacatatccatgtctagcataacatctaaggttggtaattctgccaaatatttttgatgattcaatctctgtattgattgcattgcataacatctaatctggcattgtcttctgttaatgcagtggtttggtgagggtgaaaagtacgtgaaagctgttttctcacttgctagtaaaattgctcccagtgttgtatttgttgatgaagtaagtttcaatggatccttattgaccaatatgcttatgtacacacacacatattatgtcatccatattatacgtaattatttctttgcttttcataggttgacagcatgttgggtcgaagagaaaatccaggggagcatgaggcgatgcgtaagatgaaaaatgaatttatggtgaactgggatggcttacgaacaaaagataccgagagggttctggtgcttgctgcaacaaataggccctttgaccttgatgaggctgtcattcgaaggttgccgcgtaggtaagacattgtgtcaagactaaatatgtggaaatattttattaatgtatttgcttttgtttatttgtttt

SEQ ID NO: 184053 - DNA, 2693 bp, Cannabis indica
tcatctgcttcatgaatacccaacaacccatagatttcatctcaaacttccactgtagtactgtgactataaaaaaatagatgacttatcaaaatttatctgttgcctagaagctttttcaaatattttaagcagttccaacacatgacctgcctctctttcatcagccttgcaaaagatgtagctgtcatctgcaaaaaacatatgatttattacttgtgcaccacgagcaacttgaacacccccgaggagacggtcattctcataatcctttaaaagcgcaacaaatccctcagcacaaattatgaccaagtatgaagataatggatcaccttggcgtataccgcgacttggaactatattgccaaatttcttccctgagtgtaatattctataacaagttgtggtaatacatgccataaataaagaaatagctttgtctgtaaatcccattttgtgaagcaaaactttaagatatccccactcaattctgtcgtatgctttactcatgttgagcttaatcgccatacaactattcttcccagttcgtttcctcttcatgtagtgcatcacctcgtaagaaatcatgagattatctgtaattagataccctgggatgaaggtgctttgagtttcaaaaataacttggtcaagaacttttttcaatctgttgccaaggacctttgacacaatcttatacagcacaatacacaaggaaatgggtctaagatcagccatagtgacatgatttttcttctttgggatcaaaacaatattggtatctatgagatgctcttcgaaaacagctgaatcaaaaaaatcttttactaaatcaataatatcttttcccacaatactccaaaaattttgaaagaaacccggactcataccgtcgaggtcgagggacttatccggatgcatttgaaataaagcattcttgacttcatcctcctcaaccgactgtaatcactccatattttgatctgctgtaatggcgaatacaatgaacaacatgatcccaacttgtatttgaagcttgaaacaagttatcgaaatagctaatcattaactcttgtaagttgttttcccaagtgactttttgactagtttcattgcaaatgctgctaatatgattggtgcgtcttcttgttttagcagtagagtgaaaatattttgtgttttgattgccttctttcaaccacatttgctttgccagttgcttccaaaaaatctctttctaagataacacctcataaagtttcttcttttgctcctggtatttagcaattgactccacatcctctcttccttttagtgctttgataattttcttacattgctttatccgaagattgaaattgcatgtaatttcctcaccccaaccagcgagtatattggcatagtgcgcaatcctatcccccaatggttgatgatgagtctaagcccacgaatctgctaccagctgcttgcacatcggctcgcataaccaagtattttcgaacttgaattttgtagtacgaaccacgactggatggttattaggatcaagtaagattggacaatgatatgatgtggaaactttcaaattcaataatacaaaattagagaaggaatctaaccaagatgcagagattaaggctctatccaatcttatttcaatccagttttgagtctccttacctctttcccatgtatacgggtatctcaccatatccatatccatcaatctacacctattcacaacgtcttgaaacccttcaagcaatcaagatgggtacggtcgtccacctttcttatcaccatgcttaagaatgttgttcatatccccaatgagacaccacaacagtttcgtactcaaagccaagtcttcaatcaaatcccatgtttgcttttgtttggatcgatttggctccccataaattccagtcaacctaaaagctctttttcctccgtgcaagacctcaacatcaatatggttctggctataagtattcaacatgacatcatctttatttttccataataaagtgatacctccactatgtccttgagagtccacagtgaacattcccgccaaagaatttttaattctatcaactctttccttcatgcataagatttcacttagaaaaataaaactgggtttcttttggagaacaatctccttaaagaattaaatggcccatggagtcccaagcccacggcaattccagctcaaaatactcataatgtcggacgggtccatcctcggaacccgccatacataagttttttggtagcaaaccaccttcttggtccatattctcttcttcatcacacgttcagcccgagcctaactcagtattttgctccatttcaaatcatggcccaacccattatccatctttcttttctgtctccaaaatggcaatatttagtttaggcccctaagattgaaatgccacctcctcatctcttaattggccagctgtagaacgttgaccatgtgatggcattaatatgtttttgtaaagtatatcatgtccacgaatatctccatccccatgattgccgtgatttcctgaaacattaatactaggattttgactctgattctgtgtcatcggagacaccaccgggcagccaaagtttgttgcatggaaggtgttaaattaaactgtagtccctgctgcaccagatcactactctatttt

SEQ ID NO: 184054 - DNA, 10594 bp, Cannabis indica
ctgaatataattttgagttttaatctaaaatgaaaacgacaatttgaatatgttttctatgtttccaaagcattgaatccaaaaattctttaaatactttcttatttgttttttttagaatttctaattaggcttaggatttttctcctgaactttcacatgtaccaaatcatgctctctgaattttaaggtcgttaaaaatgttcactaaactattgagattgttggatttaagaacttttatccaacaacctcaatagttcggaggtatttttaactacctaaaaagttcaagatcatgatttggtacatgtaaaaattcagggtcatgattttgcacatgtgaaaagttcaagggaaaaaatcctaattaacctttcaactaattacaaattcaattttttaaaaatcaagaatactaaattacactacaaccaatcacatttttaaaaacaattttcacttacaaaattcaatttatttttccaagagactcttttaaaaaacacaatttttaaatcgaaccctaaaatacaaaaactcttaaaaaaaaaaaaaaagtccaagtagtacagaaagggggaaatagaaaagagcataggaaaggttgcaattacagagaaggaagagagaagaaagaagtctttgcattttgctttctctcatatcattgagaagatgaacggcggtccatctggtttcagtcagtacaatttctctttcactttcttcaaaatccatctgatttttgttgttatttcttcttttctgatttacttttgggaacttttcattaacttgatccaatggcttcacagacaatgctccagtcacgaggacattcgttatcgcctctgctctcttcaccatcttttttgggatgcagggtcgctcaaataacctcggtttgtcgtatctggtacttctttgttattttttgagcgtttgattttgcaattcatgttaattgaggtgtaatggaacgaaacgggtacaacgtacaatccaaatgcattaaaaaaaatatactttttctgttctctaatgtctaattgtctataatgtttgattatgagttctgaccgtgaagagattcaatttgctctttggattttgtagtgggtaattcgtaatatttttggagtattttcttttatgattgtcatttaattttcacagctataaaaaaacatatacttttgtaatatttattttttggatgtctattactttgctcggatgaaaccaggatccctgtgctttttctatgggataccttaacttgtcgtccatgttaaatgggccaaacgattgtgtctcttgatagtgcttttaggtcttgttttctcaatattaggagtcattatagctagtgcactttcaaccttttctaagttagcaaaagaaatgatgagattatttagataagcttaattggtggtggttttaactatgagatattttttcattttgctttggcaaagagaagtggataccttatggtgggataccttaagttagtaaccttttgtttgtttttgatgtttctgctgggatttcttatggttctgaatctttttcagtaatccaaactttttgaattctgaaagttgcttgctactccatttaatacgctacaataagcatcttcagtacaactgctagaaattacaaaagatgaatgtgatggatatagatctgtggtgattttttagagatccttgggtagacacaatgtgttggcagagaaagagatatggcattgaacataaagaaactattaaaccactagaagttggctgcatgaattcatcttgtccattagttcctttcataccatagttcttgttagttacaactttttgttcttgtttgttacatttttttaacaatcttagccttatatagtcagtgcattttctgccttattcttctatagagtgtttatcatgcttgatcataaattttatgatacttgtattttatgctttatttcttgacattgggaactgggtagagaatacaaattatttatttgctcgttttacaatataataatttgtgcttctgccaggatatttttggaaagttccgcatttggaagttgattgtgtcagcttttgccttttcatcgacaccggaactgatgtttggactgtatctactatattacttcagggtctttgagagacagattggttccaataaatattcggtgggtaatcatttggctcaaatacttgaataattttttgaatgacagatgtgttatctaaagacctgctgatattaagcaattttgaactggctatggcttatttaacacctattcttagttctcatgctatgagatcttaaaactgaagaaaatagatgtttaaatatatttttttatgaaggaattagagatggttgataagttacaaatgtggtaattgtgcttgccctgaattaaatttgaattttacataattgggggattttgtaggatatttgaaagaatatttaataagggctaaagattgtggagtatgttttccaagaaggtttattggatgaaaaatagacttgtatactcattagaggtaggtcacgtgatcatggccatggtttgctggtatgtttggggtttcataccaaacatatgaaatgaatgttgttttctggtaattgtgaacagtaatggtaaaatattaagagagaatgggaaatgattgtcagcatgttttgctagactctaatactcaactatattaatgatctactatagtattttgtgcaatcaattaaatatgtacctattaaatgtaatagatatggatctacattacagtggaagtggttattgttagattcttgttataaccaaatctctatctttttttctctgggcagagttgatatatatatatttatatatatatttctcacttatttgcgattcacataataggttactcgagtaattgtttgttttgcatagggttggttattaatgtcttgttattttgatacttgtgatcctggctatgaaacagagaaaacagaaagacatgatacaaaaatctttcttggcctagtgtcctttgtacttttttaatcctcaataatcattagtttttttcaacagtaataaggcttccctaatcgtgcaggtcttcattttgttttctctaacagtttcattactgctagaggttcttgctctttcattccttaaaggtatgctgcattatcaagtttgctcaataatagtatttaatgttctgccatgtatgtctattccttaattatattgatcacagtgtgatttttcccaaataattggtgtggaatatgtaggaaagaaaaatgtatattgctgtgcctaaaggggccgtcattaaacaacaatttgtttaccagctggtgtgttgttttagttgggataattgttattaatattttgtattatgattaaaatgcttcaacaatctgtttgctttctcatcatgtggtggaggcttcctattcctagttcaatttctttttcacaatttgtatttgcacaactttgtctccgctttgaggaaacactagagagataattaatctgtaaatggtttggatgctatttcatccacggttcttatgcttgctatttttgtgtgtttagatattatttccaaagaaacatatacgtgctgcaactgactttgtataagtatcattttttttttctttgcagatcctgctaagaacctgatcacctccggaccttatggccttatatttgcatcatttgtgcctttcttctttgatatcccagtttctacacgctttactgtattcaatgtgcacttttctgataaatctttcatatacctagctggtcttcaggtaaaaactaaagaatgtgtagtacataatagtatctctttcccctgccatagaaacctaattttaactttgtctgcctcagcttcttttatcatcatggaaacgttctatattgcctggggcttgtggcatccttgctggtatcttgtatcgcctgaatatctttcgcattcgcaaggcgaaggttggtttttgatttgaagattaaaaagagaaaaacattctcattggtttcttattttctagttttactgtagcttgtatgggttcatattcttttcaagtaatgcatatttctcgctgctgagagacaatccattgataatattttttgaggttcttgggggtgtaaagtaagcttttacaccctgcatcttaaaatggataccgtttacgtttacagctttggcctttgctacagcatgcaaaactatgttgaaaccctttgattgtgcagtcagttcccataatatttatacaatgtttccacttgaggcttaccaaagtaattgggtgggtacaaattgagaaagaagagaagagatcagtgccgatcgagagtggagagcattctgtgtgtggtacagtgtgtggggtattgggttcaagtgtctgtatcctataaaaatgaaatttatgtacttttatttggtgacccctcttgctttttcgtttttttttttggcacaatatctgaggttgaagttcatcttgggcacatacatagcaattttttactccctaaatattgtaggattaggtggggattgcagtttgtaaaagaaaataatcttaatttgtatgtttttatctacatgcttcacatccatttgtatttatcgagcaatgcttatcaacaatatttgccggttttaatcgtgtgcatgaatgtgtttcctatttgtatttttattttttactttgtggagtgtcttccacttctgagttacttcaacaaaggtgttggaaatagtttatgtttttcttctcttcttttaattgattttgctattcacgttaattgtagcaactgaagtgaattatgatcttgtttgtttcctttttctcacagctcccagagtttattacttcgttgttttcaagactttcttggccatcagcggggaatttacctgctgctccgagtagaggaggaaacgtaccatcatttgcaggtcgcccagtcgaggcaagtgctttttcttgaatcatttaaatctctgacgtgttttagcattgttgtattttgaacttggaatggccatcatatacaattggaatcattacttctgattatcatgaggctagtgtgatttacaggggaactttgagttaaaagcattgagctgcatgattagtaaaacttaaatctagtaacatctcaattttccatctgaacattcagtctactgcttttcttatctgagttgtcaataagagcatccccagtgcatataccacatttggggtcaaaaagtagtcaaatgctatatttggtacatactttagttagaccatctctaaatatagtgccaaatttgacacaaattgacaaatgttatatttagcacaccattttgaaatcgtgcttcaatgcacattttaagatgtaatctgatatgaaaagccaactattcaataaacaaaaaaattaaatatttagaagatctttatggcataaccttacaaatacattttattattgtgccaaattatgtaccaattttggcacaatttttagaactacattgaagtttttattttattttttgtacatgttaaaatatagaactgttgtgcttccacttacacgtggcattagattgggagatgctttaatgtggtgtgcaattgagtttaaagaagctgacatttgaaaaacatttcttcttgacatggttgtgatattgtaaatgtacgaagactgattgcgtcaactatttttaactttattatctcagagaaattatcctccttcaattccgtctgcagtagagccatcagaagactccattgctactctagtttctatgggttttgacaggaacaatgctaggcaggctcttgttcaggctcgaaacgatgtcaatgtggccacgaacatccttcttgaagcacagtcccattgattctacacatctggctaaatcaattattcaaggttagatttagaattgcaattatcattccaatcgtggtcagataattttgcagaatctgatgatcagattggtatgcctggaactgaaacaaaaaaggaaaaaagcactgtgggcggcatcatttttagggacttgcttctctccatttattttcacatgtagctttagtcaaaagatgggaacaatttaaaatattatcagaagctttgtataatttgttcataccatattgaaaatgtggaaattctgtggaagagactcggagtcagatgtatagcttctaattcaatgattcggcagacttttcactcatattttgaactacctttggtaagtgatgactgaatactgacgagtttttatatattatgtttgcttctaagaaaagaggtcttttaatgcagtgtggattttaattttgatcatttttttaaaagcatacaaaacccaatttgcaatttggaatcaaagaattagctctgaaaacattacctctacaataaagctaagtgtgaatttcattttctactatttgaacttaggtggcgtttggttgagaggaatgaaaatataaaaataagaataaaaattggaatagaaacagaataaaattttcacgctattcttttaaagctcccctagttacagagcatttgtgtaatgtgcaaaaacaagattgttctcaaattaaaattaattttacaaatatttgggattctattaaaatctaaaactttgttggcatgttagcattagagatttagcaaataatcagaacggcaaacgaattaaccatgtaacagattgttctgtgctataatcattttattaacggctaaaatgaaaatagtatatttttgtgctataatatgtggggaatttctttgagaacacaacattcaaggaaaacttagttctggctcactcagataaccaatgaccctagcataataaggtgaacttattcaggctcctgtttctccactagaaaaatctcaaagtcatagaaaaatgattttaataaaattaaaaccttccaggtgcgcggtcgtcacactcatcttccagagtgtggcgggtaggattggcatttgagtatctcacaaacttgaggaatgccatctcaaaaggaataaacagatactttgatagtaggggaacaaatgaagagtcttgtacacataacaaatcttcagacagtgcttatatccactcggcttttgtggagttgaaatgctggtgtgatccagctcccacaactgcactgaatgcctgaccagttaaagtaacccaagcgaccatcacaatgagcacatgagagtttgccttccaatgcaccttcttcaactggtaagaaataaatatgacagaccttagaagaggcaaagcataagatctaacatctacgacaacattcttaggatttaacaaaaccaaaagataattaagtcgcaaaatacacaagtaaggttcaaaacaaattaagttcaacaaatatacagattagctcacctgctgtcatccactgcaaaggctccacaaaaatggaagaacattcaggctcctcagacttattgaaagggttgccactttttcgcttctgccagttgaaggatgcctcaccctcacccggaacgtgatccacaacattgtcctgcaatgcaactaccctccggcatttcttgcagcggtatgcagatctactactattttctgaatctctaggtacttctgcatctgaagaagtctcactaggcaaaccaggatcagcacctaatttcgaactgtctattctctctccacggttatagcactcacctaaaattatggtaaaaccattaagttattgctgcaaagcagaacttccaatttgcctttcattataaataaacaaatttgatgacaaagcaatggaaataaacaaggatatattgtacaaccagaaatgttaacgttcatattcattgaaaattgaaatttccatgtgtgtaagcctccatcattatttgaaaatatatttgggaggacagaaattaggcatagaagtaaaattacagtacataaattattttgaattaaaaacaaggcagtaattttgaattaaatgtatgctaaaagtattctcttcaacttgagatagaagaatattgttgggacccactcatttttctctccaattttctcttccatcctagtttcttcccaaccaaacaaacaatttattttcccttctacttcaccataaaaaggtttcctggattaaatcctgttctatttttcatttcacataaattatatacaactctaccatgaaacttcattgaagtttatgtatgagtgtctaggcttatgatgattgatatcgagtgccagagtagagtagatagagctttttgactcctatcttggagaatttcacagacgaggtcactgaatcaggcataaaaactaaaggagctgagcttacccaatactttaaggcggaatcgtttatatatggagcaagaacgatccaccttgaaacccatttcctcaaacattttaagctgcaaccaaataagataaagtaaaattcagccttcgctcaataaagttgtagcaagaaatgccatcttataaagtaggtcagcattaaacgcccttgcgtcacctgatctagaaaaccatcatttgggcaaacaaactcacagctttgccgcagagatagtagagcatctgcggatgcgtagggagaaaagagagaatagaataaacaaaatggaattgttatataagcatgaaaatttcataaagacatctccaatacttaaactacatacaaaaaaaaaaaaggagttaaccgattaaaaaataaaaacctaaatccaatccaatcaaagacagttcggactggctaaatccaatcaaaagttattcattcgtttgaaacacttttcaacaattttttaatatgtacttattgatgatgccattctttttgggcaaatttgcattataattaaaagataatcagtcattttctttttgttacatgtaaggaaaataaaattttaaacagtatgacaaaaatgaagttgatattgatgctagaatgtacaaagtaattaaaacacacttcatatatgaaacaaacaatatgtatagatgtaactaaaataaatgtattttaaatttataaattagatattggattggttttggttatttctagggcaaaagtgatacaattcaatttaggttatctttcgtaatcaaaattactaccactctaatccaaatgagactgattatacaagaagaaaaataaatattagattagttggtttgatatattgaaattaattgttgaccaccatgaataaaactgctacccctggtttaaagttaaaacaaataaaaactaaagctacagtcatataccaacgagtagacccacaatgcttcaaacaaatataatttacttcacaccttcttgagaaagatgttcgcttctcatcagatatgctgtaatgatagttgcgctgcaacaaatgcattcaaagaaagagttgataattcagtaagcttttaaacttgtttaaccatattgttgttaacagctccttacttttttccactctatatcccaaagttaatctaaaactgtttacaggctcaagtttgaaacgggagtgtcctatataactaagttcttcacaaaagcatgaaacttgtgattaatccattaactaatccagagaaaattgaaccctaggccatgtgggagcaaattataggcctatcctatgtccaagcttacccagcatcagagtgttaatagtttccttctctcacttatttttttaattggtatgggatacaaacatacaagataaaaagttctaagtctactatatatcatcaagactagacaaaatcaatagagattgttgggaagaacttcaaaatttaaagggaaattaagcatacataaaaggaagagtctagtgccagggaaagaagtaccttcttgacacgccggcaaaacagtgcaccaaaacggatcccttttttctactttcgtcaatgaaattcaagcacacgtccaagtggtccaacagattctcactctccatatctctcataggcactgccatcctcactaccttcaagtccttgccagcatattccaacgagtacaaaaccttccctggcgacatggcgctacttgacaattcagtcgattcatcctctgaagctgaatcatcctcagtttctgaggcaccaacataatgtgtttttatctcctttgtgggaattgttagaccacttcgccattctgagaaaatggatatggatgcagtactaagcattgataaaatatgagtaatatcgctgctaccattttggagaacttctgctgcgtccccaatattgccaatgaataggttttcacggacaaggtacggcatgatgataaccaataaacccgggaaaaccctagtccccaaaatccattgcaaagcaacatctcagtttccatttcatcataacaatatgcaaaaaaaaaaaaa

SEQ ID NO: 184055 - DNA, 2546 bp, Cannabis indica
aatttaatacaagatatagtgttgtgtcaaatttagccttgagtagatgctacttttttatttactataatgtcactagttattatgatttattcacttttactaaattttatattctttatttaacatattaccattatttaaataataaaagaataaaaaataataattttttttttatatatattcttgtaaaatatttaaataactattcaaatttttatttttctttatttttacatattgtttaatgcttcacaattgtaaatagtgagtataatatagtacaaactccaatgtagtacaattttttaaatcttctattagagatggtcttaaggtgtcaagcaccacaagatgtgacatatcactttaacacatttcaatatcaggttctacacattttaatttagtaaataatatgagaaaccgctaacaaattatagagcgtcacattagtgtagtgttagacactttaaaatgtcaaatagcaatgctttaagaccaaattgacaaacttttaacatgtgttaaatttagcacactttttaaaacaacattagagtattaatttttttaactgtgctaaaatataattatacactatttttaagcactacattaaaaatgttctaatctaatagctaaagttaaatttgattaataaaaatttataattttaaccaaacttttaacctttctaaaggtggtgtaaagagaggaaaaaaagaaaaaacatatcatcttttttttttcctctcattacaccagctttagaaatgttttgacacaagaatgcatcaacaagtgtataaaagagaatattaagactagaatttatgttgtaaagagaggaaaattaatagtcattatggagtgtttaaggagtttgtaaagctggtgtaatatgcctctagcaggatttctaaattagtttgcaatcagctaatttgaataatgaaagtatattcttgatgaaagaaaaagaaaagattacacatcatagtaatcatatttgtctttaagttactctgcaaaatgattaagtttgtacaaaataattttcacaatcatttgtataatactacttcaaattaaaaaaaaaaaaatctattttcacttattaatcctccattaaattagcaaatacatctcatcatttccaaagtatatgcataatataagaaaaacaaaatacaatctcaaatggcctattccacctaggggtgcatatcggacgggttttgaattttcgggttcaaattcctagtgaaaccaagatccgaataagggtcggatgggtttaaatctgaaattttgagctttttaaatgactaccgttttaaacattgtgtagtgatacgggtgtgttaagtattcaagttcaacggtaacttcttcctctcgatcttaaagaaaacaacattcttttatacaacttaacaacttgcttcacaaaaccacttgtttcaattttctcagactttttttttcctttctaaaatgtagtacaatgtaggattgaacgtagagtgggttgactgagttttgaactggcaaatttcgagttcatgggtgttagatccaaaaaagaaaatccaaacccacccgttaaagtgtttcgagttcgcgggtttcaagcacacgagttttaagctcacggatttatgttgaccatattaacagatttggtcaaactttttttttcactagctagctagcggctgttgttgttgtttggcgtgtggtggtcgactgacgattgggagagaagaagagatctcaactcgtgaggactaggtcgtctttgtcaaggataggtcgaatcttcagctctctgatgccgtcatcgaggcgataccgtgagggggtgggtggtggttcagtttagtggttgcctggctaggagagagagggtcgagtggagggggattgtggctggtttgaggagatgtatttcttttaggttttaacttttaagtttataggaaaataaaaattaataaacataataaaaatgcgggttggcgggctgattcgggtttgacctgaactcgaagtgcaaaatctaaacccaaacatgctcgatgaaaggttcgggttggacccgactcgcccgaagggaacgagttttctgacatagtcaagttctatgggttggggtcaagcgggtccggatcaaacccgatcaaaatgttcagccctagtatagtgtaaatttttcacaaaataactgaaaaaaacatgaatgaaaagtaagcttgtgactaaaataataaagggaaaaatattattcattaactcaatcggtgaaatcaacaatggaaataaacatgtaaaaggcttgatcaaagcctacaagttttagcctcatctacctaacagaatagtatccaaaattttttttttttttctatcagcaagaaaaagacaaaaagttaacagagttatccttgatcaaagtagtaccatttcaatgtttcaaaaaaaaaaaaagtaaagaccaattctagcttcaacacgagtcattcgattgacttagtaag

SEQ ID NO: 184056 - DNA, 3008 bp, Cannabis indica
acccccatgagaacaagcaacatctatcatatatgatcaacacaagtattagaaactttataataatattaatcacattatattatagtacccaattaacaatatacatgtaataaattaccacttattcatcactataataatcatcatcattataagtttcttctaaattatcagttttagggttgtgctcattatcatcttcatctcctcttcctcctcttcttcttctttgtcttccttcactacttcttccatgtcttcctcctctacttcatctatgtcttcctcctccacttcattcatgtcctccttaggtggattattatctgtatccattaactctaattaattgattgtaattttttttgttgaattaatacaatcctgagttctagtctttggctctagaaattgttttatgtcttcacctctgttcttgtagcatttttagatttgagtttcatagtcaaaaagatcttcttaatttagatatcattttgattttatttgtaggacattgaatatcacacattgatcatcaaattctatttgtaggacatttgcatcagttacagactaatggaagcccaaagtcattttttacaggttaatacaattagatatgagagtttcaggtattatttgtgtcaattatggctgattcaaacgctcaattttgtcaattatagactgatgcaaaaacttaaacaaatatgtctactgaatatatgtaagtttattgaataaatgcaaatgactaatgtgtcactttgtaatcaacgcaaataagcaatattgcagtaatgataacacaaactaaacctgccaataactaccacccccaaacctgtccatgcaaaataggaaatacaagctaattttatagtaggtttaataacattcattccaaacattataaacaatgaagttgatcttttgagagtttcaaaactattggagtcttaaaaaataaagaaggtgtacctcttagtccgacaatcagagaagagttgttgtttcaaattggagcaccagaattcgtggtccaataaggagagttgtaagcacttgagagtcggtactaaaatcatttaaaaagaaacgattacgagtagtaataatcttgttaaatttgtgtgcctttgtaattggtcgagttagttacttgtatgaagctgttaagaattcaattagtgttactaatagtgatagttatttttgtttgtcctagtgttgtatattaaggggtatgcaagttattaatacctttaactctcatttattaaagcttaagctcataatgtacaaacattacaagttcaaaaaacttaggcatagtcattacagtttttgattcctttagttctcaagttattgttcttagtttctgtgtgatcgttctttagtttcctggttgaagttgaagaggattaactgcattgatctccaacaggtggtattagagcttggagtccaagaatcaaagattgaggtttcaagattcaaagagattgatccaagaaaatggagaatgcgaagtttgatcttaaaaagtttacagggaagaataattttaggttatggcgagtcaagatgcgtgctctactagttcagcagggtctgcacgatgcattactgggagaattaaagcctcctactactcagtctaagaaaaaaaaaaccagacatactcgaaaaggcacataatgccataattctcaacttgggggatcgagtgcttagggaggtttcgaaggagattacagttgctggaattcggctgaagttagagaacttacacatggtaaaatttcttgctaaccagttgctcttaaaataaaaattgtatgcttttaaaatgattctaggcaaaacagttaatgatcatttagatgatttcaacaaaataattcttaatctagataatataagggatcaagatagagaatgaggagaggcaactattgtgctgaactccttacctacagagagctggtggctttaaaattaactcacaagtcaataacaacccaaatatgcaactacgtcgtaaagacaattgaaaagcttcacaacatatatagattcatgatgttataagcgaaagagatatgaattggtggggaagttggaaactatcaacgctgcttttgctgaattatttggacttgtacatcttttcaacataccggtctaaattcttgatgtgtcaatcggagactcagatatgaagagagaaaacccattcgaaagcatttaaaaaatattgtacgttgatacaattagcttactattgtgcttgtattttgaaattattaataaataaaaatctaaatttatatagctgagattattagttaattgtgtaagttttatcttgatggtcgagaaaaaaaatacaagaaggttgttgtcagccagcttcggcagctttgaccacctcacttttttgatagattcgtgatgttgcttatgataaaattaacaccactggctgcttggaaagaaaataagttactatctcaactgagttggaattatgtctctttcttgtaggcaaattgtatcaaaacttctaaagagttagcacctgattaaggctcaaattcataaattttaaggccttaattatgtataaaaaaataatataaattaaatattttcattgttttaattataaaattatttaagttgaaagtatttgatttattttagttttgtgttaaatatttcatttggagcaagaaagtggtttatataaaaattgagtccaattacacaagcccattaataataaattatggatttttgtattgtagaacacgtgatgagtaaggcatcaatcaatgatgcaatgaaagtggatacatatgtatcttttatttcaagaaaaagaagagcagttgtcttacaattcaattactcacattcccagcgggttcttctcctccatcacacattgacgcgcgcgtggccatgaaaccacctcttccagcattctcttg

SEQ ID NO: 184057 - DNA, 1209 bp, Cannabis indica
gattactctgtttaaaatcgaagaagttggtcagtttactttgccagaaaagtaagttagttagaggcttgcaaggtattgaaattttagtttgcagaaggatcaaaagtgtcgatattgaattgtttaatagtgttcttagtggcctgagtaaagtaaaaaaggctaagggaagcctttagtttatactatgaattggtagagaaaggagttcagcatcagcagttgacttgcttagaggatttaaaatctgctttggaggtctcgggacaatcagctgaagccgactttgtttcgaaaaggatgccaaggtagacgagtctcagctgtatatctgctccgaaaattttctctgcaaatttaaggcctcaaatgtaagttattttaaagtaaaagcaaacaatttctctggcttcctgtcattatcttaaattacaaatttaatggcatagcaaaagaggtcacatgttggaagcttgaagttgcaaatgatgttttttagctaaatagttacaagaacaagataattctaaactcataatttctaagatatatgaattatcaaatcaacttggactttcaagttaaaatatttttaggatttgtactgtatagctagaattatcctttgggggttttgtttctactatgatagtagatattatttgttttatattatagtatcttagtttttcctcttatgccacaagtgaggcttttcaacaaactcgattgagtgtcaatctaagacgagcgacctctgtctcttttgaaaaaagaaaaattaaattctgtctttctttctaacccaactctttatcaagaatcagcaaaatttatattaccagtcttgtttatgaaaattctcacagtgttcccttcaattttaaagcaaaatcataatttttaccaatggagctcctaagcaatatcgagaacggactaggcacattcctacaccaacttatgagtaagtttagtatttttggaagggaagcagtgactccaaagactaaagatgcatattttttctttgtttttcatttttcttttctcttttaggcaaaactacaactgtgagcattaaggaatgggaatggccagcgctagccgaagatatcacccgcattgtctgtctcctctagcagtgacctatatacctttgccagccacccagctcgatcgggctagggctgaacatcgggcggg

SEQ ID NO: 184058 - DNA, 1985 bp, Cannabis indica
cgcacatttaagttaggttgcctgcttttaccatttcaaaacgctcgagattatcttaccgtacttaattaattgccgtcccattacaaaaccttccatatatgttatgccaaaacataatataaatatgcaaaattggataacgaccaaatccatggacaaaaactaaatatattaggacatattattatataaaatcaaagtatcttttcattaaaaaataaaataaagtccaaagtgatatactacatatatacattcacacatgctggtcaaatgactcaaatcccactctcctagctgctactctaaccaaaaaaaaaaaaaaaagctcaaaatcatatggagcaatttgaaccagcaaccgggggcaatcaatatgagaaatcctttgttcaaccatccatggaaaagttcgatttcaatgatgtttactttaaggaggtaaagattatcatgtacttacatgtatagttatcatacataaaatttacacaaatgtttaaggaaatgaagtttttttttctttattatttaattaggacgaagagagcttatcgaacaatttggtgagcaatgggagcgtggatttccgagggagaattgcctcaaagaaaatcactggaggatggaaagcctctccatttattataggtgaattttatttttaatgataatattgtgcttaaaactaccctaattgtaattggttaacaatattctattaaaattattatattaaattataacacatttggagaaatgttgaggcatatatgatatgtaattatgtatattggcagtgaatgaggtagcagagaggttagcatttttcgcgattgcagtgaatatggtggcttacttggttttcgaaatgaaaaaatcacttccggactctgctactattgtcactgattggattggagcagcttatgtcctcacaatctttggtgcttttatggctgacgctttcttgggccgcttcagaaccatcatggtcttctcttgcatttacgccctggtattcttcttttttatttagaaaaataccactttttttgtatgtattttagagaaaaaccatttttttatatataatattatatgtatgaatgcaatcgaagggaatggtgctgttgacactatcagcatcattggatagtctacgtccaccaccgtgcgcggtgcggccatgcacacaggcaacatcgagccagaataacttcttgtacgccgcactagcactgatagcccttggtactgggggaatcaagccctgtgtttcgacgtttggggctgaccaatttgacgaggcggatagcgaagaagttcagaagaaatacgccttctttaattggtttttcttttcgatcaatatgggagcactcttagctattacagttcttgtttacatacaagacaggtttggctggatttggggatttggaattccaactgtgactgttttctgctcaattatcatcatgcttgttgggcttagattttatcgatatcaaaagcccatgggaagcccatttactcggtttctccaagtccttgtggctgctttcaggaaccattatagaggaatagaagtgggccttgccactgagctgtatgaggttgagactatggaatctgatataaagggtgcccgaaaactaagtcataccacacagtacaggttagtaattcaatcttcctaattcagccctttctttcacagcccacagctcacagctcatgtctttaaatatttggatgttggattttggttgccaacgaaaaagtgtattgaaaataaagaatcaattttcaatgtttggtatgaaaatattgttgaatcatttttttttttacattataatttttttttttcattaccaaacatttagaaattgatttttttattcttctatatttctttatctccacatcaaaattcaagtttcaaatataatctaagaaactaattctttttaata

SEQ ID NO: 184059 - DNA, 2809 bp, Cannabis indica
ttttctgggaattatccataggaaaacccctttcagttggaaataaatgggcttttttgggccttgtgtacggttcaagccccagcccataatctcatagcggcaaaaatcacaatctcccgccatagctaaaaagcttttcccatgattctcaacagtatcaggaaaaaaacaaaggctgaaaatggggaaggagaaacagtactggcttttgaagacggagcctggagagtggtcatgggatcaccaagcatcgaacggtggcctaaccaagtgggacggtgtcaaaaacaagcaggctcagaagcacctcaagtccatgaaacaaggcgacctttgcttcttctaccactccggagccaaagcccgccgagtcgtcggcgtcgtcaaggtcagccgtgagtggtactcggagaaggaggaagaagacgacgtcgttgtggacgtggaggccgttggggagatgaggaggctggttgacttgagtgagatgaaaagagaccctggtcttgctggctttactctgtttagacagcccagattgtcggttgtgccagtttccatggatgtgtgggagaaggtctgtgaattgggtggtgggtttgaaggagatggtaaagatatcgacaatggctgtagtggtgatgataatgaggaagagtagtgttgagaattttggatgcatagaaggtgtttgtaattttgtctagctcaagaagcaagtgtaaatttttgggttaatgttaatgcttggtttattttagtttgcttatgttttgttttgtttttggagtattggcttatccaaaaatatgagaaaatatatagagaaatcagtgaaaaaacattgtaaattttgtgattcaaaatttcaaatattaccattgttttggacccttatctttgaggactaaatttgtttcacttttattattcatatcgattaatattgtatccttttttgggtggtgttgcccatttagttatgggtactgggtgtcattatttgagtgtaatatctttgaaaaggcgattcattagcctatgttacacaggctgtaacatttttctcaacctttttatcaataaaagacttcgaacaatgtgattggaaatgaatcaagtaaaaactaaaaagaataataattaaaaaaaaaaaagggttgaaaacttgaaatcaaacacggtggtttatgatttcaaaagttaaaaatctgagtaaaaaattagaagaacaaagccgttgttggcctttaccgtgctgagttcttagttcaagtaagagtttgaattgaaaatcgatgcgaatgcaaatgttggctccaatacgacctcgttttggcggtctactgaacccgtcatggttcaacaccttcagaggcctccgagctctctcatctcttcctccgcctctgccaaccaatctcggggcggtctccctcgtttcttctctgaaatctccctactaccaaggtatgttgttctctctattcttcttcggtttatgttgtttgacttgaaatgctgtcttcgtgtttgagaaaatgtctgtgaaagacccgagtttggagaataacaaattcgaacttgggatatatttgttttacgaaagttgttttcttttaaacttgttgttgctttacatcaaattgtagggtagtgttgtccgcgttcaaggcgatgaattctggcatatgactaaagttttaagattgggcatcaatgataggtacccttttctcttatcctttttagatgaaagcacttttgataattcatgtgggttcagttcaaatacttgtgattattcacataatatgtataagggtagagctgttcaacgggaaaggagagttaatagaaggctgcattgagaggattgaccgttatgggattgattttgtagcattggaagatcccaagtttattcattcacagaacacacagtggcatgtatttgcagcctttggtgagtttttaaccatctccagctgaattagctcataaaattgtttctgtaccttgctcaggataccatatatgcttacttttagggtctctaaagggtggtcgggcagactggcttgttgagaaatgcacggtatgtgtagaaagattgtccatttactatgtatagtggccaatttattcatgagggttctaatatctcttattttcaatcaattatctaggagctgggtgccagcagtgtaaccccactgctgacagagcgttcttcgtctatctccgaaaatcgggtggacagattgcagcgtgtagttttagcagcaactaaacaatgtaaaatgtcaacaactttcatgttggttaatgttctgttaaaattcttttgacccatctttatctttctgtggatacgatatcttctatgacaggtcaacggctacatgagatgattttaaatcctccaatgaagattgatgaccttttacctacagtgagttttactctgctttttcttatgcggttatgccccaaaagcttgggattatatctagaaaagtccaagttggacatttaatttcgtatataatataatatagcgtgtagctgcttctcatctaagatggagatttcgtaatctttacctaaatttatgttcatacatatatcctccattgtcaaatgtttggaattaatggttcccctctttagaaaaaaaaaagcccattttaatatttggcatttaataaaaactattttcttattcaatctaccaagctatctatccatgcttggttaaacttaagtgtaatcattttatttaatgtaccatgctatccatgct

SEQ ID NO: 184060 - DNA, 2685 bp, Cannabis indica
ggtggggggagtgcaggttctggctctgatttggggcatgcttcatcaaggagctctattcggcttccatcaattcttcttcaattgggaaagcaagacatccaaattcactcttgattggttttgtaacctttttcaaacgagtttgatgaagtaaaaatgaagcaaaacaaagctcaacaacatggatcttccccgacacctgattatttccactggttctggtgaagcgttgctcagtctaaagttggggaagaggatgtacttcaaagacatttgttcagaaaataatgtcaaacactcttcccattctgaagtgtcgccatctgctgcaacagtgaagagaaataagtccagctgccaggctaacctttccccacctcgctgccaagttgaaggttgtaacctggatctttcatctgctaaagattaccataggaagcatagaatttgtgaaaaccattccaaatctccaagggtcatagtaggtggtgtggaacgtcggttttgccagcagtgcagcaggtaatcttctccgaaatactatttgtaaatcagaagcttaagaaatccaggtaacatgtttgctgcaattttctcaagctccttattgtcattcgagcttgggatatatatggtaaccgatgtcttcttatcatcacttaaaagttaaaagttttctatattcttttatattttgcatcagaaaaatagttttattcagtattgcttactaatttgaacaagtgcttttgaaatgtgaaggttccatggtctgtctgaatttgatgagaaaaaaagaagctgccgcaggcgtctctctgatcacaatgcaaggcgccgtaagcctcagccagaagcggtccggttaaatccagcgagactttcttcactgtatggtaagagttaaatggtttttttttttattttatttttcatgttgttaacttggaattcgatgtgatggagtttttagtggtacattatggaagtagacttggtactttaccatccatcaatttagctttacttatttatgtaatcaatcacctctgtagatgagacacagaagatgagtcttgtgtttgaccagcggctctattcaaggcatgcaaatgtagcatgggatggccctgatagttccaaattcgggcacacaagggagtatttctcgaggcctgcaaaatcaggagccgcagctggacagcttcttttgcccaacaatggtcaaatgcctaacagtattaccatgctttatcaagatcccaatcgactaacaccaaataaaggcacagcaactgaggttcaccacccaggtctgatttcgatccctgctagttctgccttttcttaaccacttacattgctttggacttaaaacttttttatatttattaagaaggttattgacacaaaataagatttgcaggctttgaagaaaccgccatatcttctgacctgaacacatctcaggatcttcatcgtgctctctctcttctgtcaactagttcgtggggttcacgcgagacaaaacctgtttcccttgatactctcaacaacactacaaacaatagcagcatggttcaaaatgcagtgcatccaattagccaaggcttacccattgcttcagagtactggcaaactcaacaccaccaacccaccattgatgctgcaccatcacccctttcacatcatcaacgtagtaatggcagcagccagtttcaagatctccatttgttcaaagctcccactgagtctggattttattcctaccagttcaattaaacgtcttccttcacctatcaaaactttctagtcgtacttccgtttgtagtctaataaggccaatgatttttcatgctttattcctaccgtacatatatccatactcttctctgctcgtcgccgtttttaaaatagttctgtggtttttgttgttgtcactccaactttttcttgccaaggcattaatctttatcacccggtgaatttgtcttgcaagttatgttgcattgcatttaagttttctaccgtacttgagtaatagcatttagtatgctcattaatgttacgaacctatttatttcttttgtaattgcatttatgtactagggccaaatgggtgaacatggctttacactgcctaagttgccaaatttaactttgtagttgagattatcattgacaattgttcattgttgccttctgtttttcgtttctactttgctagcacacccgtctgctttaatttttccttcttggcctttaagcccagagagcataactctttgacatacacagctctttactaccaaccaaaacacatcatgtcgagtctcctctaaagttaaggaaggtactatagttattttgtccctttaaaggaagtgtattttgcctcttgctatcagtcaatttaattatgtttttgccacgtcaccatttccaaacagttattgcttttaaaaaaaaaaaaaaattaataaacacttattgagataaattgaggcaaataaatttagaaagaaaaactattgtgtcactcctggcatctaagagagtggctcaatgaggcatgtgacttgcttttatagagttaatcggaaatcttgatttaaataagtaaatcatgctcctggtgaggacataactattgctataattttttactctaatagagctaat

SEQ ID NO: 184061 - DNA, 4329 bp, Cannabis indica
taataataataatttgagaacgaaaatatagaggaaggtgcaaatatatatctcttccgttatcgaacttccaaccgccaaacgccaaaacccctgttctcaaatccgtcgtcgccgactcgctcccggtaattctccggcgaccacgcgactgtctcaggtacctcaaataaactctttttattcaattccgtcctccgatccgattcgactcgatccgatccgatcccaaaaatatattttccacaattttgtttttatctcttttcagatccaaaagcccttcaaaatgtacggattcgaagctatgaccttcaacatccatggcggatatttggaggccatcgttcgcggacaccgcgcaggactcctcacggctgctgattataacaatttgtgccagtgcgagaccctcgacgacatcaagatgcatctttctgccactgagtacggaccctacctccaaaatggtgacttctctttcttcttgaacacctttctttttttctatttgttttttgaataattgaacacctttatttttagtacactgatagaattgtgagaatcggaacatgaaaaaaggttttttttttcactcaatgtattttctgaactttagtgtgaggagtatattgatttggttctagatttagattgagttggattctttgtttgctgatttatctgttgaattacgaaggtagtgttagaatagatcgtggttttttctttttcccataggattattgtcaggatactagatccgtaactgagttaatgaatgaatagtatttactgattcagtgtctgtgtgctcgagcttgagatcactaaacctgctgctatctatcttatatgtgttaataatggctttcagaaccatccccattgcatacaactacgattgtagagaagtgcactcttaaattggttgatgagtataagcacatgcaatgccaagccactgagcctctttcaaccttcttagagtacatcacgtaagtgcctttatccctgtaatgttatccattgtctgattggtactttttgcttaatctttgttagaatatgaatctgttccacatatgtgctggtaaacacatatttccaccgaggcagtgttggattgtgccaagtttatgctcactttgaggcttgaaactctggtttaccccacctggactgtgaaaatgtttgaatacaatttgaagttatatagtacaatacaaggcatattacatactcgattttggtatgggaaagaactgggaggttacaaggcttagaatgttctgcttttagttcacggatttcataatgtttctgactccttccagatatggtcacatgattgacaacgtcgtcctgattgttactggaactttgcatgagagagatgttcaggagctactggagaaatgccacccactgggcatgtttgataggtattttaatatgctatctggatgccttgtatatttgcaatgaaaatatttgtcttttccatattaactctgtgttattatgctaaatttttattgttttatcctcagcattgctaccctggcagttgcacagaatatgcgagagctgtacaggctagtgcttgttgacacaccacttgctccatacttctctgagtgcattacatcagaggtacatactactggttcttgggtcatattcacatttcctctttttccctgttcttttttattttcttcttcattttcctattagatgttctttgtttcttgtaattgtatgacattacttgtgcaatagtaaggttagaaaaaagcaatgattaagagagattcttcttagattagaagagatttgttagtttcttttcattataaaaaccataaattagttaatatctcgtccttaggaataatagttaacagttgtagcattctttctgtgaactaatgtacacaattgactgtattgaaatttatattatagtagtcattgccactggttgtgtgtgtgtgtgtgtgtaaaagaggtctgatttcaaaccgcaaatgaactaatttgacaaacagggaactactgactgttttatagaaacttttatatataatgtatattgtacgcataggagtcatttgattataattttattctgattcctggtatatttggtctggtcttgttttgaaggacttggatgacatgaacattgaaatcatgaggaacactctttacaaggcataccttgaagatttttacaggttttgtcaggtgagtttgtaattctgatttcatctgtatatatcttgtgtaacctgttttcttattcatttctctatttattttttttatagaaacttggtggtgccacagctgagatcatgtctgacctacttgcttttgaggctgacagaagagctgttaatatcaccataaacaggtactcttgttgctaaatgattgaatgaattttcttgaccagttttcatatttctaagtttaattttttcccatttgtgtgcagcatcggtactgagcttacacgggatgatcgaagaaaattgtactccaattttggtttactgtaagctctgttctctaacacaattgttttacccattcatttggaatatcatctctgatgattgattgataatgttttgcagctatccttatggccatgaggaacttgctgtctgtgaggacattgatcaggtattgttttgtcagttctacatatgagattgaaaggaaagtttcatgtaacctcaaggatgctcttgctatttcataggctgtctttatatggacttttttggttttaggataagtgtatcaaatttttaactaatagtaaattatcagatttcccttgttaatctcacaaccaattataaaattcttggacatcctttgctttcttatattgtagtcggtgcatcgtgtcaaacatgtttttgtttttagtttagatgttgtctgtatacttctatcggattccaaaaagttgtttccttatggtttagcctaatcttccatgtgcttaccgttcaggttcgtggtgccatggagaagtatcctccttatcaggctattttctcaaaattgtcttatggagaaagccagatgcttgacaaggcattctatgaagaggaggtgaaaaggctttgcttgtcatttgagcaacaggtacatatttcagcgaactaagcagagtaattgtggtagccgttcccgtcctctacttttgaacttttataaaagtaaggtgacacgattgtgttttgttgtctggtatgcagttccattacggtgtattctttgcatacatgagattgagggagcaggagatcaggaacctgatgtggatatcggagtgcgtggctcagaaccagaaatctcgagttcatgacagtgtggtgttcatattctaggtgggtgaggctctgattcacaacttgttagaaagagacagacatatgttgtttgaatgcataatctttttctgtatatcttttcccgtcttatcatcgtataatgaatttgtagagatgggtgcagttgcatgcactgtttgcaaaattgtgttgcagagttgttctactgtcttattttattattattggttaaatttttatttatttactcagaggggaaaatggcataaattgagaatcgtaagaaatacttcggttggattgtattgtatttatatatttggtcacccagtatcatcataataataatcgccagactgcgattttatttggtctgtaattttttttttttggctacttgctatagagtgatttgtgcagacataaaaattggatagttgggcctttagcaatcttttgcaaaattgaatctgattagaatcttattattattatatattcaacagtgtcaagttattttattattattaattattaaataaaaataaaagaccattttgaaaggtgatattttaaaaaagttaccaatttactctgtataggggctcctgcaacaacactctacaatgagtactggtacacttttctgtctttttaatttttatttttttaggactacgatcatggtggtggttattatgacattctatagaattttatataatttaatagtatcaaaaataagtttaaaataatttgttcacttttgtgtaaaagaaaaataaatactcttgcaatgcattgtgtttcttataaaaaaaaaatgagtttatagctattggagaatcaaaagtaccagaaggcctaccaatacatcatgtttgatattttgatgtatagttattggcttttggatagttatactttttttttttaatgattgtat

SEQ ID NO: 184062 - DNA, 3359 bp, Cannabis indica
tgatttgatcaacttcaccagcttagttatacatgactttgtatacccatttgtaaccaattactttgtggcctggaggtaacttggttatgatcctaagtttttttttttttgtaaggcttttgtttcattttccatggcttggagccagtgtttgaactgtgaagcctcaacatagttttgtggatcaatatgagtgtatgctgcaaggacaacaactctaaattatggatggagcttcatataggacaagaaaggttctacgggatgtgcagtggaggccacatgacatacatagtcttgtaaatggactggtttggtgacttgtcaacctgttttggtggtgtggggtttattgaccagattgggagggggaattgagggtgtcgatgttggatcattcttattggatgttggtattactggtttttgacttgggagaataggttgagacaaacaattatcattttcggatggtaatgttgtggaaagaaatggaaagatgttttcatggaatatgacatcacaagatatgtatatttgtttggactcaatgtcaaggagtttataggctttcattcctaaggggtaaccaatgaaaatggaggcacaacttcttggagaaaacttatgtcgtttagaatccaaggttgagccataggccaaacatccaaatgatctaaggtgatcataattgggggttttttgtgtaacaatgcaaaggaggtactgtcgttgagtaatgtagaaggggtgcggttgagtaagtatgtggttgttgcaatgagatatggctaataaaccagtgagagattggattgtaaacccaatgatggagccacatttagaatgtgttggtgtttcctttcaaccactgagttttgttggggtctttcaatacaagaatgataatgtatcacacctttggatgcataaaataaagtgagatttaattccttgtctttatcagatcgtacagctttaatggattgtgagaattgtgtacatatcatggtgaaaaaatcttgtataactatttgaacttcaaatttcatttttatcttgtaggtccaagtgaaccgagatttatcatcaaaaattattaagaagtatttatagccttctatacttgtgactgtaaagggtccccaaatgtccatgtggattaagtcaaagatgttcattgcaaaattgttattagaaatataagggagtttcttttgttttgctaaatgacatatatgacgatgagtagaattgatagcaattgaagagccaatctttttattaaaaacattggaaatgtacaattgatgggtggccaaggcgatcatgccattgatctacatttgttttatggaaaactaaagtttattaactagtggcagcaataggagtatcctaatgtatgaggtacaacttcccatgtcgtttagctgtcccaatcaccacactctcagaaggatcctgtataacacaagtattggctttaaagaacacagtgtagggtgtatgatgaactagttctgtaatggagagaacattaatttgaaaaatagggatatagagtacgttatatagagtaagggcttggtttatgcatactgtacctatgttaaaggaagatatcttatgaccattaggcaaaacaacatgctttcgaaaagatgtattataaaatgaagtaaatcaagattgattggaacacatgtggtgtgcagcaccactatcaagaattcattggaaagaagggtgagaaaatgcattaccatccaagttggatgcagcagtgttcatggcaggttcaatccgaggagcagcctgattgagttgttggctaagtagtgaaatcaattgttgatattgagaagagaggtctgaggtaatggaatgacctgtagcatgatcaagtgggttgctagtagatgcttgatttgcttgagccttgcttttttcatttttctttttatctccatatccaagaggaaaatcgtggataaagaagcacttatccaccaagtggctaggtttaccacagtgagaacaagatggtttgggtttcttatttcttgggagattggtggatagaagacgaattgatgaagcaaggggtggattgtcagaagaaccaagggtgtgttggcgtttttcttgaacaatcataggaaagacccgagataggtttgggatgggttcattgagtaaaatttgggcacgtactgaagcgtaggactcgtttagcccagtgagaaattgcagaaccaagttttgattataatattcaagaaaatgttttattgcaccacaagtgcaagtagtgtttgggggaaattctttcagctcatccgatagggattttaattttgtgaagtatgaggtgactaaatgataaccctgttgcaaccgagtaagttaggtttaaagttgaaagatttcaggcttgtttcccacattgaatcgttcaactaaaccgtgccacatatcaatagcaagatcaaagtacattatgctttgagcaattttagaggagatagaatgcacaagccaagacattaccatgtttttgcaatggagctaagaagggagaagaggattaccagtttcaagccatggaaggcagcaatcgatgaaggcgatcttgttcttggtagccaaagtcatggtgatccctcgcttccaagactgatagttgacaccagttatgacagtggacaccggttaccaggcctggatggtcgcctgagctgaggaagaagggattggacacatattcattagccttccaatcaagaagaggctgagatcgctgaggttgaactggattttctttagttcttggagattgattgtcgagggtctcgttgttattttgagatcttgtcgtggaagtggtacgtcgagaagcagccatgggaacgactgtatgagcagaagtaacatcaagagggtgatctgatgaaggatttttcagttgttggtggtggaattccatcctgggatcttctggaaggtcgtgccatgggaatggacagggttacttctgataccatatgagaaaaccagagcaagaagaagagtgaaataaaactctgttattgaatattgaatttgagacacggtggctttatataggcaagttacaatgactaagctccacacttaacaacctaactaattctacttaacagtataacagaaacaactaactccagtaaaaatgagaataacacactaatctaatatcttgcatcggaaggaagtaagttttcatcaagtaattaaaagggagttcaaaccttagtgtcttagtggactcattttgcaaattggagtacatcaagattgcggcaaaatcatta

SEQ ID NO: 184063 - DNA, 10645 bp, Cannabis indica
ttggtctgttatgggtggtggccgtctgtggtgagtctgctatgatgtggtggttagtggtggtcgacggtcggggttctattatgggcggggtgggggttgttggctagggttggggtttggatgtatatattcttaaagagaaaaagagtgttgatataccaccttgctattattatggtagtaggactttgtttattaatgtcaggggatgttagtcttgtccacattcacatttgggagattctcaaatttttattggtcccataatttatgatgcgatggtttgttacaattgtcatcactgtggttagtcgtttgattatttctttgtattctagatttaataaataggttattattacctaatttttattgaatgatctttggccgatagtcatttatagttgtgtgattagtcacatattcatttgtattggagatctagcagtcttcgcgctctttaatgctttaatgttgtcaacttattagtcttttatttgaaggtgttattaggattttcttttcctatttctgtaaacgaacatacgttgtctatgttattgattatgctctttgagcaatttatcatcatgtaatcaactatgatctgatttgcctattaatgaaaattactgatatatctatgaaataatatgctaggaaatttctttttttaattgatccaatttaatatcatttaagttaccatataattctttttttaaaagaaaaaaagataaaataataattaactacttatcatgttcagctaatttaaattctaaatctgtttgtcacttttttatgactaatttaaatttttaattattttcttaaaaaataaatttatataataatattttaattaattttatttaaaattataattaatataaccactaaaactttcaactaattaattatattcctttaaaataagtctcatttgtaaaatttattaaaatgattaagaatttgtagagcaaacaagaagagaagcatagctctattattgatgttaccactaaccatctcttttaacattccaactctctttctttctttgtatggacattcctacaatccattgaataaaataaagctatattttatgaaattgaaacactattttggtttcactatttcattgagtttgactagaagagctataaaactttaaaatcaaggtgtgttatcatgaaaaggattggaagactcctaacttgcttatttcttgattaggcaaaatcattaaccataaaaccataaccttttcatacaatgaaaaaaacaaaaacaagaacaaaaaactctcctgttttcgtcgatattagcaaagcaatccaatcaatgacaaaatctggaaaaacaaaactgcatgattaaaatttgttcaactgttcttcatcaaaggttctaagtcagtcacatcaccctggctaaaataatagtgttaaaacataataaaactcttcagaaaatacaagaaaaagcaaaaaaaaaaaaagggtttcctcaagtttaatctgcatgaaagcatctgaacatttttgttaaacatataaattaccttaccatgaaaataaaaactaaatataatagaagaaagagagagagaaagagactcagaaaactgccagaactttcccagcagatgctctccacttgaaacttagccaaacccaaatttgaaatttcatcctcaagattgaattctgaccctacaaagaatagcacaacacccaaatgattggacagagaacataatcaataagctgggcttatctagaaaaataatagagtcggggaggcgtattaaatggctctaagagtattatgctttcatctattataaatcggctgcaacaataatatgcaccatagtgaagaaacagaatccatgggagccacttaccggtcactggaagaagcccatgtttgaagttagtttgtcaatgttgtccctggctttggctcatagagggatggcgatgaagcttttgactcggagtttgctgatcatcctacaggtaaaatttaaattctgaaatatcagtaatctaatttggagaagaagactaacatcgcctaaccttgaattataacaaaacatatatttgatttctattaacaacaaacaaagcaacgaaaaaccttataaagagatgctgctgattctgactccacattctggattgcaacagggcccaatgatcgcagggtatccagggtatccaatgttagctgccacccacaaagcgcaacggcatcagcactagagccagatccactgctggtgctgccagcagctgcaacattgccgttcacccagggacaaaacttgttgtgatgagcaattggatcaaattctgaagcttcttcatagttgctctcccctttaggtggttctgaattagattgaaggaagaagaagaaaaaaagagtaaaaacatcatcaatatcagagagaaaagggaatcacaataaaacctttcaacttacacctacaatatggttaagaatagccagaggcagaaagggacaggatgagtttacaaaacataaaatagcaccaagtatattgaagcagatgttccaaaacaataagcaataaaaaggacaagatataagctcagttactcatttaagcacattaacttttctcagcaatagtatccatatccaatatcaatgcacacttctatctataagtagcttgcacattaatttgcttgagactcattgattatgtggacccgaaacacaggaaaataataacgtaatctaaaagctactgatgagtaaaataaatgcaacagattattgtaagtatgtagaaaaacaaagagctgcagagaataataagaacgttagaagagaagttaaagaaagtaaacaaggtcaagccttaaaaacagttaataagatggggaaatctacctatcccatttactaatgcataatctgactctcggtagacacgaacatttgtagatgaagactttccagcctttgtgacattttgcttggttgttttatagccagagtctataatagcattgcaggagagagaagggtgtgcagaggcctctacaccaaacttacagcttgcacttaccttttcgccactttcaacagattctgccttagcagaaccatcaatcttggagccactatcagccctcccaagagattgagacatctcctggctatcaccacgaggatcctccctattaatttcatctgggacaatctcatccatcaacccaggatctggagctgattcgcctgtctgaccctgaacgtcagtatcctcaactctgggttcgacatcaccaactacactacctgctctatgaacagacacatcagctccatgaatttcagcttcgtggctggcacacatgccaacacttcccccacttactccaaaactaatccccccacgggcttgagcattcacagtttctgcattgaaaatttcttcaccatcatttgtactgctgacacccatttccccacgagcagcttcagcaactgaacgaaaaccaacactttgctgagcttgattactgtagtttaattctgatgtttcattcatgtccaaatttccataagtacttgatgaaggaaactgaatatcatcaatatctccaggataattttcaacactttccattgagtcctcatttgcactatgattgtaagtatccattgcaatgacagatgatgcacgtgctgaatccctagttgtttgaattccaacaggttgctcactcctttgccgaaatgaagcacctctactgccatctgcatagatttcaacacccattgagtggctaggaccagcaccagaatctctctgatacgatgaacagtacgaatcaaaaatatccaaatcacgtgcacgttttgaaggcccagcagaatattgtctaccatcggtgacttcatcaccatcacgatcaatcacggttccttcaacactatctgcctgctgcacccgtaagtgttgtctgtcatctgagcttccacctatttccaaacttcgtttacgagaactaggaccccgtgattcatatgaagcagcacgatcaccaacctcacttcccgcaggttgcccaatcatcaaatcccttcccatgtctccctcctgcatgttgtcaaacattgatcttcttccaaaatggttaaaaggtaaacctcccgccattgtgagatttaaatcaacatcagcattaggcaatgacttcccatcatttgttgttgctacttcatcacgatcttcagtctgctctttatctgcatcatcagctgcaacccaaccactaattccactcgctgcacttactccacgagtcaatgccatttttttacttgtgtcaggaatgtcgatattgttggaagaaaaacgagcagggcgaggaacagttaaaaagtccataattctaactgtagcaccacataaactgcaatctagtaagggcgacctgaactcacatcttggatccttagcaaacattttactctttccagtgtcttttttagctgaagcagatagtggtttcttgcctagtccaggatcctgtgaaggatggacacggcttggtccatgagaagttccatttctggctgattgtgcagaatgctcctcacagtcttgaacatttagaagccatcttggttcccatccgcagagacttattagcctttgtgactgttgaattttaagagcatgtgcatatagtcaaatatatttattgattaaaaataatgtttattttcttgagtgattagacaactactagcattgaaacaatgtctaaaactcacagaagaatatacgcaagaggacccctcacgagagctttccaattctgggatactctcaggtttgaagtctacttcccctgcaataaaactctgtgactgggacaaaaagcgatcaatctgtggtccatgtgaaacacgcatttgctcaatagaagaaccagctactttgggaagagactcaaactgcaggagcccatcacatctatccttataacccccaattaaggctgattgaggagtaggaggaaattgcaccaggctgtcagggcagctgttccctctccaaggacatgtggccttgtgcccagaatccagctccttcaaaaaggcttcacccgcattttgaacttcacccacaaaaataacaattaaaggtagaacaagcaaattttgtaaataaataaaggacaagcctatgatctacaccttatcgtcatacaaaacttttcttcaagaaggtttgaggaaattgaacagtaatttgttataattggtgtcagtataatgcacactacagacatcagcagataatttgaactcaaatatcaaatgctatgtttgtaaaagtacaaacaaacaaagttatgttagaaatataatagattgattagcatgtgtctccaccatctccatcttgaatttttagcaaaacacataccaatgtagaacagaaaacactagcaacatagttcacaatatgaagctccatggatcaaatagcagctgaatttcttaacattgaagtgtagtcacaaaattttagctgattatgatgtgtatcaaaaatataatagaattatgacgcagttatctttcttactttcccactccaacacttttctccctcgtacattgacctttgtataaagaacagaattaagtccatttaagccttttaaggaatgtatcatgaacttttaatttcattaattgcaatagctaaccttcagcaagggtccaagacggcaatggaacaaaactaaggctagcactgcaagattcacatacaatcttatcaacctcgacatttacccaacctttctgagcacaagccaatgaactgataacctgcaccatgttaaaagtgaaatattaaatgattgaaactttggaagtgcttcatttcgcttatgaaaatggaaaagtcataattgtactgcattataaagactgtagtttcacaaatttaatcttcaaaattccatctcagctttactttctagtgttcacttagtgcttaaccctgtgcagaaaaccaacttcatcaaattagaatccttagcctcaacatagatggaagacctagataccgtgaaagggggaaaggttatcatttttcagttttcagttttttacaatgctataaaggtgacaaaactgttgtggagcatttcaaagattacacatttttattagggatattatgataatttaaatagtgtactttctgaaaatggcaattatgtttctcaaaaggatattaatgtttttccatgctaaatcaccaaggcacaagaataaatggcttagaatttccttcaaattgttcgaattaggaaattagcagtaaaagaaaaaaaaaatgaccgctcgtgtagataaaaacaactaaaagtaaaacaaatgttaaaaaaaaaagagtaaaacaattgttgacttctactaatttttaaagaaaacagaactatctattatttttgttttctaagttacacattgtaacttgaatgttatttgtttttttttttgtattctgaagaaaattttgtaccctttgttcttgtaatttttaaattatattaaaagaaatgattgtttcttattaaagaaatgctacattttatttaataatattaataataaacataaccctcttaatttgagaagttgtaggtaacattacataaattataatctaaaactgaaagctatcttttttatgctagtattagtcaacattcattacatgggggtgcaaaactagcaaaatttaatgtccatgcattatcgatgattagaagttgagggtgagaataaaattataaaatgttaaaaattgatcaaatgaaaatcattatatgttatgttgcaacccatagcaagctaattcaaaccttaggctttccgaaccaatttgaaggcttaaatgtagccaagcgcctcaataaatcccctctttcccagggtctacaggaaggtcttgaagatccaaaggcagaaccaccggcacttgtgctcaaggaagtccggggtggttgtgaaccaacacatgaaatagaagctgccttggagccttgcccatgaattgacccatctatactgccaacatttgttggaacagccggagatgacgccccagcagagctgataagaccaaaaaaagcacaatattgtcacagaaagctatagataaataagtgtaaccatgttaattattcctaccaataccatcttagtaataattataatctataatgtataacaaaaacaattaacaaactattaaatcagagaagccaaactcgtaaagtttctagaattacacatacaagaccgatgggtttagcatattgattagttcaattactccctaaccccattacatatacttaataaggtgccaatgttcaaatttaagtagtcaatcgagtgcatacaaatacacatagcaagttcacaaaaatagtggcgcaaaacatcaacagaatcaaaaaatctaccccctaagtcttaaccataacccacgtgcaagcacagagtatggacaataatcacagcacattgatccagcgaacaaaatacgagcagcctcaatcgactaaaatttcataatttccaaaaaaatctacaaacagaacttatcaatcagtataatcatgctcaaatattaagttattaatcaaagacatatacaaaaaccatatacgagcacagtaaagcaagctcaacaacaaaataaacgaacgaaacagtaaatcgccgaaaaacctccacgaaaacccacctaaatcaattgaaatttcactttttttttcttttcaaaacagccaaacaccacaataaatcaactccagcactctttcccaactcctaccaaaagaaaagaagaaaaaaaaaaaaccttgctttttccaattcaaaacgaaaagaccgaaaaaacctaacacgaattacacaaatttacaggcaaataatcccccctctcctcccagacccagtgaagaagctcaaaaaccctagataggtggaattgttggttgcataaattgaaaattgaaaagacgaagtaagaattggaattagaaatagagatataaatgatgaagaagaagggttttggggattgagagagagtaacctggcagcaggggtaggatcaacggtccctccggagctgatgacctcctctctcatcttccgatttttctctcagagaaaaaaaaaaaaagaataataataatatttccgtcaaagtactgaaatgattttctctcgagtgagtgtaacacaagtaataaattaataataatttaatttccttttcttttttatttatataaaataaaataaaataaatagtattaaacgcatggcgggtaaagatccatagagaatccgacccagataccaataaatgctttatgcctcactctctcttctatctaatagacaaccaaacccgaaaccccgaaaatccgaaaatccgacccatgtgcacccctaatagatagaagagagagtgaggcataaagcatttattcgggttcgggtatctgggtcggattctctcttaccattataattaaattaattaggatttttgcttattgaacttgaactttgacatgtactaaattatgtcccctgaacttttaagatcgttaaaaataccccatgaactattgattttgttgaatttaaagacttttgttaaatttcattcaattttactatttcaaaaattgtttatgtactaaatgatgctctcaaactttgatatctaccaaatcatgtctctcgaactttgacatatactaaattatgccctctaaacttttatccaggttagacttttttactaaaattggaaaaaaaatcctttaatccaacaatctcaatagttcattgagcatttttagcgaccttaaaagttcagaggcatgatttggtatatgtcaaagttcaagggcaaaaatcctaattagcattagaattattataggggtaaaataatttcaagttgcaacacggcacacgaacatgccacgaatttatgagttagggtcgaaaaaattaagtgcagattgaaaatgggttaaacacgacaggattctctttacacgacataaattttttaatataattttaaatttattattttctctacaattcaatcttcaacaatagtataacatgttaaagtagatcaacatgaacacgatacgatttttataggtcgagttataattgataaaattagacgcaggttgaaaacaagtcaacgtgtctgacacgaaatataaaaacgggtcaaataaaatatgacacgaatataacacgatgatatattttgtcagccctaatcattagcagctagtgttgcaaatacaagttagtttttgatacgaaatgagtcggagaggtacaaaaaatatgaaattggtcatgacaatgttacaatcgacacgatatcaacaatataaacttgaggagaacttgcccaaaagacttaacatgtaaacacaaataaatttataaaaaaaattaatgtataataataataaatttgtatttattagttatatataaataaaatgatattaaaactcgaatattgtacaaaatataataacactataattaaaactattaaaaaatatatataattaaaactatatcactttgtctatggagcataattttaaaatttgagtatttattaatatttttatattctgattatcaataaaatattgttaattttagtaatcatttggtcaatttgaagataaaaattatgagcttattaaaataatgtctaacacatcttattacaagtcaaattatttttggttttattttgggatacaacaaactaaatccaaactcataaacgaggcaaatattcgtatgatgattttgtaggaatcaattgatattatatttagatttaattatatgatttaaataatagataaagagtacaccatattttaacccaatatattaaaaacacaatcttctgcatatccaacccaaaataacatattagggagaaataaaacagtacaaacatatttatatttttattattatagttgctcttccactgaggtgaagactttattattaaattaagcaaacaacacttaaagaaatctgagtttccatttccaatgcattctgcaaatatttcacactagaagtttgttttggagagagagagagagagagtgtgtgaggagaagtaaacaacacaagctcaatcatttagacggtgtaactcgggcaccagcaacaccggcaacaccggcaacacctgcaaatgtcatgaaaaagaaacaattaaacaagtgtttaccaagaaaaaagaagcaatcataactttgttgtagaaaactactaaccattctctgcttcatccttcgattcatcggctgatttccacacaatgtctttcagcccggtcgaaaggttcttgtagaactgaaaatgtaaataaaacagcaagcagaattgtcaaactcagatctttaactttgataggtaatttgcatttcgttatgtaacagaattctactacagacta

SEQ ID NO: 184064 - DNA, 8006 bp, Cannabis indica
tggactcaactatcattccacaactctttccgagatgtacaagttagctgtttcgagaacaacatccgaaaaatacttaactttccaggaatgattttagagactttttcattttggagaaactataccacatgtactattgtattaattttgagtctttgaagttgtgttgggaaaaattcaacaaacaccataagatagctaatagcaaggctctattataaaatgagaaataataaaaagtatcaataatatctaacatcattctatctatatggttctagagaatgtcactaattaattgcaatttctttataaaataggaaaagaaaccatagtcttccaactcactctgtctgtggagatctctcttgtcggcaaaagcttatcgtttctattttccatggttatatactataattttatttatctcactcattttatttgtgagcgaatgtttctattggtgtttttggatttttgttggaatattaacttttaagtatgtataatgtatttggggctcctaaggatgtttgtgtatggcttaaagacttcaactagcgagaagagtagctagggtcggtatgccaatagtaaaactcagatgagaatggttaatttcaatcagacattattaatggttattgacagttgcattcttgtgtaaatgggtgcttattcactgtcaactgttagtggaattgggtgtttatgaatagttgaaactgtagtaatataaatttctgttaaagtcatcttttttaatggtatattatgttaaaatgcgcaacaatctattaacatacaataggtaagatattattttattttaaatgggcatttttttctccggcagcttagttgagtcgctgcccaatcacgactacttgtgagtcaacccattattttgtttgtttgtttgttcacattcgaccacactatatatgatttgtaaattgtaacatataataataacttcattatatataaatatatatacttgttgtaattgttgtacatcatctgaaacccaagaaatcaaaacaaaaatcagaggtcaaagtcaaaattagtataatggaagtgaaagctagagctcccgggaaaatcatactctccggtgaacatgcggtggttcacggatccacggcagtcgctgcctccattaatctctacacatatgtcactcttcgctttccgactcctgctggtaaaaaaaactcacctttctttccgtctttctatgtattttgtttgacttagatttgggcgattatggtggagttgaaccaattcaaggtctgggatttgtttggaatgataattggaaccttcccttttgagattagaattaaagcatcaatcttttcatgtcttcgcatttttttggctcgaatatcttgtcttgccttatattttaaaccattaataagaaaaatggctgtcagaaaggtgtcatctattatagccttgtgagaatggtattgaaattttgtgaacttagctttttaggtgaagaatcagtaacttctcttttctttttctctttttctgtttttatcttgcctcatctttgttttgaaggtgtaagagtttcttcaaggattgactttcattcgccaccaaaaaaaagatggattgactttcattatgtaattagattcagtaataaattattcacatttcattttaatatagaggtggcaagaagatttttctggccaatagtctaatggtcatgtaatgatagtcgatcatcaacataaaggagccttgtatacaccaaaaacatatacggtagcacttaaaataaggaagtgtaactaagggtgtcacatagttgtaattctcatctcccagtaacaaatgtatagttcattccatttgagcttgttaatggtttcttattaacttgatttgctttcatttcttatgtagacaatgatgataccttgaaactccaactcaaggatttgcatttagagttttcatggccaattggtaaaatcaaagcagcactgtctcagttagatcttcctaattcatcaacgccaacctcttgctcaattgaggccatgaaatcaatcgcagctctagttgaggaacaaaatatcccagaggcaaagatttttcttgcttctggagtatcagcttttctttggctgtatacgtctattcaagggtatgagtccataagtttaatttgtgttgttgaaaattttcttctggtttaaaatttgaaatgattttgtttttttatattgtgtcagatttaagcctgctacagtgattgttacttcagaacttcctcttggttcaggtttaggctcctctgctgcacttagtgttgcattagcagctgttttgcttgccttttcggacttagtaaacatagattttaaccaccaaggatggttaatgtatgcggatgaagaacttgaactactaaacaaatgggcttttgaaggtgaaaagatcatccatggaaggccatctggcattgacaatacagtgagcacttatggtatgtttatttctgagctgccccttctaaaaattgtgttgtttttgctccttctgtcacagtgttacatcgtgataggaatatgaatcacttatctcctaaatttgccatgattggtttacttgaaaaaacttaaaaatatagtctcatcaacgagtgacaggtaagaaaaccaagtatagctagcaagttaccggcagtttgaaacaagaataagaaagagaaccattttgttatttgttggatacaaaattcttccgtttgtatctgtcacatgcatgacaaattgacaattcatatggatgatcacagattcacaatatgatgccttgtgcaacaggtaatatgatccaattcaggtctggtaatttgattcgcatgaagtccaatttgccactcaaaatgctcatcactaacacaaaagttggaaggaacactaaggccctagtagctggtgtctcagagagagccttgagacacccagacgccatgaactttgtctttaatgctgtagattctattagcaaggaactatctgccattattcagtctcctattggtgacgacctgtctgtgacccaaaaggaggagaagatagaagaattgatggaaatgaaccaaggattactccaaagcatgggggtgagtcattcttcaatagaaactgttctacgaacaacattgaaatacaagttagcttccaagttgacaggagctggcggtggaggctgcgttttgacactactaccaaactgtatcctcttttctcttgtttacttggctgatagtatgttttcactgctcatagcagtatgttttgtttaccttgcttatagtatatttttacaactattttttttaatttttttttggatactaatggcttctttgataaaaattatacctagaacttatttgattaaaacaaagggctttgttgtagaaaacagaaaatgaaaagatttccatgcaaagcctacacagttttgatatgtatttcttcatatttcaatatcttgttcttgtttttcaccttaatccgttcatcagtgctatcaggaaaggttgttgacatagtgatgaatgagctcgagtcatgcggattccagtgcttcactgctggaattgggggtaacggtgttgagatttacgtgggtggttcatcctgatttcttaggtggagcgagttcaaagtttcaccatttactaataatttaaagctgcacaatttgctgctgtttatctctgctatctgagttgtatgtacattagtcactttgtactttcgttttgaatttactttaatcaagctcctttcttatggttccctggctatctgctttataaccaatttaaacaagtgttcaaagcttcgtgttttgtgattcattgtaagagcaaaaggatgaaaaagaagccataaagggatgattgcatgatgtgtactatgtttggttgatcagagtggcagtctcatcttgtgtgtccagatttgaaagatttgagtaaccgcaatcattactaatttttttatgaactttctaagcagaatttaagaatcaccttatcttcatttatttgttttttcatacaccactatatgtatatttacatatatttcacaggcaaggtttacaagctttttagagactcttgaagataagggcactcaggcacactcaccagcataagatagagactctcaaccattcattatagccctgcttgccataaatgcaaaccaaacaatggaaaagagaagaccactataaacatatttggcacacgcatttttagtcgtttaaatctctgtttatttactattagtctattactagtaattaactcaccattagggtggtggaggacttgaccggtcatataagaggagcaggggttacatgcaaggaacacatacgagggtgtaacctcaataggctggccggctcgcttcatgggcacttctgagccaacttagctgtctcattgttgctgaaagaagccagaaccagtggtgtccatcggtccaggagctaccccattaacttgaattcctctgtttaccagctggagagcaagtcctctagtgaacgccagaatggttcctttcgtggctgtgtggtccagtagctctgaatttcccaggtatgctattactgaggtcatattttttctttttttgatggaactactgtggtcgtgttgattatggcactcccttccttcatgtgcttcaaaagcaacaccaaccatagtaagcatatcatccacacctagtgcactatcctcttgagttaaatcatacttaaacaatgttaagttgtttaattgtttctgctaactgtttactcaatcaaatatgtgtcaattctttattgatgaaaccaataaatcattagctgctacctattaatgacaagactaattagaatttttatcctttaaaacttgacatgtgtcaaatcatgctcttaaacttttcaggtcgttaaatttttttctgaatttttgaaattgttgaatttgaaaacttttatcaaaattctatttaattttactaatacggtgattgtccatgtattaaattgtacttctaaatttttatatctatcaaattgtacccccgaacatgatatgtaccaaatcgtgtccttctgaattttaatccacttcagatttttgttagtaaaattagattgtttttaaatctaacaatctcaatagtttgagaagaagttttaactatctaaaaagttcgggagacaaaaatcttaattagcctaataacaaaaaaaaagtacataattaagacaaatgtaaatattaatggagcaaaatttcctaattatttatgtaaaacgagttcctaatcttgtttaggaggccatgagaaattattagtcctgaaaatcctctcaagtctttcattatcaatgtcatctagggtgctcatcctctgcttcacgttgaaccccagatcagctgcaaccgctttgattccttaagtattcttagtgtctttattttcatgacccttcacatatgtgaagttcacggttgccccttccttctacccagagtctccacctgtcaccaatgctatctttccccacatgaatattcatatgggtacttttaacttggtcccattaatatatctacacatatatgattaaaaagttgtattaacaaatgatttttttgagaaaaagttcaaaaaacttgttttcttttatttttgctggataaaaaatacttgcttggagtttattataggcctgattatgatggcatgagaactgagtgttaaagaattcaatttagggaatcaaatgttgagctgtccaatgtaagggacaaatgattgagggaagccttatgctgatttgcaatcattgctgcataacaaacttttcgttaggcattattattgtgtatattcctttccacgtgtaatggctgtattggtacattgtaccctctttgtatttccctttctctttaatgaaatgctcttcacctcagtcctttgagctaagttttccaatcaatattatttctctaaatcttcacttggtattagagccttttcaaggcttctgcaaatgtcgaccaaccaaagccagaccagtcaaactacaccagaaaatactggtcacagggaagctccatggcgcatgccagtccttcgatggctgctactcctcttaccccggcgactcccttcaataataccgtgagtcagccattcactatcaaacttgataggagcaatttttccttgtggaaaacgatgatctatactattgttcgaggacatcgattaaaagggtacctcaatggccagaagccgtgtccacctgagtatatctcagtggaaaaagttagtgagaatgaagatacagttatagagcttcaaccgaatccagctctcgaaacttggattgttcatgaccaactattaatgggttggttatatggatctatgaccaaagctattgcatttgaggttatgggatgtaaatccgcttctacactttggatagcacttgaagaactttatggagcacactcaagggctaacatgaatgacttgcgcactaaacttcagaccacgcgaaaaggagctcaatctatgacaaactacctgaaaatgaaaagaatgtggccgattctctagccttggctggagatccatatcctgagagacacttaatagctaatgttttgtttggtgttgatatggtctccattgtgctgttacttgaacatagatctgacttgtcttggaaggagttgcaaggttctttactcagctttgatagtaagcttgagagactaggagttgtctcaccaacaagaaaatctctgagcaatccatctgctaacatggctcagaaaccctctaactccaacaatcgtggaaacttttctggtagaggaagtggctacaacaataaaaacagtcaaggccatggtaactcctcaagaggtggcagcaatcgaaatcgaggaagaggcagatacagtaacaataactcaagaccaacatgtcaactttgtagaaaatttggtcactcaactgcgatttgttactacatgttcaatgacagttacatgggtcagccacctcagaatgacaatactcaataccaggacagaaatgctcatatgacagctcttgttgccactcctcaaacactaaatgatgattcttggtatgctggcaatggcgcaatcaatcatctcacctcaaaacttgacaaagttaacaacaaagctgagtatgatggtaaggaataaatggtcatacgtgatgggagtaaacttgagataaaaacatattggaattggtactatcaatactacctttgaacctcttgtattgaatgatttacttcatgttccttccattacaaaaaacttgattagtgtctcaagattaaccgtgacaatgatgtttcaattgagttttttcccgatttttgttgtgtgaaggacctaaccatagggaaggaggtgctacaaggaacacctaaagatggtctctaccaacttggctttactttagcaaggtctcatggtctcaaatactccacaaaactcttttctggtgtctctttaaagtcatgtcatcagtctagtctgtctaatgttgtttccctaaaagatacctgacataggcgctaaggtcatccttcttctaatgttttaagtcaagtcttaaagtcatccaatgtacctgttaatatcagtgaaactcacagtttttgtgatacttgctaatttggcaaagcacacttgctgccattttctagatcaactagttgtgcctctgatgttttagacttaattcatactgatttgtggggtgctgcccctgttgcttcacacactaattataggaactacatccattttttggatgattttagtcgatatacatggttgtttccacttaaacaaaagtctgattcct

SEQ ID NO: 184065 - DNA, 1599 bp, Cannabis indica
caagaaactagtgaccacaagagagggccacttcccttaacaaccagagtcactattattagacactgtaacccagcgagctagtttatcagcaagtacattctcagtacgaggaacataagacacaacacatccttaagaactttaacaaacaaatattttcctcgagtagaaatttgtgttgataacgagttataaaataatatagaatatataaaaaaataagagaaaagaaaatacgaagaaaataagagaataagagaataaaaaagaatgagaatttttactactttattttaacgaagtgaaccctatttatacaataatataaaacttgggaaatcaagtaattaagactacacaactaaatgattctccatgagcatccatgtatatatataaataattatttacagcataaaattaaatatctcatttcaatataaaattaaattaaataacttcaaagttaaaatattatccagcttatgcaattatttaactagttgcacaccacattaacaaagatacattattagacaaaaaatatgtgatagctacgacaactctcacctatacacatctagaaatatttctagattagcttcaacttggcaatgttcagaatatacagtaatattaactaaggaaagaaaaaacaaagaacactcaataggagagccattaattgaccatgagattcttttaccttcctgacattagatttacaagaccttgattttcatagaaagagccaacatcccaatcttcagtgtttgatgaaagtgtcattaaagcaacaacaatggatctcatacttgggcgcagttgtgggttttcatgagtgcacgctttagcaagctgggccatctgcagccaaatcaccaattaaaacaccataagctttttaacccacttgataatatgtttcagatgcctttcctattggaagaaaagaatattacctttcgaaccgagtcggccgggtaattctctccgagcctaggatcaattagcttgcggagttctttaaaatcgggctgattaagaacatcctcaaactgcagacaatggaaacaacacaataatttatatgctcattatcgacgacaccacggatgaatattatttattgtattgttcgacagagaagaccaaagacatgtagttaaaagagacaaaaagggaagttagggaaagaaagaaaaaataccaaaccaactagacccttcgattcagaacctaaaccgtctggcttcacaattgcttccttggcagaaattagttcataaataacaaccccaaaagcatatacatctaccttgggagatacatcgccatattgagcatatctgcactcatttataataccaattaatctctgtccataacatttaattttattccttgttgatacagaaataaaatatttgaagttatttttccattttgtcctagcatgggtgtacaaattcaaatgataaaccggttaagtctattcatccagatatttactgagcaagatgacttgagtgcatctaggaaaactaatgatagcttatttgagctaataataaggccttcaagcagctttgttgc

SEQ ID NO: 184066 - DNA, 5382 bp, Cannabis indica
acaagaactacacgatggttatgaaattggtgtactcaaattagaaatgggctttttttattaatttaatcaataaaaagaaaatttctctgaacaataataataaaaaaaaaaaaaaagaccaaattcaaattgccatataatagctcattcaatactctgcatatatcccatgtacgatacatcgaaattgaatgccagacattactttgcgaaaactctgtgcactgcttcaaagttaaaacgttaacaactaatgtatggtctccagtccaatccgtgcacctctttttttattattattattcaatttttttattcttttgcaagatctctcacgtgataaaataaataaaagaaaaggctagctccatatgagttaaactgttctcgcactgatcaccaactccaatacagatccacatccataaacattattccaacaatctcaactgacattggtaaagttcctcttcttctcaaccaacacaagactgagggggcttataaattctaacacctactcttcccaggttattgtctccaaaagacatggtaaaaagaccacttatttacattaaattttggaatcaggtgctatcaattttcacagaatatatttacgctaggaatatatatgaaaacagaaaattgtgaagcctttcatttactaaaatattctgtttcttttcaatctatagagagtggaagagggattagaaaaagaaaatcatcactaccttgacttccacacaagttttgtgcagctctttgttaaggtgagactcagataactaagtgacatgggcagatcatttgattgagaaatatctccattgcacgacctaaaactactgccaggatccagccccactggcaattgcacgggcctcggccagagaaagagccattgccagcatcatctgctcctcaaaactttcaggaacaatgggttcgggaacatttagaaggttttcctccatttgatctggtggtggtggtgcagatatagtgccggcatcttctgttgcgtcagagcttgcatagcttgttcctgcttcagccacctcagatgcatggtcaacattccaatctctgtcatcccttgtcaaaaccatcccatcattggaagatacatcagcggagctcactgctggcggataattcaaggcctctctacctaccctgctgtagaacctgctagcgcttggaaccatgctgaatgttgactcattaccttctggatgacttgaggactctccactcatttgctggcgctctgcaagagcagctatggcacaggcaagaccaccagatggtgatgaagatgatgatccagaaactgtagccatggctggtgagacatatcggtcttctgtgacataccgtccagaagaagcaacatcaccataacttggtgttttatttttaccagtgtcctgcaaatattattcatgtgcagcacaagggaattaatatcttaaacgttataccaacacaatatcaacagcctgaaaatgaaaagaaaccgtaagtttcagtctttcacggattagaacttccacctgaatggaaagccaaatcgcttcaatgaccattaaatcttcaagatccaggtcaaattcctcctccctgcaaattcaggattcaaaagtgacaaaaataaggacaaatgacgccatcaacaagtcattatggaccatctggaacagaagttgtacaaattgcagaaaatatccagacacaaacaagtgttacattatgtatttacatataaaatggcatatcaggttctctatgatgccaatttcatttttaacattgcactatcttaaacaggacagcaacattctggaatgtgacagactactacttaacaatgaaagaaaaaacaagtaaaaggcatctcaaaatcacgtacctatgaacccttgatggcaacggtggtctacacattgatgcagcgcacgagtcttgggaagaatcaatttcatctccttcaacagcagatgtagaagacgtcactgtcaatatagaacaaacaaatttttagcacatctgacaaatatgtaggatttgaaaacacaaagatgatagtcttaggaaaaaggtaccatttactgagttgtactcaacatcctcttgtgccacatttcggcttagaggatccaattcttgccttttctgcattctttcttcctcatcctgaagttcttgctgacgaatcctaatcttagcttctatcactcgctgttcttcctgcattaatttcagaagatttgaattacattatacaaatcagtaaagcaatctcacaattcaaacaaacaagagtatcagattatgacaaagtacttcttacaatttgctcaagacccttctcttcctttgttttcactcccctgtattccactgcataatttgacgttttgcaaaagggacatcttataaagttaagcgggacaaatatatagagaccaagcgaagtaaggagggaaatatcaaccaatctgtcgcttttaaaattaaacctttgaaatacatgtttttctttaaaataaaacaagaaccctgtccataataaacatcagttaaattactcttttttcccctcttttttgaatatatgtgctaaattatttgatttcaaaagagaagggagtaagaagttcctgcaatagtaaaaccccaaaccagcactaaaaacaaaataaaaaagtttgactagtctaacaagtcccaaatcctcaataaatcagaaaaggcaaagtttttgaactcctttaacactctaagccaaagggccatccaaaatttaatcctcatttatttattctattcagatatccccttccgaagatgctaactcttactaagtaaattactttatttttctcagccaaagggccatccaaaattttaaccctcatttatttattaatttaattcagatatcccccttcaaagatgctaactctttctaagtaaataatttaatttttctcaccccaaacggaaaaaaagaaggcccaacccaactttttaccaattacaaacgaaagacacgcagctaaaaagaaggatactgtgtaggacgagttgaattgggaaccttcatctgcagaaagcactctggggaaaagcacaaaaagagaaaaaggaaaaatgaatcaaattattgcattaaacatcgatatgcacttctgtaaggtataatgtcaataacttataccagtgcaaattccttttgtgcaacatcttgatctgttgaggcttggataatactaacacaagaggaaaaggaataaatagattgttagaggctatatatataaggttcaaatggcaacaacaacaaattgaaaaataaatttgaattgaaccgcacagctaaaggataaaataagtaatgttttagtcctttggaaaaacggatggtaaagtagttgtttttgttctttgggattaataagtattgtttttgttctttgggagaagggatggtaaagtggagagtgtgagcttcgacatgtgctaatgaacgaaaaaaagaaaataataagagggttgtaaaatagcaatcgtaccaggaagcaaattgggcattcctctagatcacaaaccaattcttcttcgccaggatagcagggagcaagcttagattcgagtatgagcttcctgagctttttatgatccacatctttatggtggtaaagaccctgaggctttgtgtatttctcatcaatcacttgtcttcttcttccaagcttattacccatcctatatgaccttactctttttcttcttcttcctttgttcttcaaattcgaaaatcaaattaacaacaacgaaaacagtacaacctaaatttcccccttaaatcaatctctataaatagcaatgcagttggatacactaaactaacaaacacacttgcacaatgttaaacaagcaacatcatatgatatattgacggagacactaaattttttagatagaaatcagacgatgccaaacaaggaagttccacttgatgtagacactaaattatgtccattgtctaacatatccgtgaattattacaaaagcaaatgttccatatattgttataacaggttatctaactaagacaatagaccattagtgtactcaaagacactagctttataaaaacagactagcaaatactacagctggaagaattcaggtgaaaaatatttatcttatcattttaaacatgaacgaaaaaataaaacgtaaataaatggttcaatccattccactgtttgtttctcggtagaaagacgaaggaaaatcaaattgcaagcacgtcaaaatgacacgatgtgttcctgaaattttttaaatagaatctaggaaataaattagaccaactaccctattgtatgtgactctgtgttacaaacttacaactcacactcacgagaccccatgtcctgaagctcaattcgcaacaattcttaccaaacataagtggcagaactatgcacgcaggaatgaaattcaaactttcctacaaagaaaaaaagaaatcccaaattcaccaaagtgccgttccaggaaaaaccacatcaacaagaattgaggcaaatgaacataaagctggcagaaatgcgggggcttctatcaagaattcgcggaaatgaaaatcaaccatgatatacaaagtcaaaaaccctaatttccatggtaagacgagtaatggttcagaattagaaacaattggcagccaaagacaatgccgaaatcatcaaaaaccgaagcacaaaaaaagcgtcagtttgaacctaaaatctaaaattcaccatcaacactcgactccaacgaagaaaattcaatcatccaaaaacaaaggaaagtttacgtagaaacaaacaaagcatagtttattattgaactttctttatcttcttatcacaaacaattaaaatcgtagaaatggaatgaaacaaataaataaatagaaaaagtgaccagaagtcgaagacaaaccttataatatgatcttagaacgaacgaaagagagaaagagagtaggaaagtcagatggagggaatgaaagggagaagaaagaagaccataagagctctctccctgtggaagagagaaatgtagagagagagagaaagaggaaagagattgtgtctggttatataatgttttgtttatccttatgtatattattactattattattatgttttatttttgtctatttcggtctttcggtacggaaacttttggtaagagtagaggggaaattcaaagaatggaagaaggaaggaagggtggagtagagtagtagagaggaagaatatcatcaaagctgaaaggaggtagccgacccgacccccgccccga

SEQ ID NO: 184067 - DNA, 1850 bp, Cannabis indica
tcagtcctgtagctcggtttgttgtctgttaatatcggttactgacagttagtttttgtccccttttcctctaactgttttaactgattctttaaccgattctttagcatcgttttagttaagtttgtttgtaatgtcacctggagttagttaagttggtttggatgatgttagtaatgctatgtagtataaatactctgttcccttctgtaattttattcattcagttctaataaaatcttttcattctttctcaattccgcaataacttgaagaggtcatatggctagttttaggcttgggttggatgaatcctaagcatggagtaaactgcctatacccaaggccttctttgctattatttatgtagtataatatttgttatcgactttaacttcaggggtgtgtgcctcaatatgtcagtctattggccaccttaccgtttgttcccggaaatgatttgtttttacttatccatgagcgtgaaactttgaactttcccttagaaaaaacaaacaaacaaataaataaatttcaatgacatttttatgacattttttcctgaaagttattggtttttttttgaaagagagaaaagaaaagttgaaaagtgggctccgttcaaataaaaatcaagcacgatttttaaaaatgtcgcctgtcgtccacagtactatatgttctttaaacaataaacagttaatagttattagttttcataacccattcagaatccattgttgagagttgagactatgaccatctatgcccgtttcatgattttcttttggctagtttgctgtctgaagaagatcacagaagcataaagcatacagtttttgccaaaaatctcaaaccgtaaatatgaaggtcaacaatttcgtgctgctcttcattttcgcaatgagtcactttgggttgcccatgcgttttgctcaggcaaaggttccccaacaagaaggtgagggataattttatgtctagattggttagtacttaagtattctctgtcggtgggatagagtgggaaagaaatgaagtgaaagctttgaacttgggtcatgggtgtcttgttcagagagagaaacaccagagttgttaatatgagtcaagaattcttttcccccttctactttcgaaatgggaaagttattgtactttggtttcaaaactgtgatgggtttatgtcagatatttaacaacgctatttactactttgagggattttatcattttacttatctttcttcagtaaccatttttggattttttgaatgaactctggcgttattgggtgctttgtagcaacttgctatagactcctaatagtaatttttatcatattagaagtaactcttattattattattattttaaaaaagaaaagaagaaagaagtaactattatctgtaaaaggaaaaggcagtgaaaaactaaagctataatggatttgttttgaaagggcttccttgatccagttcttcacggactttattggttaaactgctccaagtggaagtggttctctccagtctcttgaatttttggtgtttactttggcaatgaccaaacatttttctctcttaaccagctatgtttatgtgtgtacggttttagcctttaggacctttgatttaacctctaatatgaaattgtattctactatctcttaatgatgagcaacatgttaattggatttattctcttatgcgttgaaggtaaactgtttgatctgttggaatattttattgagtattcattttttgtaattattgttatgcacagttgatgctcttgaagaaatagcaagtacaatgggtgcaaagtattggaagtttaatgctgattct

SEQ ID NO: 184068 - DNA, 6501 bp, Cannabis indica
agatctttgggccttcctataccttgactttcaatggtgacaaacattacatacatttcatggatgctactcaaggttcacttggctttatcttattaaagtaaatccgatgactctaaaaaatgttcaaaactttaaaattaaagctaaacttcagttaggggctaaaatcaaggttcttcaaactcacttagagtgagtataaatcctttactaaatatctgaatcaattaggcatcattcataaacacccatgtcccactacacatgaacagaatggccttactgagagaaaatatagacatattgtagaaaacaacctaacccatttagcaaaagcatttatgcctcttaagttttaggatgaagcctatagaacaatcatgtacattcataataggcttcccaaacatgttcttaagaacaaatcacctactggggttctattcaatactcaacatgactacaccaaccttaaaacattttggtgcacttccttccctaatattagaccctataataaacactaattagagtttagatttatcccttgcaccttccttgggtaaaacacaagtcacaaagggtataaatgtcttgatcccacatgtagagtttatatttttagggatgttatttttgatgaacacacctttccttattctaagtctatctccaaatccaacactcctactatttagtcacaatgctttacctttggccataatcctatacttaaaaattcccctttaatagcaacaagttctactctgggtatgtgtttcctaaagacttgtcctcttctcagtcaagtcctccccttttaagacattcacctgaacctctcatatcccatgcacaagttgttactcattcaggtcatgctatatctacttcaaatactttgataatattctgtcacaagatctcaccagcactcctagatctgtttctgctcaaagacctgcacttcttgagtcttttgttgagcccgctcttgagcatgctgttgagaggtcaatcactgttgagccttttattcaaagagatgttgttattgagaatagttctgatcctattcaaggtgctacatctacttctgagttagtttcatcatggccaaacccggtgctcctccaagcttctcctccagagttctccctgcaacattggcatcaccaatagaaaatcagaaaatgaaaactgattctaagtctaagatttataaaccttagaattatatggctacaagagagcttgctactgtcaaagaagccgtgtaataggaacactggaacaatgccatgtctgatgagattctggctcttataagaaatggcccctttaccttactacctctaccagaagggagaacacctgttgagtgtaaatgggtgtatagaattaaggaaaaccctgacaacaccattaataagtataaagcttgacttgttgctaaaggattttaccaacaactaggttttgattttacagaaatcttcaactcctgttgtgaaaccagtaaaaattagagttgcagttgctttgtcaagaaattggatagtgagacaactaaatgtgaataatatttttgtaaatagagatttgcaagaagaagtgtacatgacacaactacttggctttgaggtaacatatcatcctaatctagtctgcgaacaggctcccaaaacctggtttgaaaaactttaacagtgcttactatatctttggtttgtataaccaattctgttaagctcatgacgaccttattgagaaccattttgtataaatagtcactcatgtgacaatgcaatataaaatctttcattctctttactaatctttccctgtttttctatatatatcagtttcttattatgcaaacatgtcaaagaaacttaataattgtctcgagtaaaatgtttatggcagctgaaactattaatcacaaaacttacaacgtattgtcactaaatatttttctttgcaaaatatttgttgcaaaaaaatcaaaattagtgataaaatgtatttaaatactatttttcagccacaaaaattttttgttcagacaaaaagtatgacttagtcaaaaaaaatatgtaatgagtaaaagattatcaccaaaacatggttgttctgttttgcttttttagtaatgatgattatttccttgttctttccatcaatatttgtaaatacatatatttttattcaagtatatgtaaatctaaacaatttccttgttttgggttttacattacagtgatgagtgttaaaaatcctttggatgctttggctgctcttcgtacacaaaaagggttaattgatttagtagttacagatcttcatatgccatacatgaatgggtttcaattgcaagaacttattgagaaagagtttcagcttcctgtcattagtaagtaccacctatgcatatgtaaatacatataatatatatatatggactaattaatattggaacatttttttcttaatttttttttattatattgcagtgatgtcagtggatgataaagacaccgtattactaaaaagtgcacaaagtggagttgttttttttcatttcgaaacctgtgagcctgaatgatttgaagtatgtttggcaacatgtaatcaaatataagagaggaaaatcagttgtgactaaacactcaaagtacaacagtaatcatcatgatgatgttgtcacaaataatcaagaacaagttagtgacattttgaatgatgtgggagagtcaaggaaagatgagaacataccttctgatccaaataataagatcatcaataatcagaatataattgatgaagatgaagatggtgatgatgatatggaaagttatagtaaaaacaaaaataacacatcatcaggtttgctagattatgatcatgaaacggacaatcaagttaatgtcatcaaaagcaagggtcataaaaagaagaaagtagtttggactaattcacttcacaatagctttcttcttgccattggacaccttggcttggaaagtaagtgattctctatcatgtttagatataatttttctttttttttaactatgaataatatattcaaaatcattaattgttgatatgtgtacacaattttttttctttcaaccagaggctgtgcctaagaaaattcttgagttcatgaatatccctggcttgactagggaaaatgtagctagtcatctacaggtaaattaatttgctcacaagtttataatatacttattctatttaaatattgatgttagttaataacttcaaggcgtgaaacaagtttattataaggttaataaacatatatactaattattagtgtctagttagttatatacattttagaattagtaaatgacaactctgtatattttaataatatgttggcagaagtatcgacttttcttgaagaaagtatctgaaaaaggttcattgaatgagacgaagacaaatatgttggcaagtagaatgtgtagatcaacctttgctatgggatatcaacaagagcttttgttaaacaatcatcatcaaatcccattctcctcattgagccaattctacagtacacacaataattacaacatcaacaatagtaattacaataatcatcatatttggccttactcatcttcatcatcaccaccttggagtacaactagtttgcctaacccaattgatttttctgaaacaaactattgtatggccaccaatccatatgacattgtgaataataattgtaattattccaatggattcagtaatgaggactcatcttctttcaatggaatagttcaaaaccgtcttgattacaattccagaactagttgcatgagaggacatttgttaagttcaaccaatgatgctctatatcacaattatatcaatggcaagaataggtgtgtccctaatagcttgggtggaatatacataccccatattaagaacaatgaaaaccagatcatgatcgatgggggaggtggacaacaatccattgaattcccaaattgtagcgatgaactaatgaaaaacaatattggagtattacttcccaatgagaatcccatgaatgagatgagtaataatatgactaatttagttgtaccatctactcaatatggtttggtagtagtagtgaaataaaccattcacttgtacaaccttctagcaatggtaattacgatctacaccaacaaagtgcttctagttctaactatgatcagccttcttctgtggtagagccgatgcaaccttcgttgcaacaacattgttatgatgtgttaccgaattcggatgaacaatatagcaatgcaattggggatgatgactctaataatcttagtagtgtcataaacaatgagagcacttttactgcttctttagccggtgaactgcctgttcccaacgatgtacttgatgatattattgatggtgatgactctctagaccaatttattgatgaactttttcctcttgattttcaggtaatatatattattcaactctactatctttttaaataatgcataatagagcaatatatatttatttatatatatgtacaaataatatttataggcttcatttttaatttatatctccctgttattaggacattgatgtaatgaatccttcactagaaaacaaagacaacaattgcctgaaccaaaacccaggtgttgatcaattgtctggaaacattgcaacgccatatgttgtccaagaaagcgaagtacctgctattgatactaatggacattcctttggtcaggcatgtatacgtactactttaatccatatcttatttttcttctttagtgtataattaatatttataaaatctatcattgaattttccaattatatatgtaactattaaaacccttttcatatatataacataattattcactttttaaatgtgtgtgcttgcagcaacaaggaatggaagaatttcttaactccactgctactgctgaacaattcattaattttcccacacacaagctcaatgaggttgaatttgaccaattagtaacttttagtaaattttcaataaaattagtttataaatagatattatgaataagctttatatataactaacaaatgtttttttttctcagatggattgggatgagttcttggataacatgttggataataaatatcctggaccattggagtgattagtgaagattgaaatctaattcctccctttaggctcaaataatgatatgtaccaatcatatatgtaaaaactaagtacgtacatgcatgttctagtttgttcgttaaaccattaaagatgaattggagagtttggaattttcaacttttatttttgaatgcctaaacaatttgtttaaaagttgcaaaataagataagagacaattgtttacctattgtggccattagtgactatcttttatctattaaactagaaaattaagccgcgtttagtgtggtgttattcaacttttataattattcttttatttatatatatattttttatacttattaattctttggtttaatctaatgtgtgtattacaaacaaagcaatagtattgaaattagaaaattttatttttaagatatatttagaaatgtagtgattttgtaacaaattaatatcaaaaactgtgaaactaaaaaaattgcaagtgtttttctaataaaataaataaaaaattaacatttctaaatttaataaaataggattgagattgatgatgtagttatttttaaaagattgtttagacattttatttttttaataaaaagaaaaaaatttaactaatattatgaaagtttttttacattttgttttatggtgtccgtagaatgtcatctccccaaaagtgaatttggcatgataattaaactaaaaaatgagagattatataaaaatattagtgatagaatatttctatatgaaatatttaattaagaggattaatattaataaattatgtaaatgtaaaatttataccttaataaattgtaatgatgaaaagggatgtcatgatgtatatgtttaattatttccataatgaaatttttatttgtcttactattttgcaacaattaaaatgacaagtaccgtatgaagttagttgtgcgatctcgcgatctttaaaatcatatcgtgtctcgtgcgatcgttataatcaaatgaaaataaaatttaattaatgatttttgttaagaatacagttcggtcattagctataaaacctgagttcttggacagaactctcacacaccagtaaaactagaaaactgagtatgagagaaataaaaaatgtattcgaattgtattgatgaaattgtgttgaattacactatatacatatgccttatataggactagattaacataactagaatggactaagagccttatatagttgaccttagtttgttacaaagtacactatgctaactaatcttaagacattagacagtta

SEQ ID NO: 184069 - DNA, 2296 bp, Cannabis indica
tgttgggtttctgtttttctactgaaaagcttaaacttttctgtaaaaatgaaaacttttttattaaaattgtttcttcatggtgtgtgtttcatgaaagttggattcttttgttagattcatgactaaagtttgtatctttaaccaaaaatgcagggattggattcaaaagcgtcttccttgtgagtccacagccgcatgtatttagtaatggctaccaagttagattcagggaagagccaaacccagattgtgatattgggtacatagttcctgaatgggtcagcaaaaaaccttatctttctgatgttgctgatatatatggttcagacaaagagttgcccaagaccatatttatacttccattgaagccagagaaggtggaagctgttaaaacacagctctcagagctacacccagagattctgttgttcttatcaaaggttaagaggctctatgtccgtgaggatgaccgtgattcagcaaaaaatgacaatgtctcaattgtttctatagctagtgagactagttatgtggagttgagtagtgaaggagttgattctcgtgttgttcaactttcagtcaaagagaaaacttgtgttgatgaggagacttgcagctatttcatgtggagacaggtgtttccagtcaagcctgagaatagagtcaattcaaggttagatgtggagaagtggattataactcttgctttcccatttgggaatagattgagatcaagaggtatttcttctgttggtgtctttgcattcttgcctacagctatggttacaaattttccttttgttattcaagctgattttatacttgcttcatcaagggaatccatacttttggacaatttatggaacttggggattttagattgtgtcccatcagcatttgtgaaagcttttcagacttgtgtgaggaaggattgtctgttttcaatggctcaagtgtatgagtttttacctgcttgtgcttcatcatatcctgagcttaacagaataagggatgccattaaaaaccagatagcgaatttagcaattgtgccatatgagttgtttgatggtgaagaacatttcgctaagcctaaagaggttgttagaattctatccacatttcgccaactcttgtctaaatgcaagaaggaaggagcttccttgcatggtttacgtagattgaacaaggttttgcacccgtccttagacctcgcgaaattcacactagttcttaattttcttggagtggcatatgttgatcgaagtgttgattggtatgtgaaatgcatacaatcttgtaatctagttactcaacactccatagaggtttacatggagctactgtgttttattgctgagaatgaaaaaactgtgtctagaacttactttcggtgtttgccactttttaaattcattaaccgagaagggaatgtggaattgtgttccatttcccaaaccatgaaagaagaagttacaattaggtatgttctagacttgaatatacattcttggttaagtaagtgcagcatagagtttggttgttttaacaatgtgtatttcttgcttgacgacattcagaagtctcttgtaacacaatgtaaatcttcaaaaatctggtattggctatcgaacagtgcaaaagtaagatcattcttggcctatgattatgcttacatgcttatcaatggtgtacccgaaaatagaaaagatctcacaagacttgttgctcatttcctttatcaagctcataagaaacatttcattggtgagagtaggatttatgatctctgtactaatgttcccatcatcgacggttgtgatcgtgtacatgttaggaaggagaagagtgtaactcttgcacctgtgtccggaagcaaatgggccaagttatttggtccttctaatccatttctaaaccagaaatatattgatgttggaaatgaatatgtttggaggagttcatttttgggagaaactacttctgagaaagtcattctagactttatttgcaagtacaccaaatctatggatttacccgagctttctcctccaaacttggagttgaaagtagctttttctccactgtcaatgaaacaagcgtttatgcttcttgattggataaggtttcttcagactagggggcatgtctacctgaaagattccaggcaagcattctagatggaaaatggttgtaggacttacacgggttataaactctccaaggcagtccatcttcctgatgaacaggcaaatcaatgttgatatggtgaagcatgttctcaaggatatatcag

SEQ ID NO: 184070 - DNA, 4224 bp, Cannabis indica
tttttatctcgtaatttgctttctaatattttgatctaagactaatattattatgaaacctttggcatcttaaagagcaaaatcaaataaatacaaaacaaaacaaaagcaattgtaataatcaaccgtaaagcaaattatgtaagattatcaacaatcagaggccattctttcttgagctatacctacattacaaaattgttcttttttttttctttactacgacagttatgctaagaggccgagctagattgatcacttgcaattgcacaaatggggcaaggtgagaaaaacaagctaattggcttcgtgtttcacactcaagcacaacgctccaacactgaggctgcaactcttttcaatgattccgacgccttaagcagatctgattctgaatgcccagcagagacgaacaatctgattccagcaggcaatggacatttatctagtgttgatttcttggaggtcaccacaagtattgactcttccttcaatacctgtaaggaagaatccggggaattaggaacagtggtaaaatcgacctattcagattaggatgaaacaattaaccaattacttacactgtcagcaatttcttgaaggagatccctgtcggcttttgatgagcccatcgacttcttcaatgttagaaaaacaataggtgaatcaggattgcttgctaccgaaagtcctggtatgtcagataatcctgaaatttcaaacatgttaaaaatttgcggtggtccagaccagtctatccaccaagtttcacaatcttaagactaccaggtaactcctctagctgactcaaagtaactgcactatagataagagcacagtgacggaagaaatctcacatgtacatattatagaactctagaatactatctcataacaacacacggatgacagaaatcccgcatgtatgggtgggttatgtgctatcatcagatagttgtgtctcacagttattcattggagtggatactgaagctaaatctaacacattctctttaacaccacttgataaattggtagcgagacccgaactaacctttccacagtattgcaatattttccttcagttttgttatgagatcaggcttttcctccaggacatcaatggcggtaatggcagcactggcaagatatgggggcaatgaagcagaaaatacatatccagaactactcaatcgctgtcaagggttagcatgcactataggatgtgagtaccttgaaattgatgtgtatacagtttatgatcaagaatatgtataagcattactaaaataaagaacattgtaagtttctttacttatttaatttctaataaacacaacactcgatagaaggccttctggataaagtcttgccaccatacctggtgatcaatgaccctagcacttccagtgcaaaatcctccttctgtagctaatgcatgtcccattgcagcagtaattatatctattttctcaacctgtaccaccagtccaacatatgtattacacctatattttaaatctattgaaattctaatattattttcaattttctatttaagaaaaacaattcatgaaagagaaatatgaaatgaaaaataccggaactccaaagtgttcagtcagacctcttccgcttttcccaagtacaccaaacgagttgctttcatccaataaaacacgaaatcgatacttctccttcagtctaataatctcatctaaaggggctatttgcccagaattctggaaatttagaaacaaactatcaataccttggccagagctgttacatatttatatttacagacatgtcaaaatgctgcctcctacatgtcatcaataacctaggaaaacttaaatggatattgaaaaatcaatgtcgctgcatttttttaaaaaaagaactttgatgtaccccaatatagaaattgggatcgaaatggtaaactcaaaaccaatactatagaaaaccaaagagaaatagaaaagcaactgagtattcaaaaagactcagcactctcccaagagtcaagacaacttataatataataattatcatcatgcttttctcattcctctcattcatttttatattatcatatttctgctcattcccattccgaactacgatgacccacatactcccactacttatatacctatcaatataactgggtctgacaaacattttagcatattaacagagtaaaactcaatatgcataaaagacaatagacacctggtaaactgattcaaccacaatgtagcgccgcaattttttagcacgcttatttccagcagtgaccttctccaaggtgtttcttaaagattccatatcattatgcttgaaaggaacaatagtgcttctcgacagatataaaccattttgtattccccaatgaacaccctcatctctagaaaaggaaatgaaaaatggtgtcatacaaggagctcataacagtaactcgacgctaaacaagttcaataacattcattcaaattcaaaagagtaggcatactcacacaacaattatatctccttttttggcaaaagctggtatagcactaaacatagtggaaagtccataggaataaagaatggagtctgtagtacccaaaaacttagcgattcttccttcacaatcgagatggacatctaattcaaaaggacaaacttataagacttttgaaaaaaaatataaatatagatataaaatctactgcaattctttgaagttaattcatttgtaccaattgttccataaaacccacgaggaccgcaggaaccgactccatatttttccaatgcagaggtacatgattcctgatataaagcactgttagaaacgctccttctaagaaaactgcaaggacaaaattcaaaacaatagaaagcaaagattacaaagatagtgtttctattttggtccttacaattaacttctcatgtcctattaatccgagataatttgccgaagcaaagttcacaacttctttgccattgacagttgtatgtggtcctgcagcactgaataaagcttaaattgtaaggaaaatgtttaaattgtttgaaattactcccagccataacatcattcacacataacaaatagtagtaaccacattaagagcatagtatggaacacaagatactagaagcaattcctgtgtattcggaggagagaacaaggaaactattgaacaatgccaatgtacaaggaaattaaaaaataaaaacgaccatgagaagaaatcataatagaaaagggtcaagcccaatgaagagatgaactaacttcacctttccaacaccgggggttccaacttcatttcttctgtgataggaggaataagaggttctggaacccattcctcacataactcatctatttcctacatagagattcattcactaaacaagtaagaataaatctcatatcaaacccttaaatagaactattcaaagtaaacatctaacaagatacatggataaatagcttgattcaacataggaatatgaattttagaacatctaccttatctgtcaatggtcgtttaggaggcttataacttttctgggataacaagaaaaggatcaccacgaacaaaagaccttccacaaaataatgtcctgaaaacaaacagaaaataacataagatcaaaatattggtaaaattaaattacccaatatatgaataggaaaaaatgtacagaatctgaattggagaaggtggagtaccgccgatatgaactccgtaaacaacagctccagcagaaggagcgtccaaagccagtgtcacccattctaaagtactttttaccattttcaatccaaaagattccattttttgtatctcaatttggtttgtagagaaatttgtcaaacctaatcacacgaaattaaaaatatattgatagagagaataatattgaaaattaaattgaagattgattaaagaaaatgaatttgagatttgggttggaaatgaaatgagggtaccttaggaaaaggtaaatagtatggatctgaagaggtggtctaatattcttgtcatacgaggatgatgagatcaatgatgctcacacatggagagcaaatcaaaaccatagttttattctttttattttcttctttaaatatagtttgttgttttccaaaggttttaacagatttcaaacatacatattacaaacaaacaacatacttgtcaatatttcaatatc

SEQ ID NO: 184071 - DNA, 2229 bp, Cannabis indica
aaagaacgaaagaaagagagtgataatacttatagataagaagtcttacgatgtgtccttccaaatgcagcaagaggaagatactcaggatcatttgggtcaggagaaaaaccagaacgagcaaagaaaacatgaacatacacagttgcattgttcttcacagcctaaaaaaacaatgatataaattatttacaacaaccataacaaactgaaattggatttcaaactttgatcaaacaattcaaacacatacctcagatggataatacttcaaagaaagagttctactactctcaggtccccaaacagcataaggaatattattttcatgccaaagaagggcactttcattaccaaaatcattaaatttctccttctcagataaatacacccacatatcctaatcgatccaaaaaaaaaaaaaacaaattcaaattcatgaccaacagtgaaatcaaagcaaaatccaataattaacaatacaaaccaaaggttcggccttgtggaaaagattggagatgagaactggaggctctgaacctgggccagtggggcgtttggaagtgaagaactttgaagcgaagtaccagaagactgcaattcgaatgataccggtgattgtttggccaaatccagcggctggttgttgttgttgctgtctttgttgtggagctccgcctgctactactgcagcggcggctccagctccggctccggctgctggcggcgccatttccatggtcgagggttgaattttctcagattgggttcggatctgagttcaaatccaacaccgatcgagagagaagaattcaaggtcagatattttgctttatatatatttatatataattattaatttttatttaattattttaaagttattctttgcaaacatcgaatagtatcgaacactatcaatctcatagtactagtggcctgctcctctctctctctctctccttctttcttttttacaaatatcttatcaaaatttgggtagtgttttgcttgctcaaaggagtatatggtttcacaaaatatatttttcggttagacgatgagctattaaagtaaggttgttacgttttttttctttaaagaagttaggttcttacattatttatggatatttacatcataaatttataagtgattctaatcattgcgttaaaaaaataaaataatttgagtaataactaaaagtaatattttactactaagtgtttggtatagttggttagatgattttacgctaatggcgcgtttattaaactgtaattaaaatcagaataattaatgagagaaatgaatcgatttaaataaaaaataatcagaaataatattttattataaattgtccgaaaaaaaatccagaattatattattttatttacataactaggaaaggtaatcagaatgctttaatttgacaaaattgacattgttataacatgctttatagatttttaaagggtatatttatctttttcatttttaattaagggtaaatatcattttggattctgtgtgttgcaaaagttaccaattggacccctgttttgttaaatgataaaatgaatcttgtatttttcaaaatagtacaaataagaccctaaactgattttttgtattaagcgattaattatttagctcattttttaattctaattaaattacatgatattattttaactgattacgataaaattacatgatttattaaaaataaattactactagtaatgtgtcaatttaaatgttagatctcatattattcaaattttattggataaaaaacaatgactttttctaactagtatgttcaccacttgaggctagctcaagtggccataaaagggtgcgtgtgtgttgaaggtcctaagttcgagtcctaaattatgcatggttgtaatatataaacgcttaaataaaaaaaaaatatctagctagtatgtttagcctaagtttttttccattattaggtacaagaatggtagaggatatacaatatatgagaaataatatatacttttattgattttatttttgaccaacaatactagtctttcaagcgattaagaataattagattcaaatagaaaatgaataatataaaacaaaataagaacacaaaattgttataaaaattcgaccctttaatatcgataataacctacctttataactatattgacttgtgagatgagaagaaaaaaaaaaaaaaaa

SEQ ID NO: 184072 - DNA, 2097 bp, Cannabis indica
aatttcctcgaattttatctgtaaattaatgtccaacaccatacccccattaatctctgcaaatttcaccaccggagtcgaccattttccctcatttgaaaaacccacaagcttcttccgcggaaacccatcggatatatccacactaatgtggaaaaactatgccaagctagtttttaggagaaatcacaattctcgtctccgttctcagtcttcttctcattctctttgttctctgggaaagtcacaggaacctaattacaccgataaattcaagtttcggccctttgagctgattcccacttcgagtcatgtgccttgcggaatgggttttggtcgaaaagggaaaactttgttgggagacgatcctatgggaagattctgttttgattatttgagaaaccctactgggtttagtcccaaagggtatgcgagtgtggcggaggcggtttcttctacggacattgaagatgacacctcggccgatgacgaattttacgagctgttgcaagaaatgggcaaagaggagaagaggatggtcggacataggcggcggagaaggcagaggattgtaaccggaatggcgcttagaaggtatgatgctcttaagaaaaggcaagtgaagattgagacagaagcatgggaacaggcggctatggagtacaaggagcttttgatggacatgtgtaagcaaaagctggcaccaaatttgccatacatgaaatctttgttccttggttggttcgagcctttcagcaatgccatagagaaggaacacgaagcatgccgactgggaaagaacaagactgcttatgcaccatattttcatcagttaccggcagaaatgatggcagttataacaatgcataagttgatagggttgttgatgactggatcagaacatggccatgccagggttgttaaggctgcgtgcgtcattggtgaggctattgagcaggaggtttgaactagtttttctctttttttctctgttggtgtcctgtttttgaaccttactacttgattaactaatcaatgcttaagtttcttatgccattgccattctgggcagcagtattttgtcatatttttcttgctggaacataactatttcatggtagttcctacacgataaatacattctctcccttgttggtttattttaataacagtatgcttatggtttaattcaattaaacttgttttggtctttgtttcatagtttgttttgtttgacttggatgtagaattaagagaatgtgaggcgcttctaaatgtcattttctctgtttctaagattggaaactatgttatagacttactgttgtttctaacttttcacagagtatacccttaggcttgttttcttacactttgcacactacaatgttgtaatcttgctgccctttccttctctttgttctaagagcaattcacgaatgtgtcaggtcaaaatccacagattcttggagaaaagagacaagaaaaaggtgaaactccaagaaagtgaaggggagtctgactctaaggaagaagataagctaaagaaaaaagtcaccaatttgatgaaaaagcagaaattgcgagcactgagacaggtggtgaatggacaagatgcttcaaaaccctggggatatgcaatcaaggctaaggtatgtgttcagttaacactttttggtgaaaagttaattgtttctggtttaaaagcagtttataagctttttcaaatgttgatctttctctttgctagagagttccacgttgaaagtgtgtgggaatgtatatcatttataagaacataattatttattccactaatcaccaatttattttgaaatggatttcccgatatttcttaacatacaacctatttttcactttctaaaccacattttcacattctaacatgatatgacgagccaaagaaacttttaacaagaaattgatccaaatacaaattggttaaaaaaggacagccaaaagaatcacttgtaattcggtaatagtgagccaaattaaccacttacgatcgagtcattcaagattggtgaacaaaaatagttaccatcttgagtggggatgttagagagtcccaca

SEQ ID NO: 184073 - DNA, 2810 bp, Cannabis indica
aaaaattatgcgtgtatatatttttgtcaccctaagtaatgtgattgacatttcaaaattcaattgttttctttaggttcttgatgtcaggaatgggcaagctcaagcaatacttcgagaattaaaccgtggatctagttttcgtcggggacagtactcctcagcaattcggtttcatacccaactcttgtctcttatacaagaggattcaagcgaagagtacaaatctttttcctatgttttcattttatttgttatttttgtacaaggttacatatattttacaaggtttgattgtgaagtaatggatctaattcaaacctgtagtgaaagagtttattgttttgtttttttttttcccaaaaaattctttgcagcagagtagtttaatgatatagttcattttggcatatgtttctgtttaggccctcatccataagcgacaataattcttggcttcaggatttggagaattgcatctctgaatctgaatgtgtatcaaaggaactgtcaacttggtttggcaaaggggtaaagggatatggtagtttggcgttctcaaaaaaactgagaatcttaaattttctttgtgatgaggttctctgcaccgcgtaagtttatgacctttaccggataattaattttgttactgcattttttatatctatattttaaattctgatgcccattttacttactagtacaaattttcccagtttttggtatgattgaatttttatccgttctttcagaaaattgagaagttacattgatgatgaaaattcaaagcttcttgagaaagagaaggagtcgaaggaaaaggttgctgcagcgaagagtaaggtaatatgcaaactaaaaggaagaatcttctgagtttttaggtcactactataataatcagtgtaaaaaatgaacaaggaaattttacaatttctcatttattcatatattttttacactatttcactttcattttttatgggcctctaatactttatttagtaaatgaaaaaggaaactcgatcccttgcaaatgtttccaaaatagaaatcaaagtagttgtaattatagtttttcattttaaatttgcttataaattgtaatgattttacttgcaggagaaactcctcaagcagaagatgcaggatgagcttgtagcagctattgttgcgaaaaatggcattccgctctcagtttcagagcatgaggctattgcttcacagattaaaagagatgtggcagaagctcatgctgaaatactcaaggcaactgacaatgcaactaagagtatgtttttaacaaaaatgatttggctaagaaaatcagccctagaggataaatattatttgattaaaatctcatttgtttgatttaattatcagagtccgtcttataaatttacttgcatgatgatcctttaataatttataggtagaagaaaatgtgatgctgttcgaacagaacctaaattttcggatggtgatggtcatgttttctggaaacttagatgctgtggtggtgaaatagatatgttacaacaaggtaagtttatcttttgagcatgcttcttttgaaaatttgttcaatgactaacttccaaattataattaatttttctctgatatagatatgggagcatctgttgtagactcatcagctgaaaaatggtttgcgtattgttctgacatgaaagaagaaattcagaaatacttttcctttaaaaggtggacacactggatatgcttaccaaaagaaaagcaaaataattattgtttgttgcagttgttgataaatgatttcagacatgctcacaagcatcttacgtttgatttgcagggcaaagtgcattaggaatcaaagtttcactcgctatctaactaatcaaggtaagacaagatataagattatatcaaaatttcacgtcttttatatttgacgccaagtggaaatcttaaggatagtttagtatggaaattaatgcaaaagggtaggctgtttctttactaatgtgtggttttacttggaattcattcgagttagggttgcttcgagatgggtctaaaaatacaaaagcctaatttgaactgaaagaattgataaaatattaattttgtttactttcttgacaataaatttcacactgagttaaactaatatgttgttgatatgcaatgcagctgattttagaaactcagaaacagaaatttccgtctaacttgcttgaaaggcacaattgaacttcggtcttcatcgctattcacgtatgtaaatgcaaaagtgaaactctctctttttcctagagtacatttttcttttgttacagcattgattggatagagcagaaggaagtaagccatttaaagtctaggcaacagaaggaactagacgttgattaaatttgtaatttgattgcaatgctgtacagtgtactccctattcattttcaattgctctttcttttgatgcattacatcatgtactacaggctattttgctatgcaaacagtaaaccttgttggttctgatttctttgtaggaaaatcttgttggctgttttgttattttgaaagatcaggttcttttgtttaaaatggatggatttattgcaccggaccaaacctgacaacttgaaatcacatggtggaggggtcctttcttttttaaaaaaatttaatagcagtatttgttatagttttaagaatatttttataaattttttgaatttttttaaatagtttactgtattgaagttcttaatattttaatttatctacctatgttcataaagtttaaaacctatgttcat

SEQ ID NO: 184074 - DNA, 1813 bp, Cannabis indica
atactctccatccccattgaaacagtctcccaagcctcgcgaggcttgcctgcaatcccacagtcctacgttgctcgggaggctgctcgtgtttgggatgaataacaacaagttacaagaagttatcatttagggttcaatcaagtccatgaaccaagaatcatgtttcctcttcaatcaccttctttaaaattctaagagtttaaatcaagctctccattactttcaaataataaaaataaaaacctgtaatttattgaataaatgaaaagactacaaaaaaaaatagcaactgaatgacaagattcctaggtgaatgttatattgaatttacaatgaacatttctctttccctatataaataactccattagtgatggtgtaataattttcaaatttgaatgacccaatgaatttacttgcaccagaggcttcaatcatgttcttctcagcctctttcacagaatgcctggattaatcttagccattaattatgtgacatttcggcgtgacattttgctcgtgtggcaaatcgtaaatggtgtttagctgtgattaagcagagttagaaaatattttaagagaggggtgtatggaggcattagcatcaaaatcgcaaacgaaatgaaccttcgagttttggcatcggtatattcatttttctttggctgctgcagggttgcggccgaattgaatgaccatcggcttgcctttaaactcgtatccattcactagattctgaaaccaacaatgatatgttttgaaaataagtggacatagtcatgaactgtaatatttagtttaatcagatacttaccaaagcattatgggctaattcaactgatgggaatgtcaaaaaagcttggcccctcattcttccttcctggcattgaaaacaataacaattcattggcatagggtaccaggaaagaagagaattatataatgaacaaattttccgaatgacaatatttgctatcatggttctgaactctagaccgaaaaagcttcaaaatattgaaaagagcccataactaatgagtcaaacaaagatggcttacgccaaatagataaaccgaaacttcttgctcgactactttgaggcagagactgtatgttcattttcaaagaacaacacgatacactactggatttcgaaaaacttgactgtgtttagtgatcatacctgcattagcttcacactgagactcgatttggctagatcggtacttccaaacaatgatcctacagcacgatataagcattatatcgggtcaaaataagttctttcatagtattttttaagaagatttttattcgattcaaacacctgcactaatgaatgaaagctcaccaaatatgtagtagaagtcatctgcaacaacatcctttgccaagttctttatatacaatacaggagcagggttcccagttttataattctgcaaaaacaggttaaatttcaaaataatattttctttatgtctgattatgaagcaaacaccacagagaaaaaatccatgacaaggtttcatgccactctggacaaaagtgaaagaaacgagtaaaagaaatcgactttaaacttctcatagttatcacttggatcgataccaagatttaaagttggtaccttaaacactggaagtgataataattcctcaaggcctaattttccaccctgtatttcttctggacttgcataaggtttattaatatctaaatcctctgatttcggatcatctgtttctttagcgatttcttcatcattatgttccctctggactgccttatgtgctaattttatctgcaa

SEQ ID NO: 184075 - DNA, 3538 bp, Cannabis indica
cggggccccaaatatataattcgctctatgcaaaataataaaattgcttctttctctctctccctctggtactttcacccacaaaaacaaaaaaaaaaaaaaaaaaaaaaaaaaaaaaaaaaaaaaaaaaaagaagagatttccatacaaacatcattttatccaaccctccacccaataaacagagaatttaaagcaaatccaataaagaacatcaatatattcaaattatgtgcaaataagcatgtcatctccaaatataccagcaaatagtatgcaccaaccaaaatccaaaagtttcctaccaacaaattatttaacacaagttactgtcatatttaatgcaaaactcagagccgggtgttcacaagctacaacaccttgagaatccaaatatctttggcaactcaaaatgacctgttgggtttagaagcggaagaggaagatgacttggctttcgcaaagtcaacaagatctttaaatagtgcatcttctggttttacctgttttggtggagtagaagagttaatagacaaattctgagtctgtcccactaaattgtcataagacgaagagctggatccactgcttgaatgagcagtaccacttggaatatgttggtcgaaaaattgctgcctttgattgtacctcgaaggagggggtgggagagaaacaggagactgtgcttcccaaggggccggaggcagctgatcttcagatttgcttaggggtgccgactcatcgtaaactggattactattgaatgaaagtgatgcagtagggtttatgaaacttgaggatttgggagaggacgataatgttggactcaatgaaggagcagaacttgtgtttgaatgggctggagccacaaaggatggctgttctgatgattcatcgaatcctcgagacttgtaagcatcaccactcagatagtcaataaagctagcatccgtaggtactggcctttttgaagatggtggaggaggaaggaatgggctcacccgcacaggttcaatcttcgagctatctcttgatgatctgaaaatgcaattacattaaaatcataccaatcaaaataatctcaaacttttatcctaaatcaataaacagaaaccacccactcacacacacacacacacatatggggtaaagtgaactaattaaaaatcagtaagattagattgtccatatggaaaaagcatgctcaaatagttacctgtgagctagttgtgcaaactcatcttcagattcatcatcctcatggctgacattcacaagtggcacagctgaagatggtgtctctttcgtgcctgtattaggggttcctttcacaatgtcatcgtggcggcgaagtacacgttgcaaactatcattcagtgccaatccttgacacaaaagttcttcatctctgaaggaaagcaaaagtcaatgactatcagcctaccagcatcatcaaaaaatataagcggaaactaaagataatcaatctcttacgttgtattattcacaagaagcataacacgtttttgataagagcgacactgatcaacaaggtcaacaatcacttcatccttcaaaccctgccgaaatatcaagaaacaaccataaaaactgaagtgacatatatggaaggatgacagcaacataagaagattggaatattgtgcatggataattcagcagaggggactaaaactatggaagaaacaatattctcttttttttttaatggctactaaaagaacaaacattatgcttcacttccaaacaaactgatgtagtaagttagcaactttcttccaacaaaaggtgttatcaaaactcaaaagtatatattctttcaaagggaactaggataacagtatatagcatgttgtaataggctcaaacagaaatctcattataagataacttcagaaaccacatacaaaaagtccagcaaaaaaaaaaagagaagaaaaccataaacgaaaacaaaaagagagcacacaaaatcctcgtattataaggtctttcccaattccgacaagtcatctaaagttcagaatgaatatagaatatattacctcaggattctttggatccaatgcacctaacatttctgtcaagacatctgatagtccctgagcaattttttatctctaacaagctgattgatgtacaaattaatatagaaggaatttaacaaggaaaaattaatatattacgggccaagtaaaagcatgttatactactgacacgtttctggttagatattgtacagtacatctttacaaggatacatacttataaactgaaaaatacaacagtaaatagactgaagcagtaatagcataaaatgcaagcaaggaagatatgtggtaggttttgctgaaattctacggggatagaaacaagttagtcttaatagcaattggatttgctgtatcaatgcggtaacacttcggtggtgattgccctttagtggtcagatgaggaaccgaaaaagaaaaatgagtcacaacaagcttttatcaaatgataatacctaggtctggaatcacagttgttaagtggttaccataagagatgaggtatagtttaccacattcttttcctttggaaaattaccaagcaagttccatcatgggatggacttaactttattagtataattacatttacatcatgaggccaatgcaaatctgtagtagaaatcatcgaggcagtacctgaggtctgaagcatcagactgtaaagaggcctcaatagcatcatcatcgtatacagaagcaggagaaattattggctgggtctggggtggagtaaagaatggtacactgctctcttctcgaggtgggaattcaactccagcagcctgtgatatacatacaaatatagattataatttattataacaaatcaaaataagttcttttccaaatactgcagtagcaacctagctatcaaaactctaaacaggaaaaaaattaatagacttaatacaacccatccaaacacagatgcaatacttcattcataacttaagcatcaaggacaaccctctaacttcagcaaaaagataccttgtaggctagtataagcatatgtcttatctaacattcatctgcaacccatgttattgcatatctcacactttaagcagaaaccaaaaaaataaaaaaggatgacaatatgatatttaacacttagttatcaacttaaataagctttgcccaaacgcttaggcagacaaatgattaatgagagcaaatattgtatcaagcttaacaggctaatataacatgtaatacaccaataaccttcaattcattatacgctgcatagtattgaggatatctcccttgaggtcccccgaaggcttcttgccatgtgtcaattaggatcagttatcttttccctcacattcaagtctggctgcagaatttaagccatcattgaatcagttaagttagatttactaagaatgaatgagtgattaagaagataactgcatacagattcacagtgaaagaacaagattattagatatgatcag

SEQ ID NO: 184076 - DNA, 5342 bp, Cannabis indica
aaatcaaaaaaatggtaaaaataatttgtaaaattttactttttgtaattgtggtctaatacttaataacatattagtttgtcttttaatttagagcggtgtagttcactctctctgtcgtaaaaaaacaaaacaagtaacagtcgtggcgctcagatcgcagagaactcgcgccactttgctcttcttccttcgaatttctttgcttcattgcgaaaccctcttctttactcataaaccccaaatccccaaatctctatttccatacattttttgggtcataccacgaattgaagatgctcagaaatggtgccgaaattccttccaggtacaaccccaccttatctaatacttatgctcatcaattaggttttgggggttttctttatttgattgcatgcactgtaaatttgattttgatttatgcaattggagggatattctgggattttggtttctgttagtaatttgtttttgtttttgttttctatgtttaaatttcggatctttatttggtaggtgtgaattgctgagtattgtgaagaaaaactcgaaattattagggaaaactgttgtagttgatgatcatcatgatgatgaacatcatgatgttgaattggattctgggttttggcatgatgtgatggatttctatttttttggtggtaaggaggagtctaataaggaagatgatcttgtgttttttgtcaaaaagttggtatgtcttttaatttccatgctttactttctttcttttcttttcttgggtttatttttctgggaaattgattgggaattctcatcatgacagaactctcaggggcatggtgttagtgaagatttaaaggatggttcttcttcaccttactttgttcgcaggtgggggcctaaggtaaaagcaactttgttagtgaaaagatttaacaactcttttgaaattttctaattgattggtcttcattcatgtgggggttttattagatgcttttacaacagttatgttcaatacttgtttcgctacaagataacattctgcacttgtgtcaaaccagttggatgacatggttggtgacaatgctatagacggcgtggactggagacgctcattttacttgaacttgattgctcatacttcattttctgtcacagtggctatttgcagtcatcaggatcttctgaagtatcaagccgcctctagaaatgcacccttatctcctcctgtatataaggttgtaaagactgtttatgcatctccaagccgagttaattttcatttggattcaaacaaggaagttgagacaacacccgcctatccagatatttgttttgctatagatgattttgactctacttttgatgccgtggtattgacagaattagaccattgctactgtgtacttctgaatgcacagggtggtgcagcatttcctagtgagcacgagcaaaatgattgcggtggatcctctgacaccagaaatggaaatactaagattacacttttctcgggatttgtcagttatccaatggttcgagatgcatattacgctagcaaatctcggtttgggagtcttctagcagcattcggttcgcctgctggtaaatcagaccgaatctacatgaaaggtcctggtggtcgaggggaagttgaagtagctgtttctggtcctttctcgcctgtcatttcaaaacggggatatgggattggctcaattgttcggaaagcagcaactgctgctgctgctgctgtcgctgcttcccacacaagtttggatgaagagatggtgcctcttaaatgctgcttaatgtccatatcattaccttgggaacacattgtaaatgatcttttgttcaaggaaactcctccagtgaacttgtaagcgtcgtgggttttctcgagtgatcggaaatcagatgtaactgtaagagcgaccattttaccagcctttttgcatacttgcagtgcaattcgcaactagatcatttattcaagtgaaggaagtatgtctgggaaacaaagtgagagattttcgataagtctgggaggaggtcgctcgctcgtagaggtgacctttgtcgcttcctaaaatataagaatagaagtgaaaaatagttcatcgtaataaaaggtgaaaaagagaaaactgtaaacattctataattgtaagaatagtaaatggagttagttttatgttttaatagctctctctctgtctatatgttaacaagttcattctcaattatcattgagtactgtattggttggcaggggatttgggaagtgagcaattatgtttcaagtgatgaatgttatgttctgtatagtctgatctgattagtggattgagttactgtacaacaacagtatttcaaaggagtggctgctattggagtcgtggtgagggacgaggcaggctgcgccagttcagtgctgcacagtgaactgttagctctcacttggggtgcaaaggtggctaaggatttcgatggttatgactgggatttgttgtcagactgcttggtcccggttcaggccattctcctcatcgatctctgtctttggagtttttccttttactcgacttgttgttctttcaatctatctgtgtcgggattcgtagaaactagtaatgcttcgtgtttgtaaatggtttgttgagcttttgtgaggtgaatcctcgtgtgatcactactatttcgacttcagtttaaatttaatgcattttgaggttattcagcaaaaagaaagaacagtatttgattcgaatttatttcgaaactacacaataaatcactgcatttttcattttaatgactaatttatacagctgaaatgtggtttgaactgttgatatttcatccatgaaaatgctctttctggcttaacaaacattatttcccctgtatttagtataagacaaggaagaaaaaggtgtctttttaaaggctgtccaaatttaaattggtctccttttgatattaaatccattctagttttttttttctgttttgtgtgctcttgactttcgatttctatatgaaagttttatatctgttttgtgattatgattgaagcatgttgatatataaatccagtaaaatccaagtatgagaaagaaacattcagttttcttctcttattttaaatggtatagaacaacattgtgagtgactagctagccaaagaagttgctttcattcctctcatcatgtctctcgagtaatgtatcgtatctcgtgccaactctaatgtctttcgtggactgtcatctcgtcatagcgagactgcgattgctactggctgataagcacatttttcttcatcactgatcaggaacaaattttaagaactaactcatggccacagtcgaagtgatgttttttcaagtgaaacataaagtatctcctttaattgataatgcttatttaatgctttttcaaattgtattttttatgcggtgcagtgtaaatggtttgataaatactcttaattttaaattttaaccaagtgaaaagagactgtaaacatacgtgtgaaattaatttaaacagtaaagtaattttggtgacacaagtgaagagaggctcgcaagtgccccttgtacctctaatttatatataactataattaccaaacaatagttgtctcaaaataaaaattaggtctcaaaataaaatgtcatatataagatatgtaacgaggagtcgtaaaaccctatgagctggtctggtttgagtaatggtaatgaatgttgtatgccccaaatgcacttagtttcaaattaacatcacttaaaaactattttcaccactcaaaacagaggaaaagcaatacacaaaataataaataccattgatcattgacattttgaaccaaataaaacagagaaaatgcaatgattcaaatgtgtcaaaactactccaatttcgatttgctgttattgcatgatagggcttagcagaagagaaatgagttcaccacaaaaagggttccaaattacaatatcatttagcaaaatgaaaagagataataacagtcatatcccaactcataatccacagttacaagattgcaaaacaacccaaaatatatatacttttcattaatagataagtatctaaagatggtgaaatccacaacaactactccttcaaatctatctttcaggatcataatctgcaataactaaagtatgttctttccattgatcgatagagtttctaaagaaggtatacacatcaaggcatctttaaagtcagactctctcttaggtttttgattagtaataactcggagatgcttccaattaagcaacggataaggacatttgttcttcaaatcttctggccagatgagagccttcacacacacacacatatgtatatataatgatttataaaaacataaatatatcagtaatatgaacttcaaataatgtaatacaggtaatgagcatacctcacaagagtgtacatgaagggttagcatattccaagagcaattgagattcttaagaaaatttcccataccattaaaccaatttgtgtcatagtttctctcctcaagatcatcctcaagaattacaaattttccattcaatgaatcagacaactccagtgatatacaaaaattgatattaccttcataacaaacatattctagttcaggagcagattcaattgcaatgctcatgctacatgaattttcgagatccagattctcatttcgaaacaagaaacttttcaagtgttgactcgagattcttatgtgcctcatatatcgatcatagtagaccaaagtcaaattctcaagaagaggaatacttgtaattaaaacttctaacttgtcaggacaagaatcatacactgtcaattaattttagatcataacttagctccaaagattcaagatttacagttttaacttgtaatctgcacatagtccgtacagaatcaaacaacaattccaaggacttaaggcttaaactttgtaatcgaacccgattatcaacagctaagaactcataaccatataacctcaaatcctcaagagaaggacaacccaacaaaagcttaagtaccaaatcctcctttgcagcatgagattggcgaacatatcccaatgacaaaattttcaaaaatggaaaactaaaggaattagtactagtacaatcccactctaacatgtccaacttcaaaatagtcaagtatgttgcattgtcaaatacattaggaggtaaacaatacttagtattaggagtgcaaagagttatttccttaaccttattctcaactacaaaagctaaccatttatctataagccttgccttagtattttgaaaaaa

SEQ ID NO: 184077 - DNA, 1629 bp, Cannabis indica
gttaccatccccacctccataaataattatatagataaattccaaagagctcacctgtctgaaagttctcattttatagagattgcgaccctttacaagcaaaggatagagcggagacaacttcttgattcctctactccagaaaacttctacctaaaatcatcaagagcattaacaaggcagaagaaaaacacattatgtctcttctaggaatcaggagttgctaaagcctcacagtaaatgtatgttgttgttttgcagcaccatagctctccttaacaactcttccagcaacagttctcttccctaaaaccttcccatgtctcgtcactttatcaaacctggcatagtgcaagaatttttaggctctaagaaatgtcatcatatacctaaaagaccagaaaaattgatgatgtaaaatattactacctctcataaactttttgtgtaaagaggacaacatctcccttgcaaacatcgcctacatcaagtcacacattgcttgagcagatggtaaatttttctcataattataggtaagaaaatggtttcaaaggttaaaaagcaaaagaaccatttaccagtacaattgatgtcaaatgatgaactagggtaaagtgcttcaccatttccatccattaacctaataaagtaactcataattaataactaacagatacttaagaggcaactggagtaaaatgaaaacaaaaaaataaaataaaaataacatacacagcattcacttaatgaccaaaagttttactggaataaatatatctaccacaacaatctgaaagtttgaacataacattaggcataatgaatacattaatatttgaataaagtataatttaggcataacaaatttcataactttaagcaacaaagtacccaaatttccagactatatctaccttcaacagaagccattttactatgctggttaagttaagaaatgactaaaaactccgggtataaacatgaattgcatgattttacaaacccttattacagatcaaaacccaacattagtaagtttaattgttttgtttcaggattcattcatttacctgcaatgctccttaattctttgtatacaaacagacttagtcccggctactctgaggccatgcttccgcaaatatgctttgcaatcattgagctttaaagattttaatccatcatgttctactcaaacacaataaaaataccagaaaatattcagaatctcaggaaggaaactgaaaaataaaatattatgaatcataaatcaagcgtattcaatagaaggttggaatgaaaaactcttatcaatatcctcaagaagaagaaaacctttcaaacggctgttaatattgttagagagcgactcaacgtcaacgtcaacgtcatcgccgtggccattgctatcttcttcagaatactccgagtcctcggattggtcatcatcataatcatcgtcgtcgtcgtcgtcgtcgtcgtcttcttcttcttctagatctatatagtcggtggtagcgtcgtcatcggaagaggaagagagacaaacgaaagggaggttaccttccttttccgccattttcattaccggattgaaacacacaccaaatttcgaacaaatagcct

SEQ ID NO: 184078 - DNA, 2723 bp, Cannabis indica
tttttagggaagacggcaaaacaatgttgatgttggtggagatgtggtggtctgccattgtgggtagagagaaggagaaaccacgagagaagagaaagcaaagaggagaagcggaaatttgtaagaggggtattttagtcccaactgtatgaagaaacataatttagaaagaattgttaaacttggcataattttaaattaggagtactaggaagcatgaaagctcaaatttccccttggtttttgtctacttcactaatagaaagtagatatttttaaattaggagtactaggaagcatgaaagctcaaatttccccttggtttttgtctacttcactaatagaaagtagatattggtattaagaatgaacaagcagtgttaagaactctaataccttgagggtctcaaaccgtgtcttggaaacccaattcagtttctaaacttcttttgcaacgaggggtctcacatggtggaggtggaatgccaaaaacccaatcgagaacgttcaagtatttggatcgaaagacttccctctcttgtgcataacagtgcattatgatggctgttgataagctgaaaatcaccacatcagctctcttaaaattctttgactggggcaagtacccagcttcggccatgcatgtgaagaagctctcaatggcacgagcaaggcagtagagtgatatttcgatacgcctgcttttcttctcaatggccaaagctagacctgtaggaaactgcccaataatagaaatgatatcattaggacaaagacgccaaggactaaatgagagttcacccaaccagtaaatgaagtgaaaatagttaggtaccgttcccattgccaccattggaatattacatttcctgaaaatcctgaagaatatgcacgtccacatcctgtttaacattgaaagagatttttctaattgtaaaagtgtccttgatagagggaataaagtgtacaataaattttctgtttatgtagtatatagatgtattctcttggacatgattgaaaaataacaatgaaccggagatggacagagaaagggaagaaagagtaaatgaagattaaagaacaatcttattactcaatcaatgcaaagagaggagtttacatacagtcggttagagagaactagagctaagagaacagctagctacagctgccacgactacccaactctaactagttaactataacaaccagactacagaacttgtacaaactaacagttaactaataattaactgtcttaacaagctggaatccacattgcttagttatttgaatattttggtttgaaatcaaaataactaataacaaactacaatttcctacttagtttgaaatctatgccagttgaatgaccataaattgaaaacttaaagtgtttcaatcacataatcttttgaagggatgaaataaatttttaaaacctatcagccaaattttcacatccacactgtttggtaaggccttgtttcaccaacagcctacgattcatgtaatagggataaaaaaaaattacaactattaaccaactttacagctgcagtaaccacaaatttcatttatattttccattttgcttctcctagctccaaaaaacttaatcacaagaaatggaaaagtcttaatgccattacgtttaatggtactaattgattagcaagaatagtttgagatagaaaaaggaaaagagcacctccagtacaaagtgacaaactaccatggaaaagttacaagattaatatttgcacaatgcacgtagctactcaagaaccagatccctctctcctatacgacagtgaagaaggataattttttaagactgaatgatagttaaagtaaaatcagttagatgaatgtaaatttctcaccaggctgatgagcaatatacagacagaaacaagcttgatcttgcagtaccaagaagaccttttcctagtattgtgtaaggcctgcatatggacaaacggatgcgtaagacaatacaatacatacataacaaagaggacaagattgcaacaaaaagttattcatcgatcgaaaccaaatatatctgggatctctcttatcaagcattagctataagcattaggcatacgaaagagaaggcgtgtatcaaattatatattgaccaatgaagtacatcaacatactccattaataattttaaagaaataaatgataaaacacaaacacacccccacaacagcaataacaacaacaacaataattttgttaatctttaaaaaacaacccaaaaaccaatcaatcttccttgactaaatgtgtgtcgacagaaaatcactttcactaaacaccaagacaggataacgtgtgatttataaagcacgtgtgatttataaagcataggaaaaaaaaacaaaaaatcaccttttcgagaggtcctgacgatgaactataagtgcaggaatcagatatactggtagataaactggtaatgctcttttataggcttgaataagaaaagaaacaacatgtgaactgcatgactggtttccatgcacaatctgcattaaacatcaaaagcttaagaattaggatgacatgataatggtacaaacatttttttaaataaaataatattgacaaaaatggttcccagccaatagacttctggaaattctaccaaaaaatatatacattcaaaataactgaaacttttacgcttatatatatatatatat

SEQ ID NO: 184079 - DNA, 2450 bp, Cannabis indica
aaaactttattaaagatagatttacaatattgaggatgcacacaattgtagtttttttttttttttttttttgtactgtggttgcttattttttaaaaaatatccttacatatattttaataaaaatgaagattgtcattgaaaaatttatactgagattttaaggtagaaaccacacaaaagtaattgtgatatttattttattattgtttggatcttgaattaatggttatttattcatagaggtgaataaatatggtgtaggtgacattaagtatagtcatatttgtctcattcataatcttatgatacacaaaattaatagcttatactattcataaaaccatttaaagaaatagcattaatcaattggaccaaattaaaaaccatatacttctaccaatttttattttcttcttttttttttaactcttttttattactttctttaaataataatattctttagaccataaaatttaatgaattaaataccaaaatctgatatttttgtttggaacttacacaaagtgacataggtataattttgtttttatatgaaacttttgtattgtttatttaatgttgtacgacacaatttcatcagtggtgtataattgaaaataaataaatataagaagtgcgaatttcataataagagatagtttaggggccaaagtgaaaataaaaatatcactgagaaaaagctgggaaaaagaaaagaataagaaaatcaatgaagtttgctggaaaaagaaagaagcagcaaatattaacagaagaagaaaagaaaagaaaaaagtttagttgaagaatttttctcggaggagagagaaagtgagaaaatgctggaaaatctagggattgtttacaccgatccgtttctgtagagctcttcgatccgtacaatccccagacaaagcaattaatgtgttagatccggctgtctgatacaacattcgtcgcattgtaatttgacatttcaactctttttgaggtttatcttcgagtttggggatctctcagtggtactaccatggagtttcatataaagagtttgaagtcggctttgacttggtaagtttgagttgagcaaagatactctcagtttcatcggaagtgtgtgtagttttttttaagctatgaatggagtagtgggaatggttacttggaagttgaattcgagtctgaattaggcttaatttccgtttaatactcttcactcaaaagaattttagggtttttgagattttgttattgatatgtatattattaagtatgttaattttgattggtgttttcttctgttagattggaaatggacgttttggcatctgcgtttccagtggtacaattgcttcagcgaattatgctaatttatgcaacttttgtaaatatgataaatatatatattacgaggatttgatgttgaggtgacttggacttaccatctacggttcctatggggtattgggtcgcttgcattggaaatttattatttctgtgacaagttttcgataagggtgaatcggaaaaaaagggttttttttcgtgagcgacagtgatagcggcctttaattattttcctatgcaatatcccactacgggttaatctttgggagtttgggcttttttatttttgggaataattatcttcactgtggctaacagtgtggtatatacattatggataattcttccttgtacaagggttgcttgattttgggttgtattgagagattggcgttgagattttgagagactgtagctttcttggtggccggtggagatgcctccttctccggcattgaggtcttctcctggaagggaattgagagctaacaataatcacaaacgaggacacagtttcgaaggtggattgtttctcagagaaaaagatgacgatcttgctttgttcagcgaaatgcagacccgagaaagagagagttttttgctacagtcctccgatgaccttgaatttacacttcgtaatttcctattcttcacacttctattaatcgatttgttttctccccaagtttgaagttcttttttttttttggtggtcatctgccttacggggggttttttcttttctctttcaacagcttcaaaattgagacacttttcagatattaagctggggatctccattccagtacgaggagagagtactagtaacctgctcaatgccgatggggataagaatgactatgactggtaagtttttctcctccctaactaagtaattgctgataatttggacctccatttgctgggaacgggctccgtgctggatgtgttggtgttccggttacggggaagataccctaatatgtactgctagtaacttctgctttcaaatttttgggcaatgcaacatgtataggttgtgatattgtacctcaaaagtgttcaattctcttgtaatatggacagactatgataat

SEQ ID NO: 184080 - DNA, 2902 bp, Cannabis indica
gaacccttgcagagttcacatgagatgtactttcgtttttttttttttaaatgtgtaagaatattatccagattttatggctttttaagccacttttccattgaaatatacatttatggattttttattgatatttcctagaaaaatcggcaataatactatggatgaagatgaaagactaaaatgatgttgaacccctcaaatttccttttctttttctgatatttccactgctattatcaatagtattcaattgatactggtaatacaattaaaccagagaacaagagattaggattaaaatgaatattcgggttttggtttccattgtagacagatagttagataaagattcataaatttgagtaaggaaattaaaattaatttcaatatcttgctgatattgtttatattctgaactaaagagtattccagttgtaataatccataattttcctatgatttcttaacttttgccttcgagctgagtggtagatatcaaactattttcagcaagtcacttattcttttcaaacaccagttgccagttacttttgtaagaataccagaaacttgtttggcggatctcgaatgtttaagtaagaaaatgtcaatgtctatagaaatattaaaatacattttcaaaaccttaacttctctattttacattgcacaatacattctccattttttattctatatcatttaaatatcatatttttttaatctttgttattcacttcaaatataaattaataattagggagaagaaaataggagacaatattattgaaataatgttgaaggatgaatagtaatctctaattattgagaaggctagagcatgagctaaaacaaatatagagtggagcatccattggagtatattttctcttacccattttctctatagtttgaagctatttctgttttacattatccattatgaatgctttagcttaggatatgaacatacatagttaaataggtggaagtggaacaataactataacacctcacccatttattcctgtttcacttgaaggtggttcatatttttttaattattattggtattttcaatttttcaaagaattctttcattttacatgctctctgaaaccttctatgattcacagatttataatcactggctattaaatattaaggattggtgcataagtaggcaattgtggtggggacaccgcataccagtttggtatattgagggaaaagacaatgaagaagaatatatagttgctagaaatgctgatgaagctcttaagaaagcacaagagaaatatgggaaggctgtaaagatttatcaagatccagatgtactagacacatggttttcaaggttggattagaaaccagcaacttgactctttgcttttggataaactgtttttttagaattgcatagattcaaaaagctgagttcatctacaccaaaatatggtacaaatgtattagtaatatggatatagactcgaaattttatggtatagttaagcaactttaacgggcttctttttgttgccaaagaaaaaaataatggtatattacatttaacaggatctcctatctacatgatcatttaaatatttagaaatatatgatcattacaaaagtttcctttatgatcattcatttatcaacttaatcaagaaacagccattccatggaaaatatgtgggcctctaaatgaagaaagagaatgaagtcaagaagtccatggaaaggaagagcatccctcatcccataacacggtcaaatttaaggtagggaatggaaagaagattagattcgggaagatgtttggatagatgatatcaggctgaggtctttagtaacaaactggaatctacatttcagaagtaattcagatgatgggaaagctcctatcttgattgggtttccagtttctgattatgagaaggatcaggcagaagttgtatggaaaagtcatcttccttcaaaagttagtttttgggtggctccttgatgtgggaagactaaatgaacacgataatttcaagaaaaatatctccagggtagtgtgcttgctgtagagcaaatgtcctaactataaagattgcgacctttttcatcttctcgtgcatgtggagctttgttggttttattcatgtttgtaataaatgcaatatttaatattgacgttacacatttttttcggttttgtcttcagtgcattatggcccttcagtactcttggttggccagatgtgtcatcagaagattttaagcagctttatcctacaacagtgcttgaaactgggtatgtagtccctttctagccttctgttttcgtttcagttaaatggcttcatttcagtaatgatgtttccatgggtgagcctttattttgacttaggatcaatgttaattttgcaatttgcaaagaattgtcttaaaatttaatggccaaaaaatgattgtgactaggacacggtaaacaaatttacttaccactaaaatcatccacaaaagggcaacatgagttacctgccattagttcatattcagtttgtctaggtgtttctgcgtcatctgcatgcttgaaatcatctaacttgagaggttcttctctctttttctttcccccgtcactgtgaaatcatctaatatgtgagattcttctctcctaatttagtttgcttgtttgcaatactgtataaatgtactgcttgttcctgtgtagacatgacatattgttcttttgggttgcgaggatgatcatgatgggaatcgagttcactggaagagttccattttcgtatgtttacctacacggtcttattcgagattcacaagtgagttaaactgaataatgcattttaaatgttgttttttttttttttttttttttttttttttt

SEQ ID NO: 184081 - DNA, 2122 bp, Cannabis indica
aaaagaaaagaaaagaaaaagacaactaccatcttatactaaaacacaactaacaatagcataataagctgaacccaacatataagcattggtcaactacaaacacagcttgtgaagaataccattgacaaagcacagcaaaattcaaacacaaattaacatacctttttccgtaatctgcttttccttgcagcttcacggttttgcgcaagcctgcgtaatgtctgcagaagtgtcagttttttttaaaaaaaagtacacaaatatagatctataatgtcaaaagtatggttacaacaagacaagaaccttttgatcccctgctttttcttttgatttgtcactggaatcagaagctccaacaccaagcaattgattcctttcatgctgcaagagaaaacaatgctatttagtatctaccatccaccactaagcagcagacaaatatttaattactgtaatagtattatttatatattcatgttttgcatgagaaacaaagaaagtaatgttaagtcaaagcacaaacaatgtacaaatgagataaacataacatatgaaacttcaacaatataagtattaccctttgattcttatcatcagtgtcatctgttgatgtgtcagttctaggacttccctctgccatactggactcaccccaattttcacgatgactaccagataaagatgctagttttgtttgcgaatctttaggtaatgacaatggttgagaccccacaattgcagcagacagatttgcatctgacaatgcaagagactgaatgacataggagcatgcacagtaagaggagtcactagtgaaactgagcagacactgaagtagtttctattgaattttctagcccagcaaaaaaacaattaaaagcttaccttgcttaaaacatcaaattggacatcattacccaatgccgagctgcctgacttaagttgattgaatacaggatctaaaagatacaaaataatcaaaagaaggcaaacaagattatattcaactacaataaatttcaaaattacagaacagaatgcagttccacccatgcaaaagctccagcttccactagaatgctccccaaactaacatggcggattcagattggactttttcaagcatacaagcatatatagttgtcctagtgtcaatttagaaattacacatccataaagaagaaaaggtaaccgaaacatgaattttgaattgcaacagtttacaaggaaacgcatcaataaaatgaaagctcatccctccatcacttatattagtaacttatcatagaaatttgtcctaaaaatatatatagtcatgaagataacagactatactgagttgtaccatacaaaaaagcaaactgaaaagatacaagaaaacaaaaactaacaacacaacaagcaacatcaattagtatgatagcaaaatccaaggctcgtgcagaaaggaatttatagaaggaaaaaaaaatgatcatgtctgcatttgagaaagaccaaggatttatttgcatacttcggctaatatcaacagcatcctctaaccgaaatccaagagattgctcaagtgttccaaaatctgaaattcgagaagaacgggtggtgctaccttcggtgccactgaaaaccacaaactattaaaaccaagatttacaaaaaatgatatgcatttacgtactaactatgcaccctactttcctagctaaaacagaaaatccgtaatagggtacttttatgttataggaagaagaaaaataatatagaagaagtctgcaagcaaaatatccagtttatatataaagttaactttagaaatagagcaacaacaattacttaaaacatttgttatacggcacgctgagaaatatgcaaaaaattacaaaaccaacaccttgaacaatttcagagtaatatccaaaccttaacaatcaatgcatcgacaagataagagttgttgaaagtaaatgtgtggtgaaaggtctgaaaatgataacaaaaaaaacactggaaaactaatgcattctatacattattttccctccagatattacgtaaaacctgacattaactgcagatgacccacctttgtcctgaataaatgaaaaaaaaaaaaaaa

SEQ ID NO: 184082 - DNA, 2334 bp, Cannabis indica
aacaaaatgtaagtgtggcaagtagaacataacattgataacaaaataataaataaaaacaagttcaagttgccttattacaaagtgtaatatcttaagtacagaacaaaaagaaaaatttgtatccgtaatggtcactgaaacgtaacttgttttccactgaaacctgaaagaaactttttggaacttgaaataaatggggcaacaaacaacaaatgaaagaacattttagaaagaaaaaacaaacatttaacgtgcaaattacaaacccattgttgaagcttcagttaactatttaactaaattagctttaaacaaaatatatgtatctcaacttgatacattcaaggaaaagaaaaagtagagtaaaactaagaatggcaacaaataaaaacaaaagagcacaaatatattttctatgatacagctagcatacctggtgcacataataaagcccagaaacaatgaggtcgaaagtttaagcccaagaacagagaccttatcccttccgttcttaccactgagctagccttcagtggcttaaatgaatatataccggcacacatattatacatacatccaattcccgatctacacctaaaaaggtataacactttctccatgtttatttactttcctaacacaaatactacctcttacttatcacataaaacttcaaccacaaaatagtaatttctcactctataaaccataaatcagcatacacaagcctacaactatatataataatagaaccaacaagatactatcatagtaagatactaagatacatacataaaatataatagttatttgtaccttaacatgaaaagatcagcaaattcatctgatctccatctcttcaaaatgaaagatctcttacttttcaatttcgcaacacatactcatattgttgattatacaagtcaattggaagataccatttcagcttacattacacagtagaagtcttgaaaattaattcgatttgggacataccactactagtctcttatagaaataatcaagtttaacaatgtagcaacaaaaacatgagtagacaggagtgcaaataccattttatcttacaaccaaagcataagtaacattctctaacaatatatagggaacttaccttctcctaggactgcgacttcttgatctataccttgatcttggagaagcttcactaatccttcctttatggctggaaaaaaattttaaaaaaaaagttaactatgtaccaaaacttaacagaaaacataaagaagaacaagcacaaagcgaaccaaaattgcagaaacactcaagatttgatgtcaaaatatctcatacaaaagaaaataataatcaataaaatcgaacactactcaagaaaaagagtaattgatcagcaagttcaacggaaataatttggaagtgtaagtagaacaatcgtcacacgataaaaaaaataagctaactaacccatctgcaccacaactataaagtacctaaacctaatgatttgaagaaatgaaacaattgagaataaattcaaggaacaatctcaaattcaaactttttatgcaagtaacattctatagaatctcataaaccaatttgcaatatgatctatatgaagtcaaattcaaccttaaaacaataattttccaagggaaaaacagaaaatttttattacataaacttacatcctctcagcattgggtccatatttagcaaattgaactgttatctctcggccatcaacaactcttcctgacaaaaaacccaataaatctttttagaaaattgaaatttacacatgaatatggttcataagcgtagtaaatcaataaataaaaggggtaaaaatcgtaccatcaagcctgtccactgccttatgagcctcgtctgcatacttgtaacgcacaaacgcaaaacccctcgactctccagtcctaaaaatcaaaacaaaatttaattttctcgacaaccaaacagtaaaagaaagaaagaaatgcaatttcaaacagaaccttcggtctctggggatgaagatatcgacaacctttccgtacttgtcgaaaagaggaaatagatcatcggccgtggtacctatcaaaaaatttcaaaactatcaacgttattaacagaatttccagaacgatatagaatgattacatatagatacagattatatatagatacagatatgtagagagagagagagagagagagagaacgtacggaaggtgatattgaggacgagaagagagtatgtgtcagagatgtcaggagggccagacctaccgaagtgagacatggttgcactctagagagagagagagagag

SEQ ID NO: 184083 - DNA, 8426 bp, Cannabis indica
ataagctgtcatatcaggcatttaacagcaagatttaacaattacaccaaaatctagacagagtatattattaccaccaaaagaaatatttgagtattgaaagtgtaacattgaaaagatttgaattttcgcactcaatatctctttcttcatgtcaacatatgataatttattaatttagacatacatccttttcaaattttctcttcatgataacgtatttaggcataaataaatcaatttgctttctcgtaatactaaacattaattccttgtttattttagcattttgctacttttagaattcttctaatgtgtctttgtttaacagttgcttgaattagaagttgatgatgcaaaattggttgctgctcagaaagctgctgaagttgcttgcattctctctaaatttgaagaagcgcaagatacaatgaaggaagcagatattatgattaatgggctgatgatagcaaatgagaccatgaagcttgaagtaaaaaaattgcacaaaataaattgcaggctgacaaaagataaagatatattagctaatgaagttcagagcttgcagtccattaacatcatcaaaagtcagcaatgtgaacaacttaggtctgatttatcggagacaaacgcattggttgtagaactggagggtatgattgtggaggtccgggcttctttcaaagaaaatttcttgcttctatcctcggacttcggtactctgaagagtctactatttgacacttcaaagctagtgaagacatggcttgatgaaatttggtctgagataattgggagggattgtgcggtgtcagtccttcacctttgccacatgggaattctattggaaacagtgacggggctaaatgctgagaatgggctgcttcaacatggcatgtgtgaatcaaatgctgttattgctgatttgaaagagcacaatagcaagtcaataaaagagcttgagatgtgtagggtgatgaagggaaaattattgtgtgacatcaaaaatggtttcaatcgcatttccaaaacagaggatgaaaataaagagcttagtgccaagctaacctctttcgatgagaagatatcagagttgcagctacaagaggagttgatagtgcagaggtctaactacataggatctcagcttgttatgttgatggcggagttggacttaagtaacaaaaatttggcagcatcacttttggatcaagagaaattattgcaagacaaagaggaggtcttcaaatcacaatctgagtcttttatgatggagtggtgcgtgaaagaattcgagtcacttatattggcatcacaattagaggaaatggctcttcgtaaagctaatgcagaaagagagcatagccagtgctgtacaattcttgaagatttaaagagagaaattattctcttcaaggtagatgcagaactgaaagatcagctcttgagagataaggaagttgaggttgcttgtcaattctctgtccttgatcagcaaaagcagaaaatggaggaggagctactactgctggaatcttcttcacatgaactgaagactgatttcagaaagaaggaagctgagctaactagaatgatcagctttgagaaagaaaatgaggtgctgaaaattgagattgagaaattgaatgctgagaaaagcttagttcttcacaatcttgaagagaagaattctgatgttgaatcatatttagggcaagttgatgtctttgagaaagaaaatcacaggttacgagatgaaattttaattttggagactcgtgttgccaatctggagacagatttccagctgaaaactgatgaacttcatgaactccaactatctcattattctatgacagaagaaaatgttcttttggaagaagagcttgtgtcttccaagagaaacaagcatgaacttctcaccatggccagctctaacatcaagaaatgtgttgatttgatggatagcaggttaaatgttctgaacgaaggaggctttgtgaacttggataaaatgcttaaagaaatatgtgaaactgcagagaagacaaatgagtttatggagcagattgagtacctaaagggccaatgcaaagagctggaattcgaaaataaatctcttcaaacagagctactaaggaaggatgatgttctcaaaggcttgttatttgatctgagcttgttgcaggaatctgcatccaataccaaggatcaaaaagatgaaatgaaggaactagtggcatcacttgaggctttagaagatgagcttttggtgaaatcaattgagctcgatgaggccatggcttcaaaagaaatgcttgaagctcagttgcacgagaaaacagatagaatcaacactcttgagttgagtatctcaagagattgtgagtctcgagatgttcttcgcagtgaaaatttggaactgaaggctcagctagaagatgcttttactgctaaacgttatgccgaggaggatttgactgagacaaagaaggtaaatgagagcttagaaatggagctcatggaaatgggtaatgctattgactgcttgaatgattcggtagaatctctgagaagtaatctaggtgaacttgagagcgagagggatcaactacagctagaaatgcttggtttgaaaaacaagcttgaagcagaacaggcacgggctgaagagcaagaagcaattgcaaaggaagcacaacaggtacaagaaatttggcacaaggaaacaaacaatgtcgtttattattactttataatttcatttcctgattttgttttgcatcatctctgtgtcagatagccgaatctaagaacatctatgttgacgaaaaagaggcagaagtgaagctatatgaaaggtctattgaagagctagagtatactataaatgtactggaaaacaaggtaaattttggataatgatttgtaaactgtaattcttgtggcccggagtttattcttaccatgtcatatgatgtctttgtttttaggttgctattgttaaggaagaagctgaaagacagcggttgcagagagaagagctggaattggaacttcatgcagtaaaacaacaaacacgaaatgttgaaaatgctgatgctgacatgagaaggtctagaattcacctccataacaatttcaatttaattgaagaaaaaagttattttattattactcataataataaatgtatcttgtattaaagtgccaaatttgaccttttcccttcagttacttacatgaaaaagagaaaagtcttcaagaagcagttgcgcaaatacagattcttgagaaggatatagttgagaaggactcagaggtgactatctttcttaaattattctaagcttgccaaggaagcagccccttattttcacaaatgaatttgaacatagttcattaatcatgtgattaaagattgtaattccaattatttttctttctacagattgcccaattcaaggcccatatctctgagctaaacttgcatgctgaagcacaggctagtgagtacaaacaaaaggtacgccactaccattaaatggatatatcaaacttcattgaataggttgcatgcatagaaatatatataattgataatgcccttagttttttcttttgtttcatctggctaacttttataagtggaaacagttcaaagcgttggaagccatggctgaacaagtcagacccgaaggtagcagctttcttcatgccctgacttcttcaccgaaaaaggctgagaagtttgttgcaaagccgaggggatctggttctccttttaaatgcattggcttaggcatggtgcaacaaataaaatcagagagggatgaggatcttactgcggcaaggctgcgaattgaagagcttgaatcccttgtggcaagccgtcaaaaagaggtaggccttgctgccctgaattggttgctccaagatttggacaatgaacataagagtcatttatgtcattgttttgttcttctattaatgtttgttaccaaaataatttggattactcctttctcttctcaatgtagatatttactctaaacaccaaattggcagctgctgaaagtatgacccacgatgtgattcgggacttactgggagtcaagttggacatgactacttacgtggtaactatttagccttactggttttagtctaacaaactaatgccagtttgaatgtatattcgaaaaattgagtttcattaaagttttcataaaatctgtatacaaatgactcttcctgacatacagatatctgggttatatatatatatatatatatatatatatatatatattctgaagccaacattggcaaatatggtataaaaatagatcattttttagtctggacaacaattctaatatcacacatctactattttaatgccagtcactactagacaatcagcaagttcagaaaattactgagaaggctcgatttcatgatatagaatcccaagatgtagtaagctcagctttcatcatctgaatcttagcttgacatctttgctcttgaatatgctatgaacatgacttgtttttattgaatttccttcaggatcaggaggttgttaagctgaaaaaacagctaactgaattcatcaaagagagacaagggtaagcaatgatttgacttaccaaaagtatcaagtaacacacacattatcaaaaattatcttaggcatgtctaagtttatttccccatgattcagatggctagaggagattgatcgaaaacaggctgaagtagtagctgcaaaagttgccttagagaagcttcgacagcgtgatcaattacttaaagctgagaatgagatgttaaaggtggataaatgaatttgtgcttagcaaattaaagttattggaatgtcaccgtagaagttaacgacggtttgttacccttgtattcattatttgcagatggagaatgtaaatcacaagaagaaagtgatggaacttgaaggagaaataaataaattgtctggccagcaaaacctccatcaacgaattcatcatcatactaaaatcaaggcaagatcttatgacttactttcaactgtcctaactttttcacaagcttgctaaattagtaatggccagaatacaactcactataaaaaatttgcttcaatcctaagccaaaaattgtgccaaatttagcacactattacgtgatgcatattttgtatcaccacaaatttattcaatttacttttacgtcttttttattagtttagctactagattttttacttcttattttaggctattgtagatttttatcctcaaattatgacttaagcattattgtgtcccatgattttttaggcctgatttcgtaatgttgtaaaagtggtcattcacttaacttctgtcacacttggctggcggatgctcagtccattatcatgtccgttgctatattagtggcatgtgtataatttaaaatatgcattttaagaaaatctttaaagtaaaaatcaattaatgaataaataaacataaattaagtaaaactaatgtaaaaagttataagaatgtatacatatatttcaaattattatacaccttatgctaactaaacagccacatcacacattttgttagccagatgacaatgacaaaaatcctgaaagcaaatataataaagaaacatattacttttatatattttcaatgacattaataaaaactgatttttggataaacttctataatttgagaacaatgctaaatattaggacaaatatataacacactaactttttgtattaaatattatcacaatagatctaacagattctgttcttcagattcaaactccttacatttctcttatcaattttgagtgggaatttatatgtttacaggaagaaaacaacacgctcaagactcagaatgctgaccttagcaccaagctgaggcggacagaagtccttctttctcgcgtgaaggatgaacttgcttgcttccgtgcatccaatgggaggaatccatacatagattttgatgaagagaaacggttgagttcaaaattaaaggtaagtacactgtacttcagggatatatatgaagattctttggtacttccatgtgaaaaaaagactaccagtgcattagtttataaatacttataaatctaattttttttatgtgatgatggatactgtagttatatagtaaatattgaataaattttcctattttatttatatgcttgtgaagccgaatgtttagatttttttagtaacaagttcagaattttatgaaaattaatgggatatgtacatccatcgacacaaaaaagaaaaaaagaaaaattggaattataactatatagtaccaagagcacgaaggagtgtggtggtagtagtcccttattgccttattgacagaggagtatatatcgatatttttagagagagagagttaggcaattaacaatgaattatctgctccaggaaacagaggaggaaaaactgcaattagcacataagttattggctctgtgtaccagtatcttaaaggtaagcccaaatacaaacttatgtgtaatttcaatacatagaaaatgaatcaacctaaccttattcaaaccaatcaatttgcaggcagctggaattacaaagcctgtaaatgagattaacccttctcttgctgaagaagttcttgagcagttaaagaataaaattgcctctatggatagagaagtgcaagatttgaaatacaaggtccctaatatgttaatatcttccatacatattagatataaatatatagttcatcagaatgacagctgtttgttgtgatttgcagagtaagattacatgtgaaagagctcgattgtgtgagctcttgccacaatcttcaccaattaattctagagcagatgaggagaaacgtccaaccccaaaaaaggtgtcccatgctccatactttaattctgatatagatcgttgaattgtaaacaaatggtgtgtaactgtgtatagttaactatctgctaacatgtataatcgacaatttttttgtccaacatatttgaagggcaaaaattatatttgttctctttattttgtactgtaaatatttcaattacttgtgttaaattaataaagaatttaacttattctccctactctgtaacttattctccctactcagtttctagattatatttagttcggaaaatttgagggataaataatgaaattgttgagtttgttattaataaatatttaaattttaaaaatgacagaaaaaatactcaaaaagtcaattattagatttctgttacttcccattttaatctcaaaagtcatatggatgaatagtttaaaaaatgtcaatacagtagaggaacaaaagcaatgtcactaccataaaatatataatacataaaaaagatagaatgagactatcacatagctaatgtttaaaaaaaataaattgaaaggattaattttaacaataataattttttaaatattataaaaaagacactaaaacatttaataattacattttagaatcatttgtgagttagaaataaagcaattattcaattctataatttacttaaaattacaataagtcaccaacaaattgtctatattttatgtattttcttactaaaaaatatttatgccattaatgtttttttttttcaaatacaaaattaagatctaagggtcataaaaaaatcattacactaattgaaaaatgctctcttgcaagaagagccttcctgaaaaaatgcctctcaggccctactgacatgaatgaactgctatcgagaaccaaaaatctcattgttctggatgaagattgatggaagattaatgaagatggggaaacagaggtggagaaattgtttgcgattgggcattttttcactaattggtcaatgaatcgctctttgctcaagacggtctttggatgggttcgaggactatcagagaaggaatagggtgtccaaattaaattaaccatagatgaggcgatgtttctagtcttctttttcaaattcgaacaagatttaaacatgatattgactaagaatccttagttcctgaacaatgggacactgattatggctcgaatggagagggtacctacggattggaataaggattgtgttgtttcccaattgttgggcgagttttacagatacctccacgctctatttcacaacaaaatttggatagattagctgggttaacaggagaaataatcaaagtatagaaggctcatattactaaaattgtgattaatgtctattttacatttaaagtgtagtgtgacatctgtgcctagggtttctttttcccagtgagggtcaaaatatttggctaccatttaggtatgatcgattaccctatatgtgttttaattgttgaagattgg

SEQ ID NO: 184084 - DNA, 3938 bp, Cannabis indica
atattttggattgtaattgagagaccattaattttttagtaataaaactacccaatgttactaatagtgtaattcttcccaattacactcaattttgtgctaatattttgcatttataagtttgtttgtacatgtataaggacacgatcgattaatacatatttattataatggctattaatcatgtccttacaagtatacacacaaactcacaaacagaattgtagcacgaaataaaaaaacaaaactaaatttttaaaaacattgagtattttttcaataaaaaaaatcaatatttctttggttgcaaaccgaaaacattgggcagtacatataaaagcaaaaggctagaaattaattcagcaaaattacatgttacttatctttattaatactaaaaacaaaacaaaaaaaaatggtgctaatatatttgggttttagttatttgaatagggtgtagtacagattaaaggtcattaaaaaactaataatgataatatgaaaaggacgagagactcacatgatcaaaaccacatctcgttcattatgggcccctacgtataaactctctctctcacacacaacttaccttccaaaaaaaaaaaaagtcttattacttttatactgaagtgagagagagagaaaaaaataaaggggaaagaaaacaatgaaattaagaaagaaagaaaaatgcttcttctcttcttcttcttcttcatcatcttcttcttcttcagcttctactctatcttagctagttttgatagttgaaagtaactaagaagcttccaatgagtcaatttgtaaagtaaagtttattatatgaatagatataccacacacaattataagtctttctctctctctctctctctctctctctgatattgatattctcctttgggaatatgctgagttaatttggtcaataataccaacaccaacaacaattgatagacaacttaattggaagcaaaatacactatcaaaccattttgtcttagtcatacagctgcttattatagctatattacagttcctttttcgctagggttttttcagaattttctgcttgctttgtggtcaaagaagaaggcaccgaccatactttataaccctcttgccatttctgggccgcatagatctgatcatcagtcaaaatatatcatgaaatttcaggtgatggttgttaataagtaataataatccaaatgttattcaattttgttaatattcaaactaaaatatgtatctactagcagctatattattatttccctcttttcttatctattctttttcagttcttgaatttaatttttttttctttattgtgtgtgttccatagttaataagggttttgttgatgaggagtgtgaaatggccgaagttagctaagcatggtttataattgatggattagtttttgcaagaagatcaattatcagattacaaagcagaagaagacgaagaacaatcaagaactatatactgaacgaggtaataataataataataataataataagaagaaattaataactaaaaaacgactcaattccctttgtcgttttgtgcttccttctcctttcttatattctgaattatctactacaagcaaatagcagtattaataatcgtactagcactactactactgtcgttttatactcatcagaaccgaaatggtcagcaacgacagcagcaatagataattcttcagctgatcattatcaaatatcatcaacgatcgatctcgccacgaattattaattaaaccaaacaaccccatatggctgatttatcactgagagccaattacgaagaaaacagcaataacagcagtacaagcggtactcatggggtttggtcatgcagtagtagtagtggtacggatcatcatcaaagagagcacatgtttgacaaagtggttacgcctagcgatgttgggaagctgaatcggttggtgattcctaaacaacacgccgagaagtacttccctttagataattcatctaccacagaagacagcagcaaaggattgctcctcaatttcgaggatcgaaacggcaagtcctggaggtttaggtactcttactggaacagtagccagagttatgttatgacaaaaggttggagtcgtttcgttaaggagaagaagcttgatgctggtgacattgtgtcgtttgaacgaggtgttggtgatgagtctgctaaagctcgtttgtatattgattggaggcgaagacctcatcaccaccaccatcatcatcatcctctcggccaccatcaacatcaacagtatcatcatcctcatcaatatcatcatcatgcgctgcagcaatcgaccaatccgggatcccttaattacacctctagtacaattctcaactgataatcatcatcagtatcagtggggaggagtagtaggaggaggaattagcggccggcgcggtggtgaagggcctttctactcgcttccttccggaatttccatgtccatgccaccactacaccatgaaaatttgcggtataattacaataatagtagtattcaatatccttattataataataatcttcatcttcatcatcaacaacacaacaaccagtactatcacacttctagtactgctgctacagggatcattaataggccggcgagtggaattattagtgataataataacaacaacaataataataataataataatcatcatcacattgatcccgtggtgtttgaatcaacgccgacagctgtgattggcggctactacgcaggccatgggaaattaagctctccgccttctgcttcgtcgaaacggctgaggcttttcggtgtgaacatggagtatagtccggaggtggaggtggaggtggaggaagtggaagagtctttggcgggtgtaacaatggcttcttcttcatcagtaatttccaatcataataatcatgatcatgatcatgatcaggttccagctgctgcagcttcgtctaatttggttcagtactctcttgatgatcatcatcacgaacaccaacaagtaaggctaccaaatcatcatcattcccaaatgccaataaaaattccaccagagtttatttcacggaagggaaaatcttcttccttgtcttttgatttggaccctaattaattagctcgtaagaattaattaatatctatatacgtactactgctcccatgaatatgaatattgaattacagtactttttttttcacttcttgcaatatcaatttccattttgtgtcctataaatatgtttatacatataatatatagtaattttattacgagttaagagcacacggcgcggctttattaatatattactgctatatatgtataatgtagtgtatatatcctaattattatttgattaattgtcatttgattttacactatttataataggatgtattgtatacatataaaatatctatagaagctggttgaagattataaaattgagtagaaattccctctagatatccagctaagatcagttggggctgtatatataactcagttatatacatgatcatttttacactattcatatgatatatatataatatgaaatagtactgtaaaagtcaatcccaatattgaaacagaatattacttttacaattgtgtataagttctgcagaggtatctaaatgtcatcaatatgtatgttaactgtttagtatatatttatatatatgtatccatcattctttcagcttttattcgtttcttttttttaatatattttctatgtgtgtgtgttaaatattttcatcatcctattatcatgtatatacgtacattaatttatgtataaattaaattgtatgtgtaagaaagaaacaagtctgggcatgtagattattggagtcagattgaaaaagttaattctttgtttgttta

SEQ ID NO: 184085 - DNA, 7114 bp, Cannabis indica
aaggacaagattgataaggttagaatgctcacttacggagtgttcattattcgattcaattccatggaatacagggaccaagtgcttaacggtgggtacattttcttcaatcgtcgacctgttataatgaagccctgggatgcaaacacgaatttcagaaaggaagttgtaaagtctcttcccatctggattcaattagaggggctcgaactcaaatattgggggcagaggtctctctttaaaatagtggggctaataggtaaaccagtgatggtggattcagtcactcgagatagagatagattgaactatccaagaattatgatggaagtcctcatgaaccaggagtttcccagtgtgttagagtttgaggatgaatatggtagtaatgtgtctgtgggcgttaaatacgaatggaaaccagacttgtgttctaattgttctggattggggcacgtggctgcagaatgtaagaagaaaaatggtgtaaaacgggaatgggttgttaaagaggataaacagaaggagaaacccactgtagatgatgaaggctttcaggcagtttcgaaagggaagaaggtgcaagaacaaaaaactgcagtaaaggagacaagcacttcaaatggtttccaagtattagtaggggtaaatgatgatgtgggaattatggatatagtgggctaatgttgagcaaatagataacacaagagaggggggaggaccctctcttggcaatggataagttccttgtttggaatctccggggagccaacaaccagcaaaaacaacaacaaattaaacagttcattcgaactcaagaggctggttttgttggtcttctcgaaacaagggtaaaggttcacaagcttggaaccttgtaccttaatgtctttaacggatggtgtttttcgtcaaatatagcatggcaccaaggaggaaggattggtatcgcttggaacccaaactgtttcattgttgatattatcaaatgtacgagccaacttatgcatttgaaaataacaacaatggatggtacttatcatagtttcttgactgttatatatggcttcaatgacatgaaagaaagattggaattgtggaaggatttacagtcctcaaagacagatgaaagttggatattaatgggggattttaatgcaatcataggcaaagatgagagagtgggccacaaagttaaatatcaagctgaagctgagttcattgagtgcattcaagactgtcaacttgaagatatcaaagctacgggtgctttctttacgtggacgaacaaacagcagggccaagacagaattttttcaaagatcgatagaatcatggccaaccaaaactggttagatacttacccgaatgctgaagctttatttttgaatgagggaacttatgatcataccacaggtattctgtctttatttcccaaatggaagtgtgggaaaaaacccttcaaatattttaggatgtggacaacacaccctgaatatgacagtaaggttgctgatgtatggaaacaaagaattagtggcactagtatgtatcaggtggtgcacaaattgaaggccttaaagcctgtccttagagagatcaaccagaaaggcttcttggacttgcaagctacatggattcaagaaaagcaactacttgatgaaactcagagtaagctgcatactgatccattaactgaagctctataggttcgagaaattaatgccaaaaatgcttttatcttagctcaacagcactaccactcaattttacagcagaaagctaagattagctggatgcgtgatggagatagaaactcagcactcttccatgcgagcattaagcaagggcacaggcagaaccaagtattttcaattgagaatgaagcaggggtgagggtttttgagccagaacaggttactgaggctttcatgcttattacaagtcattgttgggatcaaaaatggcaaataggaagaaagtatcaaacaaaatcttgagtagaggcccaaaagttactgttgagcaggctgagatgcttagtagaccattttatatggaggatgtcaagaaggtagtgtttgagatagcaggtaacaaagcgccagggccagatggtttctccagttttttctttcaggataattgggagctggtaggagaggatgtgtacagggcagttacatctttcctggattctggtaaaatactcaaagagatcaacacaacaacactcacaatggtgcctaagctgaagtgtccaaacactgttagagattttagaccaataacttgttgcaatgttatctataaaattgcaattaagcttttgtgctctagaatcaagtggattctccctgaattgatctcaaactctcaaggagggtttattcagggcaggttcatagggcataacatcatgatctgccaggacttagtgaggcattatggaaggaagacaaacaaggctaactgcatgatcaaacttgatcttcaaaaagcctatgatacaattgattgggagttcttagaggagatgcttataggacttcaatttccttatcattttgttcagactgtgatgaatggtgtgaggacacccagattctccattatgtttaatggctctatacatcggttctttgaggcaaaaaggggtttgagacagggtgatcccatgtcccctctgctgtttgtgcttggaatggagtacttatcgcgaatactaaaggaggttggaaacaaaagtgattttcactatcatgagagatgctcgacattgaagattaatcatctcgcgtttgcagatgatgtaatgctattctgcaatggggatttcaaaagcataatgtatatgcttcggggattgaaattgttctctctctcgtctggtttgcaacctaacccccaaaagtcagcgatctattgcagcaatatggccaaagtggaggtaaatagagtattattagcctcggggtttactcaaaaaagcatgtcatttacttatttaggagtacccatttgtgctaaaataatttcagggaatgaatgcattgctttggctgagaagatgacagctcgtattagaacctggagttccaagaatctttcctttccagctagagttgtattaatcaattcagtgctgatggctattcatgcatattggtgtcaagtactcattttccctaagaaagtgattaggcaattggaatctatttgtaaagctttcctttggcaagaccaagcttgtgccacaggaccaggtatgatagcttgggaatctctttgccaatctaaagctgcaggaggacttggatttagaaaaatccatgaatggaaccaagctgccatggggaagtacattttggcaattgctcaaaagcaggatagcctatggttggaatgggtcaatagtgtctacctcaaggagcatgaatggtggagttacaaggctccccttcagagtagttggtactggaggagtcttgtgaacctcaaggaccatttccgagacattgcaggcctatagtcttgtactcagcaacaaaattaccaggtaacaaccgattactctcttctctgcccagttcaggacaaggttcaatggtcccagcaagtgtgggggcggttgaatatcccaaaacactcctttatttcctggttagctattcaggaaaggcttcgaaccaatgatagattgaggaaaatgggaatgaatgttgattagcattgtgaattatgttctactcataaggagagtgcagagcatttatttttcctctgcagtactgttgctgcctgcttacagagaactaaagaatggctctcttggaatttcaaagctgatacaatgtccactctaaccaggtggattgggagatcaaagatcagtcggtttaggaaaaatgtcctagctgctgctcttgtttgtttggtttatactttatggaaagctcgcaatctcagcttgtgggaaaagagtaaaccgaatgaagcaaagatgttcgaaagaataagaagtgatgttattcaaagagttactgcaatatggccgaaaaaagtatctattgaagataccaactggtttcaaagtttgtaattggtgaaaagtttaatagtttgtacaaattgtatagattttataaaagaaatttgaagagagttatatttgtatagcagttctttttaggcccttttgggtgctatttgattgtacaaagatagtttttgagcaatacaactttccctgattcatcaaaaataaaaaaaaaaactcctaaggcatgactcatattttgcacaattattttttatgtgatctttttatcattttgttttcatctttcatcttattcttttgatattttcaattcttcttttattttgaatctgcaaaaataaaatataatacaagcgtaaaattactccaaacacgagtaaaactaaattataaacacactaaattaatactaaaaataacctcacactttgactactttttttttttttgttattttgtgtgtgtatactttgaagaaaacgattatgaatttcaagccaatatatatgttgatttcattttctcacttttttggttatctatcaatattgaatacttgtgacttaatttaaaagggaacttgttcacattgtttctttggaataaatgaatatttatttacgggtaattgttatttctttttcgttgattgtgttatggatgcaataaggtattgttctggatgtgtctcttctttcttctatttattttacatcttttttaaatgattaacatatgtcattttggaaaaagctcaagaacctgagaacctcattttcataattttttaagggtaaataccattttgaattctgtgttttccaaaagtaattaattgcactctctgttttattaaatgataaaatggaccctatattttccaaaatagtaaaaataagatcctgagctcaattttcaacaattttcaatttctaacacgaaaaaatacagaaaatataacttgttttgtcataacatctcaagattagattattattaagttttattttgacaaaaaatcagttcaggatcctatttgtacaattataaaaaatacaaagtctatttcttcatttaacaaattagagggttcaattaatagcttttacaaaacacaggatcgaaaataacatttacccttcttttaatgatattagatagtcatagaatttcttattacctattcatagaagtgtagatcacttgaaactacaattaaagtatttttttgttcttttaaaaagtttgtgcatgtaattctaattgtgcctccgagctaagttatggaaagaaaggaactctagacgatcttattgcttttgtaatgtatggaaactgatttcatgagtcggccaaagatattgcaccgtgatgggatatttttagccttaacattttctttttaatcataggaagtcaggtaagcttggctgggtagctcttaagttagatatggaaaaggcatttgatcatgttagtttgttaaggctattatgcaacatctctgttttcctcttaggttcactagtcttattcttaactgtatttcctctgtttcatttcgtcttcttattaatggctcccttactgataagttttcttcgactagaggcattaggcaggtagatcctttgtctccctacacttttcttctgctctctgaagctttatctactgctattagcttacgggagcataataacctcttccaggggaaatcatttgccgctctgctcccactatttcccaacttctttttgctgatgatagccttcttttttccactactactgtcggctcatgtattgctattagaaatgcccttgaaatgtatcataaagccacaggtcaacttgtaaatttctccaagtcctcaggtcttttctctccaaacacatgtgattctgaggctgactttttctgtgatactttaggcctggataataagtctttcattagtaaatacttaggttttccccagtgttttggtagatcaaaagaagatcactttaatttctttctccagaaggctgattcaaaaatgagcacttggactaaccatttgttctctagagctggtaaagatgtgcttcttaaagcgcttattcaagctatcccctcatatgctatgtcttgtttcaaaatccctatttctatttgtaaaaagatagaaagcttaggctcaattttggtggggttctttaggtaataaagggaaattctactggaaagcttgggagaaactctgtcaatcttaattttctggtcgtttgggttttcggtcttgtatgcatcataatcaggctttgcttgctaaacaagtctggcgtgtgttttctatgcctaattcacttctcgctagacttttaaaggccaaatacttttggcaaaactctttccttgaggctcctaagggtcattgtccttctttcacttagcgtaatttactttggggtagagatcttcttaaaagaggtcttttgtggaaggttgggaatggcagatccatctcttctgttaattcttattggatcctaggctggaggtttatctcatttaaaagtaatgttgcccccctgatcctactgtttcctttttcactaacaatgatggttgttggaataaggacagattggttacatactttgatgatgaggtggtttatgcaattttggctgttcctcttgccgatgtctctatggaggatactctcatttgggagcatcactcctctggtttgttcacagtaaaatcgacttaccatttggccaaatctgttaactctttacctacctcctctagtaatatatactacccttgttagatggtggaagaccctttgaaatttaaaaatgcctccaaaattgaaaagggactaattgaggaggttctatttttcaggagatttcgattaagaatttacagaaaataataaaagaaaatcgtaggatggttaacatttttgaatagaaacttaaaaaaaaaaaaagtacacacataatgaattctgttatataccacatttatatagagtagatatatatttgtaaa

SEQ ID NO: 184086 - DNA, 1636 bp, Cannabis indica
tttattttcaagttaatagtaattaagtaaacttttaattattcacgattttcaataagcgcgttgattagcaacgaactgtacaattatataaaatcatgataacacacttaaactagtatggtgttacagtcagcttcaccattcttgcccttattcttgtccttctttagttttgctttatgttccaaataatcatttctaaactgacattctttcttgcaataataacattgtttacctactagagttcttgacttgaatctatctgacttgtctctattattgtcttatgagtgcttgttgcctttgtattctttctttggtattttacctttcacaatcaataacccatcaccattgtggtcagatcgatcttctgtcttttagatttcttttgaactcggagctgccttaacctctgtcatagttaaagtatccttctcatacaaaatggtgtccgtaaaatgttcatcatcttaggcagagagctcaacagaattatggcttcgtcctccttttcaatctttactctcaaattattcaagtcaagaataatcttgttataatcatcgagatatttcttgagctctttggattcatccattcgaagagtataaagtttattcttgagatacaatttgttggcaagggaccttttcatatagattgcagctatcttattccacaatcatagagcattatcttcacttgaaacctctctcaagacttcatctccaaggcttcaatctcatatttcttcttcttgttatcgatttcattcattgcgtcccatctagtgcttctgaaattctctaatgaataagaaaggctttcatattgattctccataaactaaaatcgtttgatctagagaatttgtccacttcaaatctaattgatgtcatcttgaatagaatcttgattttctgaacttggttcttgtattatcttcttcgatctcccttactgctctgataccatttattgtgcacaaatgcacctacaagaatgcaagattaatcaagagaatagaaactaaaatagtagatatgataaattatgaaatggacaagagtttaacgaggttcaatcacaaattttgattaaaacttagatttaatcctcgggtaaaaaccgctctgttggatgtgatttccttattgatgatttgcaataacaaactaattataaactaggatcaagagcacacttttataaaaccagatgtgattcacaccattatacaaaatctcacttgaggcctcacaatcaaacacatgtgaaagctttttccaacccttgataacactcaataatcgcatagagaattcatctcattacaatctatatttaaatcttaaactcttataaaatgagtcctaagactttattatatagaacctaaacaactaggaatgtcccaactattttaactatcttgacagttggtagttagtagttttgatgattaggagtaagtaaactaaatctcatgagatctatagtttttataatattttttacaatcttttttacaaaaatatggatgattgtttttgtgttgttttcacgttactatatgaaagcaacaacattgtgaaaaaaagattttatgaaaaagaaaaaaaaaata

SEQ ID NO: 184087 - DNA, 4761 bp, Cannabis indica
cgaggcttcttaatatatatctaagagggtcatgtctaagacttgaggaccctgtctcttttcaaaataaaaaaaaatcaaatggttaatccaaatccttgtttactatacatgaaatccatcatcaacacaactcaaaatcattctcaaaaaaaaaaagaatcaatttttttcacaatggttagtgttgttattggtgcccccataatgtgaatcaaagttattttcagatttctaaaatttgaaccaacagaatatgtagaactatcattattttgtgagagagaacaagacatttacatgagtctaataataataaactttttgtaatgaaaaacaaacaacaaatctttctcttcttttaccaatgaaaacataaataaagtagttaaacctgtatttcatttccatgtgaagttaatattatatatatatataactacaaaaacatgacaaactcacaaatctgcttcaacactaccctcgagtctccatcatcatcgtcgaaagaaagactgctatagccgaaatctgtttgttggaatcgaaaatagtaaacaaacttgaacattcgggttcaattatctctaaaagtttaagtgaaaaaagaagtaatacctctaagcttgatgattatgaggagtaaccactgtcggacgagagtgacttctgttatcgtttctctccaaagctctatctataatcgcggcactatcaagagactctcgtactctttctcttgcaggagagttttgcacttgcatatcatcttcttcttcactatctattctcacattcacaccagaggactctttttcttcgtcttcaacaggcaaatacgagtccaaaccaagtcttcggtcttcttcagggttcttctctatatcatcgtaatccaaatctctcaaaatagcaggaagtgggaaagcaccgtcctctgactgcctagcccccatctcgatatcaattttctccttcgaactcatagcactttctccgaaatctggagtcaaagatgtcaccatcacgtgctcatcttccacgaaaaatgatcgaaatttgttcaatgaaggtgggattttagagaagaaagtttctccacagttgcctgaaactcccttgttatatggattctctttcttgtcatatcggtatcggaagttctcataagtagtttggtttgtggatatgaggtaaagatggaaagctgtaagaccaccaacgaaccaaacagctataaagcagtatgctattaggaaatccgaaaggtaatcaactttcatagcttctaaaacttttccatgtctcctaattatgtgaatccatgaaaacgtgaacacgtaaacgcataggatcgttgaagttgaaatgaatgcaaagaagaaccgataattacgctgcagcataatcaattcatcacaacaattaaaatcaatacaccataacagagcaaataaacccaaccatttcttccattgattattctgattctgatcacaatttagtaaacgtgctgcaatagttcaaattttcatgaatgttggcaagtggcatgaaaatgaaattagatttcgaaataagcaactccattttgaaattttgtttgtcaaattagtgtgtttaaggagaagaaaacaatgtgtataataataacttactattccgatgcattgaccgacccaaggacaatgatgatcgaatctcagaacacagttgttgcaaatggaacaatgagaagcacggggagggcggtatagcaaacaagtgtcacagtacttcacttttactgagtgaccattcacaagaatatcttttgttcggggtagtttcaaatgtggtgtcctgccattaacccattccatggatggtgttggaacatcggcttcatctggctcaagaggcctcgtatttctaggaacaatgcccggatctctactagatgttaggaagagaaatgtcaagtcctgcagatttttccatttgttaaattatatattaaggaaacgacataaacaaacacatcgagttccacatactctctcacaattacattcattctaagaaaaagacagatagttatcccaagattattacattcataagaaaatgaatcataactgtgaatcagagttcatggaaagaatgagaggaaatcgagagagaagaaatatattgctcaatcttgagctgattggcacctgagatatttatattactgagtttttacaaagctttgtcaaagcataacagaaaagtatcacaacaaacttaactaactttctgtttttgatataaagagctaactaatttgttctcctaataataactaagaggaaactattctgaccacttttaggatctaaaaggacagaagcattgagtcaattttcaaaaactaaacttgtcttacaatgtcataacggttttgaaaattcttagaacaccaatatacaccttcaactttgaaaaaggtaagcttaagatgctagttatgaaaaaaggatttctctttctttttttcttttctttattttaccatacagactttggcctattaagtaaagactaaagttatttcgagatcgaaactggaccagttgtgccactgccaaaagaaaatacttgaagtgataaattttttaacagaaatcatcaaatgtacattgcaaattaccttactatactatttaatagggtaaataatttttctatactatacctaaccgatttggaattttaaaaaaatccttggaagaagattaccataattcgaaaatgtttcctctttaaagatatcaatgctagaaagaataattaaaagcttaccaaaagagtaagaaatacgccgatgaccaatacgagactccagttactatgatagtagtaccgcatgtgatctatttcataataaacctttacacaaaaggcgattgcaggcccagctataaggaatacagatagaagaacagatgctgcatcggggccaaaaattaatcgcccgccacagaaaaatttctgtcatagaacaagaaagttgtgttaatgaaagtaggacaataactgccatagcaatgttagctccatacaaactatgcttccttaaattcaacagaagatatcaaatcaaagactaactaatgtgcaactaagaaaacaaagagaaaagaactctaaaaatgacaaagaactttgtaagaccaaaacttttcgtcttaaaagattcctttctaagaattgtgtttaaagaaaacagaaaaaaaaaatgcaccgtttcattaacacgaagaaacaacaaaaactctgaaaccactagggtggtcgttttgcattcaacataggcaaaacgtccaactaagactgagaaataactagcttatcatatggatgacgtggaccgagcaatttgagttcttatcttcatagttagttagatttttcctataaatagtagaagtacaacatgtgaataggaccctttaattcattttacattattacttgatcatcggagtccattttcacacgatgtttccatctttgtttaaacactatgatcgatttagccaataagaagaaccatttactatgcactaattactttcataattggatcttaccacttatgaaaagtaattaagtatctcaattttcggattcaataaactttaaaaatgtaaactttgttctatccttaatcactgttatttgacaagattagccataatgctaagaacactagaacaggactgagtacaggacaatccactcaacaagaaatgtaagtaagctatctaagatttctctattcagttcaaaaacatgaaaaattgatctatacgcataaaaataactcaatctcacagaacaacacatcattaagaactttagtctagcaaaatgatgaccaaaaaagtcagcaccttcatcctgaactcaaatcatgcaataataataatcataataatctatctatgttttctgctttaattaaatcagctgcataattatgagtacttttcaacagtttcaccactaaaattgatcatataaacataatcaaaggttacaaaaccacaaacaaacaaaaatccaaaaacattggagctcataaccaatcaatcattaataaataagcaaaataaagaaaacccaactgagatagaaaagagaaaaacttacattgcttcccttccaaacttgatagaccctattgggtttaactttctcctgaggagtagccataaattagaacccaacccaaccccagattctgactttttcttcttttttgtttaacagttctcacctataacttttttgtttaatcaaaaccccacttctccttcctccataaccccaaaaaagaacaaaacccctttaacaaaaaaaaaaaacccaaccttgaaaacaatttcagaactcaaaaactcaagctgggtagttacaattttcaaaaaaaaaaaaaacaagctttttaatgagctgtgtacagaagaaaacaaagttgtaatctttcttctgcaagtaaagcccttctcctcctcagctcaaagaccaaaaaaaaaatatatgtttttgggactgagatgagaggagtcttttcagaaaacagaggaaaatgaaagaaggattataccgaagaaaagaagacaactagatactcatcttgtctttctctctctctcctaaaataataaaaattcattctttttgtgatattattaatgaaagtttcaatctttttctctactctctctctct

SEQ ID NO: 184088 - DNA, 4120 bp, Cannabis indica
gttcaaacacaagtgcttgactcaaataattaaggaattgctgcaaaaaaaggttatactgcaccaaaaaacagccaattaattgagtcaagcacttgtctttgaaatactacaacataatcaagtttaaaatagcataatgctttgaaacactaaacaagttacattttgtgataaaacaaattacaaaaggaaaaaaaataattgtatttgttttctatgcaagagaataaaaaagaaaagaacttgaaaaagctttcaaaatttaacatgaaaaacagtttcattgtttttttcacaaaacttctccccaatacttgtaggcaagttaaggagaatgcgctggagcaagaagtgagagaatccaaattaaaacaaaaaaagtactctaccgttagtgcggccaaaggagatccatcaaaagctgaaagaaccagctcacttcttaaaaatgcctcatatagttgccgctacaccaccatgaatgaaagagttgagtatcaatgtatgagaaccataaaaataataaataaaataaaatgcaacagacccaacctgacaattagtcaatcttaaccacacaatgatctcattcttttgagaaagttttgcatctccattgttggcatcttcattgaacacttcagtcttcaagcgacgtaaaaaataaggtcgaatgcgatctcgaagtttctgtcaaacaaagtaacaaaagtaatattggcatcaaccaacatttaaaatataatagcagctacaattaaaaaactgaagaactaacaaaactaattaagtcataatataatatcaatactttagcaatttctgaaccagtgcgcttctccctctctgtggcatgcttatcattcccacgaagaatataatcttcaaaagtttccttaaacctgagaaaatcccacaaaaaatcataatgtgtgaagcataaacttattcaagcaaaagaagatgaagcacagtaatgacttactcttttttatcaccaagtagttcaggacagcagaagttgaataaagcccacagttcctgttgcataattccaaaatcatattatcccacatgcctacatgatcaagttttatgcaataaaaaggagaaaaactaaaataaaagggaaattcaatcaaaccatacacatacataccttaagattgttttgaattggagtaccactaatgattatacgatgagtacatggtatctcaagcaaacttttcgctctttgggtactaggattttttatgaggtgtccctattaaagtaaagaaaaagaaatagtgaaataaagaattaggagcgtcgtgtcatctagaggatgttcatagtacaatgcgggtataaattataatagtacaaattccaactgaatttcacttgaatcggcaacaaagtcctagaagagaatcaactagttggctgatatagtatttatggagacatgtctatagttcatgaaggcataaagaaaatctcttagaaataaaaaattcacttaattgatgattagaaaatacacttaatacactggcaaagctctttacaggcaacttgtcagagatttcaaactttgcaaaaacaacatattaattaatcagcacagagtatatagggaagtatcactgtagaaagatgctaggttggaaagaaataacagaatatttgaaggaaaggagggtccagtagaggatttgtgggagaaaataaggttctagacagcgtcatgggcctttaaaactaaacattttgaggagatttccttttttatgcagagaatggaaaaccttgttgactgtagtgctggtaactgttttgttctattacgttttgttgggctttttgctaaaaaatttgttaccacagttttgctccgccacacgtgagggttttcaataaattagagtggggatctaagacaagtgaccctttctcttttaaaaaaaaaaaatgtgcttcaaagatttccaactaaaataatttaggtaagtgataaagaaacttaaaccagttccagtttaaccatgtatagcactattatacttacttcatcaagtatcatataatcccatatgttaccatcctccctttcttcatctagaatcatatacttcatcaagttctccccttgtaaagattttgagtttgcccgcacaatatcatatgtagtaaggagaatgcctttgtcctacaaaacagcaaacagtgattagtatgaaagtccccaatacatgttcaaaaccaaacaaaagagaagcttaacaaataacgtggcttcacacagtcattttctttctgtgtttgggcagaaagataatgactgactaaatgaattaataggtattaagagaagaattcgatttgaattcaaagcataagcctggctgcatattttacttttaatacattataaacacataacatgaatgttatcctgatctaacttctgattctgcatttctaagtcaacattttaaactcgctatatcggaacaatacaaagtagacacattgatacctgtagaacatattgaagctcgtattgacgggctttcacacaggttccaaagtatctgtaataaattaatcatcagtttaccactaaaaaacatattattttggttataaaagaaaaaggaaggatagataggaaagcaatctcactctcttgtcttatcagatagaccaacaactgataattctttaatccaatgaggaagtaatgtttttggggccacaattaagacccgcttgatcagacgcgaatgaaacaatccagctaaaaatccacaaatctacatgataaacaaatcaaacaattcaatttcactggaaacaatcttaaaatagaatctttcaacagattatttctttatttccttacctgcattgtttttcccaaacccatgtcatctcctaaaattccccctttatccagacaatgcagagaccacagccacttgagcccctcacgctgatgaggatacagcatttttgctatattaccagaaagcttgtatgtatattttgcacccttcagagttatagagctgtcaccttccaagatgtcaactttgctagaaatgtggtggtctccagacttggtgctctgctttccccttgccacttccttactcaacacagcacaatcatcttcttcatctacctcctcttctttcacctggtatgctgaggtcttttgtatactatctagtttcttaccaacctcttcttttttaaactgcgagataaaatgactttcatttttgtgctcatatttactagatatgtcaccgtcagattcatcgtgaaggtcactgccatttttgtcatcccctctccccattacattattaacattcttctttgcatctgatgacgaatcagatgaatcagatttaagtgaaaatgaagagcctgcactagcatactcaggcgggtcaacttgtttctcttcttcaatcctttcatacttcggaagaggcagagattcttcaacaggattcgactttttggcatcttttctcttctcaatggacaaaaactcaagtcttgcactcaagttattaagaatatctctaatctcgttgcctccaccattttcctcattggtttttggattatgtggtggaggtggggactgaaaatctgtaattgcatcaaacgtgggttcgttaaacacattttctttctcggacttatcctgatcatcccgagtagaaagtttgcaaagacggcggcgtccttgaatctttaccttggtcagcttttgttctaaaattcatgcaaaccaacaaaaggttattaagtaaacaaaataggcttttcacaaatactatcttacgcacaaacacaaaaggtgtaagtgggcagtacaagagacagagagagtgagtaccaggagcaggagaagaatcaaactcggtgattatagagaagttcggaacatcgtcgtcaacgagccgaatttcactgtgatcgcccaatgaatcctcacgattctcctctgaaatcaatacaaagtgaatggaaaaacgatcattcagagctcccaaacttagaaatggaaaacaaaacccaaaacaacattcaagaaaaaaaaaaaaaa

SEQ ID NO: 184089 - DNA, 4706 bp, Cannabis indica
ttgggagctctttctccttgtgataattattctatttactccatattaggtttaagtgtatgttgctgaggatccagatcttgcttttaggttccagatcttgtaaactgaagattgatttcagttttttttttcttaaatatcaaagaaaattatttcttcataaatgaaaatataattaatctgtgcccttgccccttggaatttgtttagatggtgtcggttgaagaggacgaccttgctggtttggaagatgttagctctgataacgaggatgacaactatgaagcagacatgaccgatggtgaaacagcatcatcaggaaatgcttctctgaagaagactaacagaaagaaagctcgtggtatgttttacttgtcatacaattgcgataataagcttatgattttatcaaagaaaataataagctaatggttgaatgaagcgtaatcaattatgttcacagactcttaacttcaaaataaattcttttgcagtggatagctcagatcccataccattaatggagggtgaaggaagatcattccgagtactgggtttcaatcagaatcaaagggctgcatttgtgcagattttgatgaggtctcctaaacttagattattttattttattttatttttaaattattctgtttctcattggatactcaatgctttgtatttaccactcacttctgtgtgtgtgtgtgtgatcaattaatgagtctatgtttacaattttatgaatatttggttatggatctctctctttctccttcttcttccccttttttgtgggagagttggtgtttgtttgaattcctagacttctgtgtttactggtcttcttaccctggagaacaatgaacattgcaggtttggtgttggggattttgactggaaggatttttcatttcggatgaagcagaagacttatgaggaaataagagagtaagatatttctttgattcgatcctctgtgtgtgtgtgtgtatttataggtcctgctgaatcctgtaattaaaatctactactggttattgtgtgtgtttgtattgcaactctttaatgtattttacatcatgttaatctctagatagaataagatggcgtttgtgcactgcagatgttctggtggcatctgactgaaaatataatctcattaatgtctttatttaattagacagtgaattgcaatagtgatattactttgatgtgaatgacacatcaaatactacataaggtgcacaatctattaaccttcgcataaactgcacatggacataaaaatggtgtttttgcaacattgatgaggttcttgaacattttgaatgttccagccaaaatttaaaggagaaaaaaaaaatatttgtatgacacatgccttttcttgtttactcagttatgggactcttttcttgactcacatcactgaagaaattaccgattcccctacctttgcaggtgaaaatcctcgagtgctgaccttctactttttcaaaattatttgtaatgcttccctcttccatttgctttagttctaatattctatgctatataatttttgtctgtagatggtgttccaaaagatggactcaggatacaggatgtccttgttaggattgcagttctgatgcttgtaagagaaaaagtaagtgtaatagcaaagcttgatctttgttcttacctgtcgttgagatagagacttgggaaacatttgatgattaatccttagtttgtaaaatggggatttctttctttctttgaactgttagtataaatcttatgaagaatatcattttatgatctttattcctcttcggttgaatgttaggtgaagtttgctttagaaaatcctggagttccactttttaccgatgacattcacatgcgctacccaggattgaagggtggaaagttttggaaggaggagcatgattcattattactgcgtgctgttctaaagtatgtatcatcatgagtagcataataatggtgacagtttttttagcctcacaagtgactgcgtttgaaaaaaaaaatcaactcttttattattattgatgaaaaagatacaaatgggatagagtgaaatatactataatatgttgcatcttttgaagtcaattacattcagcttcacacataacatacacaacagggctatttaaagtaggttataaatgattaaacttttcattaatttcctggccaatttttaatgaagttttagttgtactatgcttggtaatttagagtgctaatgttagttgcatgaaacttttgttatacagattagcacaaatttggttgtagttgtaggtggagcagtttttcttttttctatgtatggttgctgttagtttatgttgtataacctgtgtacgtgtacagttccagtggtgaagtgtgtaacatagtcagatgtgctctaatatggtttagttgagttttcaggtgataggcttgtgtatgccatcttaattggaatatacttgtagctgtaatttcttttatttgacgatttaaccaattttattttggcactgcggatatatggcactgcggatatatggctgtttcatcatatgcgttgtttgatatatgtgcttgatggggcttcaagggtctcaagggatttttactatagtatcagtgtgaatctttttgatgtgtgtgtgagcttgctagcatataatggccatgttaaaaatgacacatgttccttatcatatacctgtttgaatgttcaaggcatggatatggaagatggcaagctattgttgatgacaaggagttgaagatccaagaaattatctgtcaagagttgaatctaccctttatcaatttacctgtcgccaatcaagctggttctcaagcacaaggtgttgctaatgttgctactacagttgcacctgcaaatcctccgaaggaaaatggtggggagactgttgtgacagctgatgttacgaagggaactacagatgctgcaaatcatgcacatttataccaagatggcaccatattgtatcattttagagatatgcagcgaagacaagttgagtttatcaagaaaagggtgcttctcttggaaaaagggctcaatgcggagtaccagaaggaatactttgtaagttgctgctttattttacctgtgaataatattcattaccttgatcacgtatctggcttgtgcagttgtcttctatctaatctctttatatttctatgttctcagggtggtgaaatgaagtcaaatgaggttacaggtgttgagccagataatgaacccaagttcacaaatatcccaaatgtgccaagctctctgtctgttgagattgatgcatccgtgtctgaacagttacctcaaatggaacccattggtaggtctctattgtcgtttttaatgctctgctgttgaagaagcacaggcatggtttcatatgtgttcagctaagtggttttttttttgggaaccatcagattcttcaacattctttttagctctttgttgtcacctttcctagtacattttagggccctagttgtcgggaacgtcccagaaattatttttgatgttctcaaaatggtggactttttcactattattattatcattagtaatctacctaatgaaggctagctatcagggtgcatattctttacaaaatttgtagtgtgtcataaaattgaagttagatgttgaagggccatttgcccatgattttggtttacaatttagacatattacgctaccctggagatctgcttgcctacttattgtgtgctttcgtattacatagtatctcgattggcttgaggtgagtaagattctggttgtctgtgcaggtcctgaagtaacagctgctgctgcttgtgatgataattcagatcgcctgcaactgcctcagctttataacgaggtaacccttgtgattatattatatgcatagattccaaaagaaccctaaaataaatgagaaaaggctttgctgtcttcctgatgtgtatttttgccttgaataatcgaatatcattttaccttcttactggcagatgtgcaaggttgtcgaggaaaccaccaccgaatcagttcagggatctttggccaacaaaccggctagtctgaacttggagaagaaccttgctgcaattgaaaccctttgtaatgatgtaaaccggattctctctactcaacaaaacccagatgcaaaggctgagccaaatgtcgtcaatgcagtgctcgccaaatcatcttctgaagatgacaccaagctggtaaccaaatttgaacctgaagaaggaactatactgatgccatgcggatcactgcttcagaagggacgctcgagctcaccagaaaacactggaaatgatgtggtgaccaaagcagagaagagtgactgagctggttatgaaagcagagaagagtgatcctcccagaggcagcctgggccttagagtacgccttctcctgggccttccggtagagataatcttggtacttcttctctgccgtagcaatgagctcatcccggaaggccttctccgcaaccggcgccctcacattggggcagatgacccgtgagaggttggagtcatccacggattgatgagaaaggataagtttggccttcctacaattctccgtggtgaccaggcccccgcatcaagatcggcgtggtcgtaggaggcgaaggcttggg

SEQ ID NO: 184090 - DNA, 2118 bp, Cannabis indica
tttttaatttgctttagccttaaggttcgtatcttatttgggaataatcatgaacgagactattgcttgatttatgattagattcaacaaaagaaataaattgttattagaatttagctttaagttttaacacgtcaacctatgctgatgtgtactttcccctcctttctgaattctgaagtaataatagaataatcattttctcccagacaggaaaagggcctggcctggcgcaaattttggattttatagtttagacccataattgaacaccaaaaaaaacacttgttttgaatatctcaacgacgatgttttgaaaatatatataaatctaaaagatgaactctgtccatgacctgtgttcaaataatctagaaaagaaggaaaatattatctgaaattataaacaaagaagaagcatgcaaaagacccaacaaaataaaatagtttgattagtaatgtaatagaacagagccaagtcaacaataaaacgcgcacccaccgaatcaccgacagcgtccagtccagtcccataaaatttgatatattaaccacccatgaaatttcaatcatttttcttcttttttataatactcatcgtcctccaccactacttttgcaaaaaataccaaattaaaaatagaaattatgcaatccatatgtaaattgtgtcataaatctttatattattatcaccatagcaaagttttgatttctgatttcttttctttaggagctataaaattattgtaattttttttctgttgcatttttttatttttaaaaaataatttattaggcatgctataatttaatttgttgacactaaacatataaatattaacttataaaaatatatctacatccttagacaattatttatgcatgtaatttttgtttgaattattcttaaattatgccacattaatacgtgcaagttttacaacaaaaaattgtctaaaaataaacaaaatgtaactaaacaaggacatttccaattattcttatagttcgagataattatctaaaaacagaactctacaaaaaaatatatataatttagaaaaaaatattaattagctctaaataatatttggttacaaagccttgttgtagcttatcagttaaagtgttattgttaattttaaaatttaagtgtatatttgtaacaaatttgataatatataagtatttatgtggctaatttttcttattaacatgtgttattcattttattgctattgatatgaattttagaaagaaatataaagcaatagcttatacatattattctttaaagataataagagagcaacaacaacaaaagaaagaaagaaacatatatttaactagtgttagttgagcaaagttttcaataaagtgatatagaattatttagaaattacataattttggtagttaaggattcaatttctagtttgtggaggtcattctcattcgattcattgaggaacttaacttgacatctgtccactgacatatcatttttctaatatttttgtgtttgtcaacatttaatcattcagaaaagatttggtattactgagtgattattaatttattactgatttaaatagaaccaattaataatgagaacatacatagttttcaatccctcatcatcatattatgtatatatgtatatatagccaacaagttcttagctgtgatgtggtaatttgttgagttgtgagttaggtcaaaccctcaaaacaactaagttatcatcaattattatttatttgtaatttcatagtttctatttttattttttgaatcattacctgtaatccattggatatatttatactacatcactttgcatatctggaaactcattttttttcgttagttatatattggcaggtgattaaataacgacaattaagccaattattattattattttaaaaaagtataattattttgctgcaaataataacaaatttaacaataaaataatgtgattaaaaactctccgatatttttcttaaacctaaacatcttggaaatgttcattgaagataaaatatatatcttaaaagttaaaaactagctaatgattttttaattaataaatcaatacaagcacttctt

SEQ ID NO: 184091 - DNA, 10599 bp, Cannabis indica
agttaaattttagaagatgtttggcaaaacataaaaatactataccattagagataaatagatcatatcatagaatattgtgttaatgccattatatgacattgattctatctttttttaaaaataatataatatttataattaaagcaaataatatattaaataataatgtgtaaaattataattacaatatttttaaagagtgttatagtgtttttattagaattaattaggtggcgtttggttagaggtaatgaaatagaatggaatgtttggttgcattttaaagtattggaatagcattccaatagtaattattcacggaaattatgaaaagagtaatttgcggtataaatatttaaatttaactctataagtatttggccgttaaatattaaattagtgtcattttcttattgctttaaattattatttaaataaaaaaattaaaattaaaatcagaaattactataatttacttaatagttcctctagaaattttaaaattataacttaaatattattagtatcaaaaatttatttatgtcataaattattattgcaaaatttaagtatcattaacgtataaaattaaataaaaaattaaatggttgttaaatttaggtatcacatactcctctcctctcccatcgagccgtgcctcactccctctctccgaatctccaaccgccgtctaccgtcttcctcctccgagggctccgccgttttccggtaatcccttaaattccatctccacttttgttgaaatttttattattcttatcaatgctatatttatatatctatacgatcttcattttggtagtgaaaggttatacgattatgttcatttctaaactttcaagagttggtgtttggatggttaaagagctttgtagaggtaatgctatattaacaattatgctttcaatcttactttctatgtatagtttgaatttgaacacttaatttagttatcatgttgaattttagagacaaaaatttgattctgtgtatattttggttatgtcaggaaaatctagaaccctaactagtgctggatatacacacagaccttctagccattacttgcaaacactggttagttttctgcttttcttatttagaaattgtataactttatatatgtaaatgtatgtatacatgatcttattgattttagtggttttgctcccttctctttttatctgattgccctaactatgttgagatccaagatcctattttgtggtttctggaataggtttatgaaattttgtttgaaaagggaagaaaaaaaatcaattaaaaaaaattaattagggtttaagggggaagtttcattacttttgctagcatttgtgcaagtaatttgatgaagattcactccacatggtttgatagagcaaaatgtttgtaatgacaagatttttgggaatatatcagagaatgaaagcagtaatttggtgaaatgctaaagagctctctaagtgtattgtccaacacctttttattgctattggtcctaatgaatatcggttcccatacctttgaatttaaatactagggtgttgggcacccctagggtgctttatagtaatgcaatctttgaataatttgctattaaattgatattgtgtactatactgcctcaaactatgttatttaagcttcacttcaatttatggagagattatagcttcccattattttctatttttataatgtttactattaattgacgttttaaagaacttgaccagtcagaagctaaggtttcaaggggagcaatctttcaaaagcatcgtcttttttcttcagtaaatagcgccccttcggaggaagggagtgagccggaggaagagtaagtctctttggttttcttatagccaagtttatggcaggacatgagttcttaattaaaagaaatgttgtaagtaaaagaatgtaggtcattagattttccctttatttgtactaaattattttattcgatgacatgtctggatattgcagtttactagtttagtgtatgtattctgtgttcttatttttcagtagttctaccagtttaataactagctcacaaattagcattgttgttttaattttttctttaaattgagatttgcagccttctcacagattttcttttctgtctatgttcaggatttctgtgacatttgttgataaggatggtgatgagaagctcattaaagttccagttggaatgtctatgctagaagctgctcatgaaaatgacattgaacttgaaggcatgaactttctgatgcttattaagtatagtataatgcaattttatattttccaaccttcataattctgtaacattttttttagaaacgaaacatcaaacttgtatgatttgtagaaactaatacaaagtggctcaaaaagtcactcagacaaagctaaaaccctcgaaatgcaagacaagatattacaaaataactcaaatggctcttttacattatgcgaccataaaacatgtccatagtaattgttttcagcctcagtatcttgattcttttattgatctgtttcatcatatatcatgggatggtatatctttgtggctttatgaagtaatatcaagttctctgatttacgaaatctaatattctgcaacaaaatttataacaggagcttgtgaagcctcacttgcatgctcaacatgtcatgtgattgttatggtaagtttttgtgacatttgcagtaaaaagaaaactctgctttgtaaacattttctggttgtgatgaataataattgaatctaagtgtaggatatggagtactacaataaattagaagacccaactgatgaggagaatgacatgttggatctagcttttggacttaccgaaacgtaagaccacaaacttgcacactatttatacatcttccaatgtcattcgggcaagattaaaattcatgtttcgattcgatattcttgcaggtctcgtctgggctgtcaagtaattgcaaaacccgaactagatggagtccggttagctattcctagcgctactcggaactttgctgttgatgggtatgttccaaaaccacactagctagatgtaataaaaagcacacatttttgcagctcctgtattctattggatcaagatcaattattggtttttgagtaacttatattgatgagttctcatcatctaaagaactgaactagtgtaatagtagttctcatgatttgagggaattttcctgaccattttaatttatggtatggtgtattatgcaataagaaattcttggaagagttatttgtattggcttttgttgcctttttaataaggtatgcttagctttgggcttcattataagctcagcagttgtatgtaatacattatacatactcaattttgaagatatgaattatgcattaaagtttagcatataccattactcatataattattggtatctttactataaacttgttctcaatcttttgaaacgactctgttagttgcagaaatacaatataaccattgtaataaaaaaaaaacatattaaaatcaagttttttttttaattatttatttatttcaatagatagagcaaatttatccatacaagttttgaatgcatcttgaatttacgcacccctaacttaggagtggcaattcgtagtcgtgtcgtgtcgaggtctatgtataacaggtatatgctcaatttgaacacaatctgtttaataatcgtgtcagaaaatgacacccgaacatgatccgttataaatgattgacctgacacggcctccgtgtaacttgtttataagcatattttgtttaaacatttcaaccaataacacgtttatgacatatttaataaatttataactcatttttgacttgttaaaatagcaaaataattttaaataggtcattagcaggtttgttttgtgttagtcgtgttaatccgaacatgacctgtttattgaacgggttagataagtcaatccgaatacaaccccatcttatagtaaattcaaacccgctaactcttgtgcaagtttcaagttgtttatcgtgtctgacctgttttgccaattctagtctaactcatgagaggacccataataagaatattcaaaagaattggatagcaaatttaaaatatcaaataatagaaatccataaacatttatgttaagacaaaacatgattcaatgttatacaattaaagtctacaaaataaaaataccaaagctatcatcacatgaatctacaaattttgttcaaatgaatgtaaggggctcaacaaacctttcctccaattccaacattaggcatcatactttttggaataattgattaacaacttacaaaacacacaaatatttatatatatatatatatttattaaaataaattaatttggaagagtaaaatttcaatctagtaattgaaagaagaagaaaactatctttgagattcaatgatctttcaatcttgcgaattctccaatttccataacttataaaaatataacttagcataaaaccacaaaagtataacaatgacaatgaagaacacaattaacacaatatattaaactaacacaaagagaaaacgattaaggtaaaattataataaataattataccaaagaaaactatctcttctaactagtaaatgaaaaacattgttttgttacaactattaagtttcaatttcatttataaagcatttaatttgtaatattttaaaaatgaagtatttttacaacattttttagaagaatttttacaaaatgagagacacatccctaacttcgtacggatatgtaaattaaagtaaattaaatctcatctcaaaaatatattttaaaaaaatagacaaattagtttatttatttgttctaatagaaaagtcctttttaattcattttctttatatagctatttaaaatcataaataaatttttaaaaaaattgaatattttattatattgaaaataagattcaaataattacaattacaatttttttttaaaaattttacaattagaccaaaaagttttttttaatgccgaaacaaataaaagatcaataattttaagtgatgcaatataaaattattcaaaagaacttgaataattttgtgtcatgtcgaacctgtaagatctcgagtctatttgtgacaaacccgcaaatcataacttaatttgtcacccctaaatattagtggtgctcaataacaaaattccttaatcaattaaatgatatgatttagtttagtgaacattgaaattagaatcgcgtttatcccaatccagaatagtccaattcaaacaaacaaacaactaaacatatataatggtttggttcagtgttagacacagtcccgcctttattttatttcttatttttggcgcaaattcatatataaatatattaggaaaaaaaaccttccgattccataaactcaatagctcttccgagtcgactcagtgatttccttctctggtaagcttttctttctctttttcaattcttcgaacacttactgtgcattacacttccgcttatctatttctttatgcttctgcattattttcttttcagttagctagggcatgaatttttatcgattactagctttcgatagcaacagattcatgtaattataacatttgcgaatagtttatcagctttgatttcagttcaatttctggaatattttgtggattactttctagtgatttaggagtggaattttggaccgtaattttggtttttttagggtttattgttcaatgaaggaagaatttgctgaattagaggaaggattaagatcaacatgagcggatccagggagaattcacctgattggctgcggtgttttaaggtattttttgtaagaattattacattgttatgtttatctaagttgcaatgaatttgattgtgtttttttatagatcaatcatcaatcatttgctaaaaaattgtttttgttaactagcctcctactgagacaaccttttgaattatcatcggattctgtggtttcttcccctgctggtagtccttcaaaggatgatggatctgatagtgaagaactgactttgggtaagtcttcagaaaccttagatgacaatgagaatcttggaaaaattcttggtgaaagtggtggtaaatcttcgagatcaaggttaaggactccgaaaaaagggcaaaagttagaagatggtaaatctttagagaagaataaaacagccaagaaaagaacaggtgaataaaaaaagaagagaaattgagcttacattgttcttctgacttaaactaaaagttttatgagtttgttttgtgatatgttttaagctagaaagggaagtagatgctaatttctatggagctaaatactcaaaactttaaataccacttatttgtaaattgtgcaggtggtaaggttgctgggaaagttcccaagaaggaaactgatgatgtaaagttctgtgtacttatgtaatttaaatttgtttattgagatccttatttgttatatttacggtcatcttctctatgttgttgatgacataaaaataaaatttcatgtgaaccaggagttgaaatcctcagtttggacactgtcttcagattccgagtcatctcctcaaaacagtcctacagcggaaaatgataagcaagattctgatgatgagaaaatttctcaatgtataggcagagggaagaaggcggtccttggcagtagcagtgactctccctctaagaaggcttcaaaagataaatcgccaaaaaaagagctgcaagtggatggccttacaacaataaaagaaaagaaaaagagtagtttgaagaaagaaggtactaataggtggtatattagttgctttaatttgcaattattttgaaataccaaattaccaaaaccacttaaatctgaaagaacataacaatgtcaaggattttttcttcttggtctactctcttagaaagtaactttaaaaagacaaaagtgttaatttaattgtactattttttttttcactatcttcgaatatgagttttttgctttttattccgttgctttctcacatgtagcaagtgatgatgtggaaatgaaagaggaaggggaacctgaaaaacaagttgaatctcgagtaagaatactaagataataagaataaagttgttcatgtatcttttgcctatgtattgccttagctattctatgattttcaggtatcttctggaagatttcctttgatactctccgagaaagtccaacgaacaaaggtagggtacagttaaaattatttgtcatggtcttttcttttatggtctctaagattgctacttaatgtttaccatgttatctgctgtgagattggttccatatttcgaacaaaattatgaaaaagagttattaaagacgttcaaatgtgtaaattgccacacctcaaaccgtaatgaaaatgaaaaatgagttgattaatgatagacacacacttgataggaatttcctagcaattaattaagaacagtagcaaaagggtagaataatagtgctaaacagtagcaaaagaggaaaatagtagctgatatattttgatataaaagataaagagaacaaggttgctgggtgttcgagagacccagctctctgccaagagctaatgctcactttaaaaattaattctctacccaaaacccctctgaaactctcacatacatactatctcaatactccccattacaatgaccaatgtatctttttatttatcctaaggcctaacaattaattaacctaaactttgcttcttgtggctgtgcaggcacttgtagagtgtgaaggggattccatagatttggctggtgacataggtgctgttggacgagttgtcatttcagatgctgcatctggtgatcctgagatgtacttggatttgaaaggtatgttttcttcaaattaaattatttctcgtgtcaacgatgattagtgggttagataagtgaatgatattatctgatgatacctattaccttagcgccttaccaactgtcgagcaatatctttactttcttcttttattttttcagttgttaaattcaagatttatcgatgaaaaaagaaaacactcactatgaaattcctcggctcctttattttgtttacttatttttactttggttaccttactttcatggttctttgtgccttttcatcctacccctgtttttgtgtttggtcttatatctgttgtaagtaattgttttgcatttttgtacacccagctatttgcattaatgctctgtgttgattactgtttcaggaaccatatacaaaacaacaatagttccttccagaacattttgtgtagtaagtcatcagtttcctctattaaaattcatcacattggacataataatgtcctcgtattgtcatgtacgaatctcagctatataataaatatttgacattaaatttagtatcgaactcctatataataatgatgatccatgttcttcaggttagctttggacaatcagaggcaaaggttagtacttccttatttctctcttgaattgtattcattgctggatttgtatggtaattgataggtaactcactcttattgttttactcttgtccactttttacatatcttcaagagaggtaccacttcaagtttcgattcctaattttgtaagagctggagattataaacaaaactgactgaattactgttctttgatcagatagaagccatcatgaatgacttcattcagttaaaaccacaatcaaacgtctttgaatccgaaactatggttgaaggtaggggaacttttttctactgttgggctgagtcatgaatctaatatggccttaaatctattcggttttttctcttctcctgagtaggaacactggatggtttctcatttgattcggatgaagagggtgaaaaggttccgaaagctcaacaaactgagctcggtgaagatggtgaagagaaaactaatggaaagtcaaaaggaaaagctgagaaagcatcggtatggatccaacctttaaagtaatattagcttatcatttagcaaatataatatggtgcatgtatcttgatgacagggcgttgcacgaaagcggggtagagctgcgggagggaaggcacaaccgcaaaagaaagtaaaaaggaaagctccagcttccaagaaagccaagggcaaggccaagaagtgaggataaacttatatttttattattcattttagttctgccataactaacaatcaatagaatttgtattatgttcaattagatgacactagttgtaggtttttatgaacatgttggttagaatttatggcgaaataatgggatcgatataccttgaaaaatttaattttaataatactgaaatatcatattacccttataattatgttgtttctgaaatagttgtagaaatatttggctacttttcctttgtaagatttatatttggtaacaatatcacaatgtacattttgagaacataacaaaagccaattgatgggatctaatgagctatgatctgcatgcatctcttcaaattagattttagaacaaagttcttcctcttggctcattgctttagtagctctcgaggactcaagacttcagagcagttagaagtgttcatgagattagcttgaggatcagaagaacgattggcagcagggttggaagtggcaagagtgtgttagaagaagagaccatccgtactgctgcttgatcgctgtggccatatactggcatcgatggctgttgtatcggtattgatggctcttgaactggtatgattggtggtgccaatccacctactggtatggctggcggtggtggtgcaagctcactccctggtattgatggctcttgcaccggtatggttggtggtgccagtccacctattggtgtggctggtggtggttgtgccaaatcggtatctggtatcgttggtggtgccaaaccgctatttggtatcgatggtggtgcaaattcacctcctggtgttgttggaggtgtcaatccattgcttggttttctcacccttcacgacatgattaaacgtcaacaacaagaataatttagtagaatttttactttttacagaaaaaaggaaattgagttattcttttgaaaaataaagagattgaagaaaagaagcattacccattatctttaggacagaagagaatggagtactcataagctttgcaagtaaaagtactggtgccatcatcaaaagcatagctataggctcttgggcaagcgtttttgaatatggttgaatagaaagaaggcttacatgtggttggattagcaaactgaccactgcagcaatacttgtccaatccaaaagcttcacatgcactcttacatcctatcacaccactcccaccatctccaccttctcctccaaccacttgaagctctttcggacaacctatgtcatatcggttcaaaacaaaaacaaccctattttaattttcaattataacaaatagggttggccctaagattggatgggtcttaagaaaaaaaaaat

SEQ ID NO: 184092 - DNA, 3517 bp, Cannabis indica
gtatacgagttgatcaaacctggcccgattaacaaaacgaattatgatagaaaacttcatttgtagagaaaaaaagtcaaacctttaagacagcaacaccaccggaaagctttgcaagccgctcttgtaacttttctgtatcgtaatctgaagtgctcgattcaattgatgacctcagctacaaaattcaatgatttacatcagttaataataaaaaaaccaacatgtttaaataacacgaacaataaaagcaattacaacaaagaaaactgtatagacctgttcacatctttcttcaattgctttcttgtcaccagcaccatcaagaatgacgctatcatcctttgataccgtaatctacaaaggcagaaactcggtcattaatcgaaactaaaagtttactttgcggttagcacgcaagaaaaatgtttgatgttattttatctcacctttttgcatgtaccgagcacttctggtccgactttttcaagatccataccgagctcctcagttatgacctgtattttatataaatggagagaaaatgtttcaattgtttctttatcacctagtaattccatacttcaagagaaaaaagttttaaagagcggcgcacctcccctcctgtaagaacagcaagatctcgtaaattggccttcctgctttctccgaaaccaggggctttaatggcacaaaccttgaccaaccaacacaacatagaatgtataatgtcaatatcttacacgggaagaaataagattgccgaagaaaagattaaaacttaccttgattccagctcggagcttgtttatgatgagggtagcgagcgcttcgctttctacatcttcagcaacaataagtagagacctctgattctgagaattcacaacaaatcagatggaaatcaaaagaacacattttaatcaaattctataaaccccgaaaacaaataaatataaattaccttcaaagccaactctagtatcttcactatggcattcagattagagattttcttctcatggattaagataagtggattttccaattcctgttataaataataacaagacctgttaatatccgaaatgaggcatgttttcttaggaaaaaaaaacaggtaaaagagtacaaacagtacaaagatccaagaaggatgagcatatgaagaaactagcgattaacgggaaatatattcttacacatttttggtttttctgattggtgatgaagaaaggggaaatatagcccctgtccaacttcattccttcaaccacctctaattcattttccaaagtattcccatcctacaagagataaacacggtaagatttcagagaatcaaacacaattcctagaacccaaatatatatataaacagggaagaagataaaaaactaaactaaaaaacatgtacaacaaataagatcataatcctatgcacaagaaaaaaaaaaattggaatgtgtgtctagcaaaggagggaacaccataaaggccaagcaaaagttttattacagtagtttataaatagaaaattagaactccgtttcagttatggggaaagaatttagaattgagagagatctagccatcatagaagagaaagcctctcgaagagctattttgtgtaattatttgatgattaataaaagcactcgcagtagtgaatacagccgagtaatatattttatgtatagaaaccattcagcattacatgaaataatagaggagtccaaataacttactgcaatggtgatgacaccctccttgccaactttctccatggcttttgctattagctcaccgatttccctttccccattagctgatattgttccaaccttccaggaaaattatcatacaacaatgtcagttaaaactatatttccatctcttaactagttttaaaccaaattagagcttttaaacccacctgtgctatttcttccgatgtactgatcattcttgccctgctcttcaagtttgttacgacagcatcaactgccattgtaatcccacgccttaaatccatagcattcatccctgcagctactgacttgcagccttccttaaatattgcacgagtgagaactgttgcacacgtagtacctgcaaataattacacagacctcacatcagtaagaaagctcacaccaattaatacacataaagaatcccatcttctgataacaaccatttgaccacaatatcatccaaaataagagctgaatgttttataaataaaaaatgataagaacattacaccaaatactgaactaaaacatcccactcaaccaccaaaatcaaactaatagtaatttagtttaatacttcacgacaaacacctaccatctccggccacatcgttggtagcatttgccacttgttttacaagactagcaccgacattctttactctatccttgaattcaatactttttgccacagtaacaccatctttagtaactttaggggcaccataactttgctcaatgacaacattgcgaccctgcaaaggagaaatgaaattgaaaaccatagccacaagttgatcacctaatcaaaccaaataccaaaaatctctccaaactttgtggggaaaacaaaagaaagcaacactataattcatgtcaaattaaccatctaccacaaactaaacttccaatcagacaattgcattgtgatcaaatccatataacaacaaaactgattgtgaaaatactacactaacgaatcagtcaaataactcgtaactaataatactaaagccactcactttaggtcccattgtcactttcacagcatcagcgagctcttcaacacccctaagcatcaaagcacgggcttgacccccgaatttaacgtcttttgctgcatagttcctcgtccaactcaatctactaccaatctaaatccaatgggaaacaaaataaacatatttgaatttgcatttgcatcatcaaaaacccaaacttcacatccaaatacagtcatatatatacacacatttagaaattaaacgacctagaaaactaaagaatagtcaacaatacctgctgagtgccattcttagtcaacctatgtaccccaaacaaagaaaacacaatgagaaagatacccagatgagaaaacatcaaaatgagaaatacccagatgaaaaaaaggccaaaagaaactaaatttagcagtaattaaagtaaaaacctggctttggagacgagggtagtggcgaaccggtgcatggtgatcacttagcagagtagggaggtataaagtttagagtttcgacaaaggaaaaatgggaaagaacgaaaaatacagatgcagagaagggaagggctgtaaagaatctttctttcttcacgtttttagggtttaagggtttaatgttgttgaaggaggcttaaccggccgagaccaagtacggtaacgatgcagaaatgttgaaggagaagattcatctacacatttgggccttttcttggatctgggcctagtgaccatgttagagaaa

SEQ ID NO: 184093 - DNA, 13722 bp, Cannabis indica
atatatatatatagattgaaaaagttcaagatgtgtaaagttccaccatatggataggctttcatattcagcatatacatagaagatcatgatgaactagtattacacaataaatacaccaaaatacacaattacttatacattttacacaatatttgcaatatgattcacatttttattttttgttcttcttgtttaccttttcattgcatgttgatctcattatatatataaaaacatacaaattactgatttttctttctttctttcttttcggtaatatacaaactaagacaaattaaggtcatgagtaggtgaccatataacatctcagacagtaattattcaagttattgcatcacatatatctcatgagaaattgaaagtgtttattgcgttttgattatttgatcaccgcaaaaataaaagtgacaaaaatatgaagaaaagcaaatattataaatatatatatatttaaatataatggtgtgtttatttggtgatgatatatatattatgtggttactattttcttctttcaggtaggcctatgaacaactccgtctccacgtccatgttatgacgatgatgatcatcatcattaatgttattattatttactaccaccatcacctgatcttccttctcttcacttcctgagctaactttttgtaacatcccacactgaaacatgtatatgtacatttctctttaaaaataaataaattaattaaacatatatttttttataacaaataagaattattgataccttataaacatatatatatatatatatatatatatttggcgacatgggttattgatcaccaatagaagatatttatgtatatatataaacatatataattgttttgatataactagctataatatatgtgaatcttgaattagattataagtgtgataatgttggtgagtaaagaaaggtacctgtacctgttgcctcagcttagcattatgctccagtagacttttctcctgaattgtcactcaatagattaataaaaatatgtacaagagtatatatatatactaaattacgattgcaaagttttatattcttcaaaccatgctattttctagacattattataattacaatatggcttttacataaatttgaaaaataaaataaaatttcttgaagaaaaggattaaaattaaaattttagaattgataccaactagaatatatacgtataggataagcaaatgagatatgttgtgtcaataaagccaaaaaaatgaactagacgatcagaggtaaagtatatacatatcatatgatagaaatattaaactaaaatcacatgtattggaattatttaaagtttggtttttttatttattaattttattttggcatgataaatttctaaatgttaacctgtttaattaagtactccagaactaaaaaaatgttgcacttaaatttctaattttgtttcattattaaaaaaaaagtttctaatcttataaatagtaagaattaagtcccttcatttttttttttttttatctatttgagttgacaaaaagatagcatggcatggtcaaggtaagacaaaaatataaaatttattgtcatatatattttgtattcaatgactattttgctatatcaggatactttaaagaattaattttcagtaaattaatgttataattagtaagcatatacctcttgcttaagtttctcaatctgctccctgtacagttgattcttgagtacaaaagagttcagaaatcagctctagtttgactttgtattttggtaaatcaaaagacaattctatcaaatatgctgcatgtatctaacaaccaaaagatgtgaaaaatatatttattttaacatatctataaattatttatatctgtatatataatgggcaaaaacattaattaaaacccaaagaaaatagtgtaagaatacttacaaagaaacttagttagaagacatcattattttgaaagatgaaatttgtgaattaatttgcatgcattatggatgcatatatagcagcccagctcatatgtagtgcaataaaaaaaactgagaaaagaagtttgagagagtgagtgagggagtgtggtacctttcttgccctgattttggctaagcttctctccaactgattctctatttgatgtagctcttggaaggaacatgactccaaaccatcccccaaaagcttcctacatatattataatacattacacaaatatttgatcaatatatgtagacgaagatggctgatcaacatacaactatatatattaattaactaaattaactaacatatattacgtatatgtattaactaacattttagaaacttcaagatgatcaattttctttgccatgctaaaggaatcttccttacttacagcagcctgcaataataacccaaattaatccttcccatgtcaaataaagattacttatgcatatataaatacttatgtttatatatcattgaaaaagattatgcaagctaataacgtagtgtgcatttgttggtgaccaacttgtgtttgaggtacagcttccatataggaaaatatatcttgaaccaataaattaagtactaattataagcacatggatatgttcatatatatatatatatatagatgaagctatagaatatatatattcacttgctacatgtccttagtcttttggtattctaccttgctgactcagattgccaacttgtcatttcttagtattagttagttaaggtttactattttgttatatgcttatgtcttgctggcatgccttgtgctcatctataaaactaaccacctaagcttattgttagttgttatttagagctggttttgtgagttgagagaaaagtagagaaagagtgaacagtggtgagatcgagtgattgagagagagtttctccgtgtaattgaagttatattacaacagagtagagtgttgaggagccatttttgaaggcttgctcttagtttgtaatctctgtgagacatcatagtcaatgactaagaattgaaccctacaatcaagggagttacaaggggattaggctccaaaaaattatttgaggaagttcgaacctctttaagttgattgtgttcatttactgttttatgtcatttatatgtttgatgtatgttcttgataaatctgtgcaagtgtgtgtgtttgtttagtgtgtgcaaactgatgttgagattggagttgcgactgagatcgcaacagtggtatcagagctcaagctagagctcgttaatctcagaggtgtggttcaagaaccaagattcatcaaaagtcgaagaacaaaattgtagaaagcactgtcttgatggaccaagaagatgactttggtcaaggtggacatagagaaattcagtgggaagaatgacttatgcttatggagagaaagatgagaactcatcttgggaatctcggattgaacaaagcactatcaaaggatgcaatcaaagtggcaagtgtggaacaaaaggattggaacaacacacttaagaaggttaagaacaccatcattctgtgtcttgaagatgaaattttgagaaatgtggtgaaggagaccacaacaactcaatgtggtttacattggaacaaatgttcatgaccaagagcctgccctagtagagtgtatctaaaaaaaaagtttaatggattcaagatggatgagagtaagtttctaaatgattatctgaatgagttctatatgttggattccgattggaatagcttagaagtaaagatcaaggtagaagataaggcaatctatatgttgaattcattctctactcaatatgagaaattcaagaatattatcatctaatctaaagacaccttggtgctagaagaagtaataggtgccatatattcaaaggaattatctcttaagcaaactggtaagcttcaaaagaacaactcaaaggcatattattctagaggaagagaacaacatcgaggcaatcaccatcacatagtaaaggaaagaaactacagtactaaatgaagaggaatgtctcaatctagaggacccaagaccaacagaaagtgttatcattgttgcaagattagccatatcagaaagtactgatgtgaactcgccaaaggaaaatgaaagggtccaagaaacaatgatccgaatgatcaagatcctaaaatattaaattacagtgaagattgcagtgaggatggtcaagtgctcatagtggaatcaagacctgaaagttctgcaactgccatgatcatcaagaatgagtggatcatagactctggatgcacctttcacttgacaaacaataagaattagattagagacatgaaaatccaaaataataggaaagtaataattggaaatggcaagacctatgccatagaaggaattggaaatgtgcaattcaggttgaaagatggcactattaaagtgatcaaagacatcaggtatgttccaaatcttactaaaatttgatttcactaagtcagtttgatgatgcaagttatgaatacaaatgctgcaatggaacactaaaaatatgctaaggagccacgattatgttgaaaggagaaaagcaaggagggttgtactatctaaaggagaagctgtgattggagaggcatctattgcaactagagaaccataagacaagactgtgttatggcatactaggcttggccacatcagttaaaaaagtttgcatgttcgcaacaaacaaaatgtgtttggtaagcataaaattggctctctacctttctgggaacattgcatatttgataagtagcataaggttagttttggaaaaggttctcataactcaaaatatattttggaatatttgcatgttgacttgtggggacctgagaaggttcaaaccattagtggaagttcttattttctctccattgtagatgactattctagaaaattttggaagcatgttttgaaacacaaaaatgatgttttcaatgcctttaaaacttggaagaatgtaacagattacttaacaagaaaaagaattaaaaatctaagaactaataatgatttgaaattttgcaatgagatatttgaccaattttgtgcaaataagatattatcaggcataattaagagcaacccccaacagaatgaagttgctaaaaggatgaactgaatactcttgaaaaaatcaaggtgtaatttgctgagtttaggattgccaaaagaattctagggagaagttataatgacaactacacacctaataaataaaagcctctctagtgcaatcagctttacgacacttaaggaaatgtggtcaggtaaaattccaaacttatcttatcttaggacctttgaatgcactgcttatgtgcatcaaaacacaggtaaacttgaacctagatcaaaacaaatgcattttcttaggatactctccaagtctagaaatgggatcaaaataataatcagcagggatgtaatattaaataaaataaatttcccttgtagtactaaccagaatgcaagaaaaagggaaaaaaattagctctgaagcaggaaaagagagccaaaagtccaatgttcaggtggaacataaaccagaaactaagaagataggtctgatggacaaagagaccctacagctcaagtggaacctaatctagaaaaaacaaaagtagaagaatgaggagagtactaccctgagcaaccagacattaaaaattaccaactagctcgagataagcaaagaagagattccaaacaagttaacagatcgagtttgatgtctgggatgacattattgcctatgccttccactatacaatagagctttccacgaaagaaccaaactaatatgaagctacaattagagcacctggtgtaaaaaaaatgggctactacaaaggatgagtagatgtcatctttgagaaagaacagaacttgaattgtagtcacaagacctaaagagaaatctattgtataaaaaaattgatattcaagtatcaagaagatggagagcatattaggtataaagccacgttagttgctaagggattcactcaaagaggggagtggattttaatgagatagtttccccaattgtcaagtataagacaataaggataatgctagctattgttgttcaatttgacttggaacttgaacaaattgatgttaaaacaacattcttgcacggtgaagtggaagaggtgatattcatggaacaacctaaaggatatgaagagaagtcagttgttgaaatggtatgcaaactacagaaatccttgtatggattgaagcaatcacataggcaatagaataagagttttgacaattccatgatcaaccaaggattcaaaagaagctttcttgatacctatttgtatttcagagggtatggaattaaggatgttgaatacctttttatgtgtgtggatgacatgttattgattagcaaagagaaagccaagattgggaacttgaagagaattcttgaaaccgagtttgacttgaaaatacttgggaaatgctagaagaattttggggatagacatcaagagaagtaaaaagagaggaaagctaactctctgtcaagaaaactacatcagaaaggttatagatgagttctctatggttgtctctaaacctacaaaacaacctatgacaagccaataccaagtctctaaaaaagtagtgtccaagtacagaaaaagagaataatgaaattaaaaagttccctatactactgcagttggctctgtcatgtatgttatggtgtgcaccgagcgagatttagctcatagcatgaggtgcttgagcagatacatgagcaatccagggaaggatcactggttggccatgaagtggatgctacgatacctagttggtacaactaaggagtgtttggtctatgaaagaagtaaatgaaaagtcattattagggttttagtgactttgattatgctggtgatagggactcaaggaagttcacttctgcatttcagttcctagtgtgtgggaactgtgtcagttggagatctcagctccaacccacagtggctttgtccaatacagaaactgaatttattgctggaaatgtatcacattacaaagatcttttaagatcaatgatcacattacaaatgtatcacctcagacattctgaaggaacttaaactgtttggaggaactcaaactgttttatcttgaatctatggattcaaggcattctaaaggaactcaaactgtttgaaggaaacgtggtgatcaatttggacatccaaagtgttattcatctttgcaagagtcccatgtacattgataggaccaagcatattgatataaagtatttttttcataagggaaaaagtaacttaaggccttgtggagattaaaaaggtgcacactagtgaaaattcatctgatatgggaaccaaagtgcttacaatgagcaacttcaaccactgtaaagcactgctaagaattgcaataaactgatgagattggatatttaaactccttgtggcataattgttttctttgtaaatataataaactgagatggaatttgataatttcagctcatcctagtcactttccacatgtccttaacctatttaattctacccctctcacttggattgccaacttgccatttcttacatcattctgttaagtttcattgtttgttaaattctattatgttagttatgccttgttggcatgtcttgtgctcatatatagaccagcaacctaggctcattgttagttgttggttagagctggttttatgaattgagagaaaagaagagaaatagtgaactatggtaagattgagtgattaagagagagagtttctctgtgtaattgaagttgtattacaatagagtgttgatgaacacttgttaaaggcttgctcctagtttgtaatctctctgagatatcatcaagatcaatggctaagaattgagccgtacgatcaagggagttcagacaatgagattaggctcccaaaattatttgggtaagtttgaacctctttaagttgattgtgttcatttagtattttatgttcttaatatgtttgatgtgtgttcttgataatttgcacaagagtgtgtgttggtttagtgtgtgtagattgatctctatattgaagttgagactaagatccttacatatatatatatatattacctgtagatcatgatgatcatcttgagaaatagttttattagaggtgaggcagctgccaccatccttggttctcctttgagtataccgctcaatggtcttgtttatgctgaagcatctccaaggaacaacagtatcatcaaaataaattagaatataacgtacatactgagtcttcttaaatctatatatatattatatatatatatatatattcattctttcacaagtcctatatagacaaaagtaataggacataccttttacacgtagcacaaatacacatcaaattaactacctataaattctgactcaattagtggctcagagataaaccaaagcatttcaataaaatgtacatataggtccaagtttcaacaagaccaataacatcaatcaaattataatatgttcattccattcatacatattgaacccgatcaacaactaattcaagttaattatcaattttaattaagtaattatgttagttaattgctagtctagttacttggtcactctgacggagttcgttagttgccttagggacggtcaacattgactgacgagtttttctattagttttctaacacagattatagcctataaataggcatcagatcatattgttttccctaatgtaactattacaatcactttagtgaagatattattcattcatatatatttcctgtccaagaaagatctgagttagagttatacaatcttgtctccatcttatgtcaatgtgtcattgcttctggctgttccactgagattcgatcaaagcttgaagacttaattaacaagtggtatcaaagttggtgaagcaatttaaggaaggtgatcttggtttttggatcaagattgtggtgaaaatatgtcaccatgggtattgcaaagtttgatcttgggaaattcactgggaagaacttcagattgtggatggtgaaaatgagagctttactagtgcaacaaggaatccaagcaaccttgttgggggaggaaaagctccctgcaagtttagcagggaaggagaagacagaggcattggacaaagctcacagtggtattatcctaagtctttgggataaggtattgagagtggtctcaaagcaaaagacagctggaatactgtagtcgaaactagaaagcttgtacttgacaaagtccatgaccaatcgtttgttcttgaagcaaaatctatattcattcaagatgggatcggaatattgaagaccatttggatgaatttcacaagataattctcaatttggagaatattgacatcaagattggagatgaagatcaagcaatcatcattttgaattgatttcgttcatattcatatgagcatttcgtaaacactgatgtatggaagagaaaccttgacaccagatgaggttcagaatgcattaatgtagaaaaatgaagagaaagtctaagatgaaagaggagacagatggagatggaatgttttttcgtgggaaaatctccaagaaagagaacaaagatcaatcaaattagagcaagaagactggatcaaagtccaaacaaagaagatgttacatttgtaataagcaagatcatttgaagagagactgtcctatcttcaagaattataatcagaagtatggtaatgttggtgtagcctctaaaggagaagacactgatggttatgaaagtctaggggtcttgatagcttttaacagtgattctagctcaattgaggtactcgattctggatgctcatttcatatttgtcctgacaagttaagattcagcaagttccagtctataaggtaagaaaatgtgacattaggggataataaagcatgtaaagttggagagattgaatctgttatgatcaaatgatggtgcaataacaaagttgaaacaagtgagatatgttttaagaggaattttatcttagtggctatgctggatcaagatggccattcagtcaaggtggagaagggttgcatgaaagtggtgaaaggttcaagagttactatgaagggtttgaagaagatatgtgttgcaagagattctagaaaaggtggagataaataatgtttcagatgacaagattgataccatgttttagcagagaaggcttgcacacattggtaacatatgacttaaattgttagccaaaacggatgtgttcaggaaggaacagatttaggaacttgacttgtgtgatcaatgtgtgcttggtaaagccgcaaaattgaaattgggaaccggtgagcatacttcaaaactaattatggattgcatccactaagatctataaggaccctcaaggacagcaacaaaaggtgaacccaagtacttcttactccttttagatgattttccaagatatagcttgacttatattttgaagaataagtgtgatgcttttaacaagtttctagactggaaaatcttgttacgaaatcaaactggaaagagagttaaaaagctaagaacagacaatgggctaaaattttgttcagatgaattcattaactattacataaaggtgggcataggaaggcataagataataccaaacaaccctcaacaaaatgtcattgcttattgaatgaacttggccatttttgagagggtaaggtgtatgttgattaactcagtcttaccaaagggtttttagggagaggcagtggtgaaaacaacatatttaactgaaggatgtccttcctcaacaatagaattcaagactcccattgaaatctagccaggaaggcctgcagcctatgaaaatctcaaaatctttgggtgtgttgcttatgcccatgtgagatgggataagttagaaccaagggcaaggatgtgtatcttccttggttatcataatcgtgtaaaggggtataagttgatgagtatagaagctggaaaccaccagaagttcttcatcagcatggatatgatcttcaatgaaagtgagctatatagagacatactcaaaggaaaggcaagagatgactatgaggtatctaacaacagcaacatgatatctcagactgaggtggagatcataaatgatcattctcaggtccaagtagtatcaacaccataagccattggtgtgacaaacttgtctaatcagtctgaagatgaaactaaacaagttaaggaagaaaatgactatcagctaataagggatacggaaaaaaaggcctatcaaagctcctaaaagattgggctatgatgatgtaaggcattatgcactgaacatagctggcataaatagggaatagcctacatcttatgaggaggcaatgtggtcaattgatagggagaaaaggaataatgcaatgggtgaagaagtaatctcactgaagaaaaacaggacctgaatattggtcaagaaaccaatggaaaataaggttatcagctataaatgggtgttcaagcataaggatgtgattctaagggtagagaaggtaaggtacacaactagattagtagctagatgctttacatagaggcaaggcattgactataatgggatatttctcctctattttaaaacatacctcatttagaatgttactaagtttagtagctactgaggacctagagctagaactaaagcaacttgattttctacatggagatttagaagagaacatcctaatgagacagccacagggtttgaagagaaagggatagaatatgaagtgtgccttttgaagagatctctatatgggctaaaatagtcaccaagacagtgacacaaacggtttgatgagtttgtgatcaaatcaagctttaagagaagtgcatatgaaatttttgtgtatatgacaaattctaaagcaatagtttaccaactcttgtatgtcgatgacatattgatagccaggaaagacaaggaggaaattaggaaagtgaaaactgtgctaaatagagaatttgagatgaaagatcttagatctgcaaataaaatcttagggattgaaatcattaaaaatagagaagagaggattataaacatgtctcaagaaggttacatctctaagattttaaagaaattctcaatgacagatgtaaaaccagttacacactaattttacatcaatttaaactctcccacactcaagccccaaccaacagttaagaagaaagctacatgtctaaagttccttatgcaagcttggtaagaagcctaatgtatctaatgagatacacaagactagatttaaatcatggtgtgacttttgaagtacttgaaaggcacaagcagaataggattggtgtatggaccaaacaacagctctacagaggtggagggctttgtaaatttagattatgctggtgattagacaccagaaggtcctagacaggttatgtttttcaccttcgagggtgcactataagttgaaaagctaatttgcaagctactatggcactttaaaccactgaggcagagtatatggcctgcagtgaagctataaaagaagctattttctttaaatgattaccaagggagctgcgagtagaaaaagaagtgtaatagtgcactatgataatctaagtgcactatacttgaacaaaaattaggtctttcatgaaaggactaagcatatagatataaggcttcattttattcgagatgttatcacagaaggtaaagtacgtgaaacttgctaagatcgcaactgaagaattccaaatggatatgctcaccaaagtgcttccctcatcgaaatttagaaattgtttagctttactacatgtttcagcaaatttttcttaaacatgactatatttttttactattctataatgcctagattagcaattaggttgagaaattgttagttaattgctaatctagttacttggtcactctgacagagttagttaattacttagagacagtcatcattgattggccgatttatctgttatttttctaacaccgaacataagcttataaataggcattggatcatatatcacttcacttcaataaatatattacttattcatatatattttctgtgaaagaaaaatctacatttgagttatatgtttttgtgttcatcttatacaaatgtgtgattgtttttggctattccaatgaaactagatcaaagcatgaagacttaacagtgaatatatgactcattctcaatttaattcaaataagcttggaaaaataatagggacacaaatatatcatatattagcagaaagtcctttcctagaataggattgagattcaaaataaaaaataataggtgctaattaagtggactgtagagtcatcttatctatataaaaaattatgagtgatgatacatggacaaaatatgcactaaaactaggggttaatggtatctaggatttcaagccaaagttcaaatcaaataaaactaccaaattaatatgcacctaatatttttaagatgcaatattgatattttgaaacaatataatattgatattgattgatgaaactattattttgagaattattattatttatttatt

SEQ ID NO: 184094 - DNA, 1732 bp, Cannabis indica
ctggccagggtctaaaaggcatggctgatcttcaccatacactctcccagggtatggccagccaacccatatcttttcaaaatttacaacatcccctaaggagggccagtcaatcaagtccccacagtagtagatccttctgcgcaagcacaattagaattctacatagaaaaccctattgcaattagagctgcaactaaaacaattagtgctaaaaccactttagaagcccaaacctgggtaattccctttttttttttttggactcttctagaaaagtacaaatgttggctggctccgccatcattacaccaatacacccccttccatggaattatccaaacagagctaaatggggtttgaagagttggaacccatcttcggggagttgaaagtggagtgggcgactaagcaatcgtccgaagagttggatcgatttttgtttcatgttcatgctagcgctgccgatacttctcgtctcacaatccatgttactgatttccactccaacacttgggaggccgtacgatcggttctgcggctggaggacatggttaccttttttaccattatattttcttcattttcatttccacgcaatgatcatctgtgtagctcgaatccagtaccgttgaatgaacttattttgattacttaaatttgcgtcgtaagaacccgaattttcttttagctaccaagtgtaaagggcctttataaattttctcttaatttttgttttttaaccgatacaaatgaatattgcaatggctgaatgtaatatattctctttacgtattcttcttacattttagattttcgaatgaaatcttttgttcaattgaagattttttattacttgtgtttctgtaacacctttttctttttctttctaaaacaaatttaatagagagttggtgttatatacagagggatgatattggaataggagggtcttggtctgagtttatggagtatgtcatggcatccttaaaatctcaagatgtaaagcttattcttgatggacattctaactcgaacaatggtaagtcttgctcccttttgattattattattttatttgtgattgttgaaacaaaaggggtctcatgtctgtcatttgatcaggttaaacatttgtattcatggcctatttcttttctttgtacgtgtattggactgcttttatttatttatttatttattttgggggagggatatgagcgaaaggacctagaaaacattttccccaactcatcatcattttttttaactcttaatttcaagtcgtccaagcttattttatgcttgttccaagatgattctctagaacaaatttcttttactccataatttcaagcaaaacacaaaatgtccctttgttttcccctttccctcatcaaatttgtattcaaaacggagggtcaagatttcagagattgtctgtttctgatttgaatttcgcacttatgtgtgtgtctgttggtgataagaaaaaatgtccattttttgctagttgaattttcacaaagatcattggggtgcttatgcttggctgtactaagccctccctttctcttaacatatccacgacaatgtacatgaacaatcttacattgtaaaagaaaaagatgtaacagatacaaatcatgaacaacataattgttacccgtctcatttacagtggatagtttacaagctaattatctttcgttttgatcaaataacaagctaa

SEQ ID NO: 184095 - DNA, 1972 bp, Cannabis indica
gttaaagttacactaataacaaaagtgactggaaaatcactaattgttcttttaaaagttaaaaacgacaggacagagggatggggatcaaactagtttgtttaaaaacaaacacccactgattttgaaataacacaaagcgcaccaaaacttccaaacttccccgccaccgccatggccatcgatcccaaccccaccctatcatctgcttcccccgttactactccggcaattacctccgccgctgctaccaccgctccggctgcaactacgacctctacagcaaccacaaatctcgctcgtcccttcacaaatccacccccatcaagacctatatctccgctccagcagcaacctcagcccctccatccccatcatcatcatcatccactcactaccaccaccactaccgctgcctctgcattctcttctcagcagcagccgctgtacacggctcatgccctccccatccgtgcgccggtccctccttatacaaattcccaattggtcaaatccccgaacgactcttcctccacggcgcacggaatttcctaccctgtcgcatcctccggccggggattcatccccaaggccgttcgtcccgatcagattgtcactgtcgctaacccaggcagcggcggcggaggttaccctgctcgtccaatcgtcgctgcggggttccatcacgcgggaggtgtgcggggtgctccgcatatggagtctttgaatgcgaatcttgctgcgcatttggtcaggccaatgcagaacttgcagcaacacctttatcatcctcatcttggctcgcctgttgtatcagtcaagggtgttcctgtttctgtgcaaccaaaggtttcaattcctgctgccctttcgtttccttccatcgaaggttttttatttttttattttttcatctttttttcaacgtatgctttacactctatcttctcaaccatacaggtttcttcttcatctccagcaccagactgtaatggccacaaagatatgaggtattgcttgtacttcttcagcctggagttcttttgattgtccattgacattgttttgtgctttaatgtagggataaaagcagagatgatactttaactgttgtcaaagatagaaaagtaagcaaaaaatcttcccagctttgtatcattcttacttgtttagttgtaagtaatgacaaagttaacttagaagaaagtaaatgattttattttttcttttgtataattctctgctcaagaaatattgcaagtgtgacctcattttgttaatctatcaaattctcaacaaattcccccttttgtagagttattaaattctcatcctttaattctgttcttttatgaaacaaattgtccggtttggcatcttcatttaataatcagagaatgcatgttatgatttgtttactatatgtttatatagaaacaaattattattaggttcaaaaaataatataaagttgttttaaaatgtctcctctaatttctcatcactgacatgcatatccgttcatatttaagtaattgttctccttttcccactcatcattgtttatcctgctcaatatataaattctacttagtgcatacatatagtgttcgtaaagctactataagtttattcctttctgttgctattctttgtagtaatctgatgcaaattctcatttaaggaaaaacagcttaagaagtaatgtggctcttaattatttgttgatgtacttttgtttgcgtttccaggtcagaattgttgagggggcttctttgtatgcactttgtcgatcatggttaagaaatggtactcaagatgaaacccaggtttgtcttccataggataattgtcatttgcatatgcatttgaagtttcataattggttttcaaacaatggcaactttttgcctaatatctaagataacttacctaaatttatgaagttgtttctgtcatggggaaaacaaaa

SEQ ID NO: 184096 - DNA, 1554 bp, Cannabis indica
ctaaaatataataattgaatgtggaaaaaaataaatattagggcttagttaggcaggttgattttttttaattgagcgagttgcacttaaatttttgtaacccggtctttacgttggggttgaataaaatgtaacgtaaactaaccacaatgaccgacatacactcttaagagtttatatgcgcttgggtgcaaatttcttttgggaaaggatgcgcatagatgtcaagcactttgtccaagcatgtataacttgtcaaaccatcaaatacacaccttccgctccctatggattgtaacggccattggatattccggaaagggtgtgggaagatctttctatggacttcattatgagattgcccaactcacacagtgtgaccaacattctagtggttgtagatcgttttacaaaatacgcacattttagtgctctcccaaaccattactctgccaccaaggttgctgagcttttctctcatatggtgaccaaactccacggcatgcctcgcaccatcatttctgatagagatcctatttttactagtgccttttggaaaaaattgttcgtactcatgggcaccacgttaaagatgagctcatcttatcacccccaaacagacggccaaacggaagttacgaatcgctatttggagcagtaccagcgagcattcaattcgaaaaacccaaaatagtggagcagatttctgtcttgggccgagtaccactataacaccagccatcactctgccataggtccctttccaagctgtgtatgggcgcaccccacctacgattccagcttacactcgaggcaccactacaatccaagtcgtggaagacgatttattaactcgggattctatattgcagcaacttaaactaaatttgtagcaagcacagaatcgaatgagccaataggctaataagaagcggaagggcatctcttttaagctcgatgacatggtccttgtcaaactacaaccataccgacaaattacagtagctcatcgacttaatactaaactttgtcgccgttattttggatcctttgaagtgattggagaagcgggacatgtggcctatacactaaagttacctctgaaaagtcgaattcatcccacatttcatgtgttgctactcaaaccatttcatggctcgaaaccagtcaagtgttttttgctatctgagctgagcatagccaacaaacccatcatgtttcgcttggcaattttggcagctcgaaggaacacaaacaacaacaagactagtcgacaagtgttggtttaatggtccttaagccccccggaagacgccacttgggaagattttgatgagttcattacgatgtacaaactagccaaccttgaggacaaggttgatttcggggatgggagtagtattatggaggcccccatgagataggcccattagcacttgactcaaatgctatacaagaccacatgaagacttggatgattgagaaggcccaagaccaagctgcaacttcagcttgtggaaccagcagcaatgatgaaaagagaaaagaggtgag

SEQ ID NO: 184097 - DNA, 3911 bp, Cannabis indica
aagtatgagaattagaaagtaaaattgagatttcttaattactttatattatactgttatcgtgtaactacatagtaagacaaatacgtaaaattatgtcattacttttaattacaccaaattttaattctctcatcgcttacattgtaaaacttattacagtagttttatatccgtactccgtgaatttttggagtgaaaacatgaactataacggaaaaggtttgagcaattagaacctgtcataaataaaataagattattcaaaatcaaacatggtaagttctgtaatgcttttaaggatgctaaaaatttacacatcatttataaatataatattttattttatctctctttcacattatttttggcttacttctaaaaatattttaataatatataatactctttaaaaatattataattaccaatcctataatatatcatccatacaaatttatacaaatttttaaaatgacattattttcttcgtataacatctcaatattttacatcaatattttacagatgctcttaaaaacgttaaatggagcccaataaagattcgggtcaaattccacccgagaacctttcgttcttttagtccaataataaaaatagcattattgcataaaagccctttaattaattatttttagttattttcctttttcatgtcaactcttctgcaaggctaacctttttctacttcttctctcgatccctttcaatctcaaatcacggccaactgaaaccctaatttcgtctcactcttcaggcgccatccaagtcttcctccatggcccgtcgagccctccctatcatcagacaactcacggctcggccaacacccgtcgcttccttgggagccaaacccgacccgcacactcgatccgtcacatacatgccccggcctggtgacggagctccacgtcctgtaaccctaatccccggagatggtgtcggaccgcttgtgaccaatgcggttgagcaggtcatggaggctatgcacgcgccgctctacttcgagcggtacgagatccacggcgacatgaagcgggtcccagaggaggtcctcgagtcgattcggaagaacaaggtgtgtcttaagggagggttgaagactcctgtgggaggtggtgtgaactcgctcaacgtacaattgaggagggagcttgatttgtacgcttcgctcgtcaactgcttcaatctccggggttaccgacgcgccacgacaacgtggacatcgtggtgatcagggagaacactgaaggagagtactctgggcttgagcacgaggttgttcctggcgtcgtcgagagtctcaaggtaatgatgattttgctcgtattatcattatgaattattatggtatttttattagttctcgttgtgcattttttccgtgatcgaaaaatctggaattaacaatgaacttaatatattaatatgatcgaatgatttaatggagctagttcaatttagcgtgcggaacatttggaattattgcgtggttgcgcagttctattataaacttgaaagtctctgcctcaaatgaatcactagcagttgtagaaggcttttcattgatattgaacctcattaggctttggagattttggttctaaggttgagttaccacacttgacgtctcgacttattaagcgtacaccttacaatgagctagatgcaatgacactagaatgggttatggaaacttttctttgctagtagaaaaacataattctcgaagactagaaagtaaatacgttgatgaacatgactctgataatttagtttagtaccccgaaatatttagacaacaaagaaaattagggcctgtttaggatttcttttggttgttgtattgtgaacgtaactgtcttatcttgtttacacttaatcaagaggggtctgactaatgctttctaacaatagagtttagagggaatactgaatgaaaataatatgtatttgaactgagaaagtcagtgagaagtaaaatgagagaatggggagtgagagtagtcatgagattatatggagtttgaagagataatagagattgattatagggaaatttgaagagagggaaattcgtaagagtgggtacagttaaagtcattagggagatgaggagcaagaaagtaatgacagaatgaggaaagagaaaaatgtgagtgcggatagagaaagtcatatatgatagaatgagtatactgaaatttatggactcatggcaaagtgattatatatatcattttaaaaagaacattgaaaagtcatgtttgttctctaataatctgttctctttagttttgttttataaagttgtttgccgacagtagtgctgaacacctcttaatttttcttagagaaaaaattgctatgattctatccttaaaaacagaatcatttctctagttacaatgccaaatactcccttttccagtcattggcttcctgtgatctgttctagcttgagatgtgggattctgtcatgagtgatgttcttttatatttgcatagcattatatggtttaacaacgctggatatcttactttacatccctgtgtatcatagattctgttgtatattttatcttctccatgcttattatttttgctattctctttgaatgaaaaatattttgttgcgattgtttatgtttggatctcagatttaagcgcggaaaaatattgtgagggaaaaaattaaagaaaagttaggggaaacatttttcttaagtcttataataagtttttttgaatcgtttatcttactggtattgacagttggtctaaatttataaaaattcatcaaatttaacactagctgtttgtgaaagtatattctctcattttttgtaatattccaaacaaaagaaaatgaaattttttgtaacactttttttacttgtttccctccctaaacttttgagttccaaacaaagggttgagtaatcattgacgtcattctttattggtgcaatattgtttccgtttctcatttagtcaacttgctaggtgataacaaagttctgctcagagcgtattgctaagtacgccttcgagtatgcctatctgaataacaggaaaactgtgacagctgtgcacaaagccaacattatgaaacttgcagatggtttatttttagaatcttgtcgggaggttgccacaaaatatcccagcatcaagtacaacgagataatcgttgacaattgctgtatgcaacttgtttccaggcctgagcagtttgatgtcatggtatgtgaatttcacaaaactatttttaatttaatgtagtaaaaccgagttattattattattgattattattgttgttgttatttgtataaaatgcgagtgtctgacagctctctctcaaactgagatttggttattgcttccattttttttctctcttcttgtgctcaattaatttaaatcgactatttcatgttttgcaggtgactcctaacctttatggaaacctagtggctaatactgcagctggtatcgccggaggcactggtgtcatgccaggaggtacaaaccaagcatccaataagctcttaattttaatattttatatgaaaagaaatgatatgttttccaaattatgtgtcatgcatttgaaaagttttggagctcaaaagcactaccgtaaaagctgcatatcacctaccatagctgccttttaactgattttttttttaataaagaaatatatttgtgtggtaccattttttttctaagatcttggatcactccttgttagctgtaatttagggagtgatggcaccacataaatctcactggattagttctaactcgtaatcatacatacactcaatctatgaactatatacatacaacatgtattaactatatacaagctcattcaagat

SEQ ID NO: 184098 - DNA, 3298 bp, Cannabis indica
agagagagagagagagaaatcaaacaaagcaaaatattattagtactttttcttctcttctgatattattattattattaactccaaaaaccaactcctttctttcttatttcttcttcaaatataagaagcactcactaagtcagaaagagaaatagtagactagagtagctgctgtgctgataaacaatagtagcagacgacattaaattcagaaacgttgacgtgtcaaaaacccagtcaaaattaaattaaaaataaattaaaaaaaaaaacatattttggtttccattaaaacatgactccactccttctcctcactcttcaccactatccttttctttttactttacaatattcaaactcaaccatgaatccatccatggctttactatctcctgctccgtctcccttcaccaacctcaattcgtgggcctcatcacccagcccaacaccatcgcctactccaagcccaactcaaccaattgttgggcccactacaaacccaataacaacaacaacaacccaagtagaccaatcttctccgccaccgacaaggttacctgttgattttagtccgccattgatagccatggtagttgttgtagccactgctttcttggtcgtcacctactctcgattattctcccgccacgtcatccctcctgtactcagggttttgcgtcgttggagaagacgccgtcgacgtagtagtagacgatcgtatcttccttcctcggctggcgatttagactcgttgccgtacgattcatcgccgtttgaaaccagtgatggttttcatgttttctcaccttatggactcgatgattcgataatcaagactattcctctttctatttatacggtggtcaacaaaggcggcggacctcatcgcgattgcgctgtttgtttaatcgaatttgaagaagacgattacgtccgtactcttcctgtttgttcccacgcttttcatgtggattgtattgatatgtggcttcgttcccacgctaactgtcctctatgtcgcgccgtgatatttcgtccggaatcgccgtttattccgctcatggcggctaggatcagaccgagtcttgacgacgccatttttaggagcatcgcactcgagccgcttaacgaaacactagcaccggaatatgcatcgtctacagtaacggaaatcacgccttgcatcgaggaacaatcgccgaggagaaatagttacaacttcaacgctaatcattccgaagatcaccgaatcatcaacaacagagatttcatactgaaaagatcgtactcgttcggattcgagcggagtggagcatcggaacgaatgatggtaacagagcccgctacagcatcgccgtggagatacagacgaggaaacaacttctggagcaaaagaccatcgccattcggttccttaagcaaacctagggttttctcattccgttactacagaggaatgaaatcacctttcttccgtcgaaacagaggctttttcggtttatcagaatcaagctcaagattctccaatggaggaggaggaggaggatcatcacgaagacaaaatcaatgacgagtccgatgttcatgagaccatcttcgtcgtcgttacactcgtctagccggctccggtgcggtgatcccgaggcacttttatcaccggagagattcaaccgcagataacaaaattaaataaagcaaaaattagtcgggacacgtggaagaagatgattggtgaatgtataaagtaaagaggttaccgtaagcataccgggcggtgagggtgggagatttgaaaaccccaagattatgagtagtaatgaggtcggaccgcttttattaatggggtttgaaaaagctctgtctgtgagtcacagtaagagagaagaagaagctttaaagctctgtctttgccaatttaatggattttggaggtttggccatggcattaaatgcttacccgaaaataaaaaaaataaaaaatcagagaaagcgaaagttgattattattattattattattattattattattattattattattattattattgcaatgaagaagcacagataccaaaattcacttttttctatttatttttttttaattattattatttttttctgtgttagagaagtgtttgggggctttgggagaagagaagaagaaagaagattttccaggtaagctgttagatataataagaagcaaagagtcattaatgtaagggaagattcagagctctgttgttgtagattttgtttgccaacaacaccataaaaactattgactttttttgtatttatatttatttttttgggggtggttggttggttgccattatttatttgtttatttttgtttttataattgaagaaaaggtttaaatgcaaataccatttttattgttcactgaatcactactattttgtagttatgttatacaataaattatcattttaccctcttctctttaatgtattaatttgatagtggtgttcattaaactactcacatcatacatatctcgtctgcactatactactatacatgcagtgtggttttaggatctgctgtgcggttgtggtttgaaattacgcaatgtacagttgcgatttaggtttcataaatgagatttaattattggttttgttttatctaattagaagtgttagtttatttaagcttatatttatcaattatatacatttatattgatggatgacaaaaaatagcatgttttaaaaaatatatagtgtatatcttagtttatactacattaattattgagctcatttatgtattttgtatgatagctttatatatatatttttattgttttgttcaaacattttcagaattttgtgcatttttattgtagtgtttaattattaaattagttagtgattattgcaaactgcccacatcacactgtacaacactttttttgtggtgcaatttatgcagttttgagctctatgtggtgcagcctgcaagtgtggtgcagtccaaaaaattagtacaatattgtaccactcgcaacacaaacacccttatcatttagtgctttcacacccatcacctatcaagagcaatgttccatcacttcgggatcaagagcaaagaagtgggtctcgaggaaagaagtgtacaaccaactcaaggcgaagccaagagctagttcaagaacctcgtcaaacctcctcaagagaccatcttgcttgtgacagacgagctaatggtgtggagccaagaagagatgcctctcgtgacttgccaaggcagaagagg

SEQ ID NO: 184099 - DNA, 6441 bp, Cannabis indica
caatttgaaccatttatgtttcttacggatagaatcagtttggtgtttaatgccgaagaacctgtacattggaaaccatttgttacaatatattcaccatgtcgaaaacatgatgagaatggaaacttgtcctttagtttcagaattcatggacaagcttcttcttttgttgattggactaggccttctaattcaatttgtgaaactgagggttttgatggaaatgacaccgaaatatcttctggtaaatatgctgttcaaagtataaaagaggtaaacaatatagatctagacgtgggtagtcataatgttgctagtaagcaacaagttgtgtcttcttccatggttatttccgagacttcctttgttccttatgctattgtatatggatttcttagtgggaaaatagaagttgtgcggtttgatttacttgatgggctagattttcatggtgaaagtccacattctgcaattacttcccatttgtctagacagaactttttagggcacactggagctgtactatgtttggctgctcatcatatggttggtaccgtcaaaggatcaagtttcaataaggttttagtgtctggaagcatggattgcacagttcgcatatgggatcttgacactggaaatgttatttctgtaatgcatcatcatgtcgctccggtgcgccaaataattcctcccccaattagcactgaacatccatggagtaattgttttctttcagtcggggaagatttgtgtgttgctcttgcttcttttcaaacattgagagtggagagaatgtttcctggacatcccaactaccctgcaaaaatcgtatgggatggcgctagaggttatattgcatgtctcatcccaaataattttggaactagtgatgctaatgacattttatatatctgggatgtaaagacgggtgctcaagagcgggtcattcacgggacaacatcacagtcagcgtttgaacatttttgtaagggtataagcaagagttctatatcaggcaccatacttaatgaaaatacctcagtttcctccttacttcttccaattattgaagatggaagctcttccaaccctcatttgaataagttagagaaattggtgacttcacctaaaagcatagttgcacggaatatttctcaacgacatgctgggaaagataaaccaattattattcgcagtaacaagtatgctgtaaattgctcttgccctttccctggaattgcaactctaagttttgaccttgcatcactaatgtttaattatcaaaagcatgacaccatggaaaatggaaaccgaactcctaagaatgacaaggtgagggagcaagtagctgagacatcaagtcctcaacaaatgagttcgaaaaatgtatttgacacagatagtacaccaaatgaagctacaaatgagcttgattggattaggtcactagaagaatgcttagttcgatttagcttgtcatttttgcacttgtgggatgtggatcctaagcttgattatttgcttcttaccgacatgaagcttgagagaccaaataattttattgtggcttctggtttgcaaggtgacaaaggatctttaacattggcctttcctgatttgactgcaattcttgaggtactttgaattttcaaaacataatttattatttggtctcttattgtttctcatactgaaaatgaaatttcagctttggaaatcatcttctgagttttgtgcaatgaggtccttgacaatgttatctctcgcccaacgaatgattagcttgtcgcattccacttcatctgccagcaggtggttgctagtttcatacatgtgaattgaaaatatcatgtatgatacttttctgacaaaaatttagactagctgtaactgttttaggcatgtgcatgttataactttgattggcatgttatgcagttctttagcagcattctatactagaagctttgctgacaaatttccagacataaagccacccttacttcaggtagcttcatgttcttatgcttttttatattcttaccttgagttttgcataacgtagtctactatccaagaatgagagccagctaactctgaattgctcattatgctgctttcttgtattgactatgtaaccataaatgtgtagagttaatcctagttgtgaaaaatgatttatatatataatataaatagctaccaaatcagtattagtgaattatttaagctcttgagatatggaagtttgaacttctacagtttgtcaattaaatactatgattatctcatgtgttttttatcccctctcactctctccagctcttggtgagtttctggcaagatgaaagtgagcatgtacgtatggctgcacgtactttattccactgtgctgcttcacgggcaattccacatcccttatgcagtcagaaggcaaccaatcgtgcaaatatgaatcgcctctctgatcctagtgaagatggaagtttaaatgtacaagcagaagaaacacttgctaatacattgtatacagaacaagtgatggacacacaagtgatatgtgaggtagagcaatctaacatattggcatggcttgaatcatatgaaatgcaggattggatttcttgtgttgggggaaccagccaagatgcaatgacttctcatattattgtagcagcggcattggctatttggtatccaactcttgtaaagccttgtcttgccaagctggtggttcatccacttatgaagctggtgatggccatgaatgacaaatacagctgcacagcagctgagctccttgctgaaggtatggagaccacatggaaaccctgcattagttcagaaattcctcggttgattggagtatattttcttccaaatagaatgtgtgagtggtccatcagctagcttagctgcacaaaagtcagctgtaccaaatgccatccgtgagactttggttgggactctccttcctagtttggctatggctgatgcaccggcttacttaagtgttatagaaagtcaaatttggtcgactgcatctgattcttcagttcatctagtatctctcatgactctcattagggttatgcgtatctctccaagaagcctagctcaacaccttgataaggtttgttctaccagatttattggcaaatatacttccctcatcattttaaattagaatgcaaagacagactatttctttaatgcaggatcaccaaatttttttatcacagtttgaaactaaataaataaaccgtcatttcttaaattgttctatgcagcacaattttttgttacttatccaataaaaattggcacttctgtttgtctggttttggatgtggatgtagtcgtaactaactagtattttaataattacatttttggaggaactagtgatgtggaagttgctttttttggctgatattttcaacattgttctcatagattaaaagagctaaatacatgttttcttattttggatctgggacaagccctttagatgcttgattgccatttggtgtaaccagaatttcaatagaaaactaataggaagagggtagtgaaagaatctgcatataggtggatctttggtctactcaatgttttataatataatcgttatatttatgtgacataaattatgaaaccctatctgatgtctgcacctccatattagatgttccgtcatgatcatttcttttcttttaattagttgccacgttcatttatcctcacatgctattaaaagtgcccaactctttcttgtttgtgttaacaataattaattgtttatgttgcattggcgtttctttctcggaatttctgaactcaatctactcagcagcaaacactatttgacaattggattgatgtgcaggttgttaactttattttacaaaccatggaccctagtaattcagttatgcgtaaaacttgctttcaaagttcaatgactgcactaaaggaagttgtacatgcattccctatggtagctattaatgactcgtggaccagattggctgtaggtgatgttattggagagatcaaaagtgctagcattcgtgtctatgatttgcagaggtattcaacaaatcctacaggatttttacttctttataaaatagaagctgttttaaaagatatcaccactcagtgtttagaaattcatgaccttataattttgtacaggtaaaatcttttgtactttttatatataaaatatattttgtttgtctacatcaatgatgtatatatgtgaatgagcctcaatgtgcaaaacttgatttcttacttcattaagtaaataatatctcaatgtgcttcttgattgggatttttcacttactaaccttgccaatgtatactagcgaaattgaaatcattgctgtttgatcaactgacttcattactcttctacactgtagtgtgctcaagataaaggtactggatgcaagtggacctcctggacttccaactttgcttgcagcagcaggggcagcatcagaaacagtcttagccactgccatttcagctttgagcttttcgcctgatggagaggtatagctttgttagattcccatacttcagtgtaatactggttcttgaatcttttattggtcatcaacttctctgttcactagtttcttcttggttatcaaatttcagtttcaaagggaagacctgtgccttttcttactgtcttgctggttaatatcatgttttatttgttctacttctgttttatatgctgaaaagtttcattctatactatctatgatcctcccgcatgtgaatatcgcaaaccccttaaagctttaatgttaaattagtagaatgtatctacttcaaagtgtcttctccgcctttacttaatttcttaaataatgtagggactggtggcgttttctgaacatggattgatgatcagatggtggtctctaggatcagtttggtgggagaaactgagccggaacttagtccctgtccagtgtaccaaattgatttttgtgccgccatgggagggattctcacctaattcttctagatcaagtataatggcaagcgtaatggaacaggatagacaagtagattttcaggtagtcctcattatgacctaacttctgagattaccgtctactgttataacttctactttaaagttttattgtattttcatactgcgaaataagtagactagtgatgatattgtacttttttcttcttagtacgcgtgatggtgcagagcgatgtctttgtcgtataaatccattcaatatgaaatcattccttaacaatgccccctccatcttttgcaggacaatccaaaggtttcaaataatccggataatttgaaattgctgattcataacatggacctttcttaccggttagaatgggttggcgaacggaaagtacttcttacaaggcatggtcatgagttgggcacttatcagttataagtatccagcagtagcagtggacagaatgacatacaaaataggttggcgacatcaagtacattttacaaggcatggtcatgatgagacgagcactctgcaattgtatgcatccggtggtgaagagaacaggtgaatatttttgttcactactcttcttgtgtatgagcaaagcaaaacaaattagaaaacatttcttgctgagtagcacttcccggcctgcaattttggttttctcaggctatatataatctatatatgtatatgtatccatatgatatctttatagctatgccatttattcttatttcttaatttcatagataaatatgatgtctttctttctctgtctccggtagcattagtgaattcaacacagatttcacaaattgaaatgtattcatttgtttgtttttctttgtcgggtttggaagagttaatgagggtcgttcattcaagtacattcatttttacaaattaaatgtacagagttgagattcctaaaagtaatgaagttgcatatgtttgatgaggcttcttcctttttctttgtgattttttgttgttattattcatagagtgtgaagatgagaacatgccgctatttagcaccctctaacatgtattggtacaattaagtgtattctatattaatttttatgaaatattgctaactaatttaagaggctacttgtagatcgtattatgcattattgatgttttatataaatgtttctatcaaataaacttttaccaaatttcaaaataatactttttcttttgttgtggtttcaagatttacatttaatttaaatctgtctttgtgtttacatatctttaaaaaattactttcatttaagaaaaaaaattcaaaataatgttggagtaaactattgattatattatgtctatagtaagaatgacattgattattattgagttccatcgtgaatattttttttcataaaaatat

SEQ ID NO: 184100 - DNA, 2304 bp, Cannabis indica
atagtaatttcatttatatttctttttagaagacttgtgacatatatagtactatatatagactaataataatattccatgtcgatcgttgtggaattttatttttttataaggaatatattctgtagaattttaaaaattaattatataattataagatatatattgaagacttttaaaatgcttagtgggcgaccattactcagtgtggtaataaaaaatatatataattttgtaaattcatcaagttattaattatatatgaataaaaaataatatgtatgaatgaatttatttaaaaatgcaaaactatatattaaatttatcaccataactaaaaaagctggcaaactaacaagtcatgagcctccccttcaagctttataatatatatttaaaaaactatatttttatttatgttattataaacctaaataatgatctataaattatttatatattttttagacttaacggccaatgagtatcctattatttttgctacattttataacaatacattttggggggaaatcactatttgtgtaaatttaaattatggccctcttattttttatttatatattttattttttcattattgaaagtagtatatactaaaaatgaatatagtttataaatgatatacataatttaaatggcactatatattattatctctaattaatatgatttttcactgaaaattccagtcactttaatagaaaataaaaagactaatttataattgcactaaaattttttgagaaaaaaaaatatataataaagcactaaaagtaaaaaaattggagacttgactaataaatgtgtttggtattggctttggcatctaggtttgtggatgaaggtttcttatctgaaatcgttgaagttttgactattaaaaatacggatgatgtgtagagggttattgtggggctggaatgggagtagaagtaaacttcatgtgacttgttgggaaaaagtgtgccttaaatggaattaaatagaaacaagccattctttgctaaatatatttgggttatttcatctaaaagagatattctttaagtgaaatgggtcaataatatttatctcaagaacaagtctttttagaattatgatcttaataataatactatagttggtattggaggaaactttgtcatctaagggacaagttcactcgggcagacattgtgaaggcaggggctggtgtgaatcggtttaaaataaatctgttatacaacagctgcattccccaaactcagttcgattttagcaagtatgtatggagctccataaacatgccgaagcatagattcattttcaggcaattaagcaatcaattctcagcttttaacttgagataagtttgctcaatttcaaattacccttgacatcatcaactgtccggtgtgtgatgcagcagttgagagtaactctcatatttttttcgactgctatctctcgcaacaggttatggatcaagttagtaattggttgggaattaagagatggtaaactagttttcatagctggcagagtggtagctacataatagcaaggataagaagcaccagattcatgtttcgattctggtagccatgatttacagctagccttatttggagcaataagaacaattgcatcttcagtaattactcgagtacagcaacaaagattacacaagaaattaaaaatatagtgtattacagattacaaatagttaaaaaaagaaacttaaaagctcatgagaagagatacatagagagataatttttatgtaatagctggtttatagccgagctatttgttgtagttgttgtgtaatagtttgtgattaacgaagtttgttttggtgttcaaatttaataatcatttgttgttagtatcttttttaggatttgttttgaaggattttattttgtctttaaataattttagtgtggctatatataatcactcgtactttggttaagtatactttatttggtactgttagtaaaatattagtaaaatattagtaaaatatatattacacgaagcaagtagtataaattttgtgtgttcttcttgctcatagagattttctctttgatggtgggctgggaaccgttttttttaaaaaaaaaaaaagtaaaaaagtagtatatatatatatattatttaaataaaaataaaaataaaataaaaaactaaacttgtacgtggactatatataaagttgtctaaataattaattaataaaagtagtgtggttatatatatatgtagacgtaaaaatgctgagctatatatact

SEQ ID NO: 184101 - DNA, 4565 bp, Cannabis indica
tttcaattttttttattactttttgggtggagttatcaaattagttatggaatgcaagaaagtcatttgttcctattttttcctttctctccctgaatatcacaacagaaacttattggaccattggtttctcatgtatactgtagtcatttttctcatgtttttcctttccttgacattacattgaggcttgattccaaaagcacataggcaagcataattgaagcaaaaaagaaactaataattccaacggttgtttcttcgcaatttatgttatgttattaacagattttctgagatttgtgaactgttttgctcattgttagtagttttcttggtggggagccatttgttgagggtgatagtgttaagcattgtcatacttctcatattttaatcggtacttttccattgggttttggaaatttaatcaaacaaataaatacgtgatgtacaacgttcttttgctgtaaaagttcattttattatctctactttaaatctattttattgaatgcagggaattgtcaatttcacatctacatacgatagtagaacacgtgatgtggatagttctttggttgcaagaggtatggaggtttgaagcatcccacaacagttccacttcctcatcacggaatgacaattcatctctcttccttgtccagcttggtccagtactttttgttcgtgatgcaactcttctcttacctgttcatttatcaaagcagcacttgctttggtatggttatgatagaaaggtatgctcaatgtcatccacttcacagacctaaaaatttctgtcaaaaattaagacctatccccggatgttttctacatagatttttattgatactttgcttaaaaatcaatttgtagattataataattttgacttttgcattctttaaattgcagaatatgttataagaagtattgccttccacatatttcttctaagattagtctgtgtattgataactataagaggggtagttcaaatggttaggcatttggtttgctcccacaaaattgaggttcgaggccctcctagatacctacaatagcaattgttgtagtttcaattgtagtttattggccccaaatattgtagggttaggcagcctagctcaaagagaatacaaataaaaatgaatataagaagcagtagttgttatctatacactctataggcatgatcagttttcaacatagctaatttatggaatttgacaacaatttatctgtaaacaagttgcagttagtacaacataggtaatatgacaatttcttaattttatggaatttgatttaattttgctaagtgggtcaccttatgttattttgtaactactttttcatcatataaagtataaaaatctatattctttttcatcaattttcttcttcactctgatgattgcttctgttattctcagaatggtttgcactctctttgtccagctgtgtggtcaaaacacagaagatggctcttaatgtcaatgctctgtctcaatcccttatcttgtgtaagttggctactctatgctctctttgttttccttttgtgagaatatttaagtatcatccagcgtgtgtttgctcacgtatgtactcttgttgtccttttagtacatcatagttagatattagtttgatttatcttttagaatcggtctctgttaccctggtctttggaacactgtttctgattaggtttaacagtggacttgcaccaagatgtaaacttatcagtactgcttatctttcccttcactacactatgtttggtagggaggaaagaaaaattaaagatgatagaaaaaaataaataaaggaaagaatagaaatatatcttctcttccacttgtttggtataaggagagaaagaaaattattttaagttttcttttgtttgatagttgatttagctattttctttatttttctgacaaattaacttcttcttcttattattatctgtacatttctatctatgcagtcatttgttgatttgcaatttccaaatgggcaattaacttatgtctctggtgaggggttaagcacaagtgctttcttaccagtttgtggaggtcttcttcaagctcaaggtcaatatcctggagaaatgagatttagtttctcttgcaaggtttggaaactgattcttactttcagatttttacttccttgctgttagtttaatttgttttcatactcgttagaactaagaatttctggttaaatgttttattagaataaatggggaacacacatcactccgatgatacaatggccagacaagtcttttacattaggtcttgcacaagccttggcttgggagagatctggtctcatggtgaagcctacagttcaagtcaggttagtttcttctttattatacttatttgagatttgaaaaatgtggaaaataaaaagaaacatggttgggctcaaagttgaagctacttaactctttggtggtacacaaattgcgctttgggctaggttctgcctgtaggctatattttctatgggactaatatgttatgatgcagaattggttttatttggaaatgttacatgtcagatttagatgcttattttcattgttgtgatcttttcccccttaatgtaaaacaaatcttagaatactatagcacttggcttttatgctcctatgtcatgtcctactggacgaattcttgcctgtatgggaactctactatctggttcactatgtcaatactgtattattatagctgggtctgtgggcctgccacatggtatgatattagataccgacatgactagtaaccatcatcttattggtctacctgagcaattggtaactcttttcaaaacagaagctgggcctgtaaattattttaaccatgatgtatgaacaatttctaacattatgcagtgtttcgtgctcataaatggccacttgagtagttggtgtaaggcttcatatatttggttttactagggatagttagtcctaggctagttaggtctgataaatggaatcatgcatggaattgtaaccatcttcattaggatgcagtacatcaaatttcatgttccattggagatttcataagataagtcatggtttgagtttgtgaggttgtttgtattgcaaaggatcatcaagttgtctgtaaaattgtgaagtcatgatttggggctatttgctactgctaaagatcacaaaattgataagttaagatagcatggccatcttttattttttagcagtctgtgtttttgtccctggattatgttactggaaaaattttagtacacttggtgtttatatttttcctgttctatgatttgtaacgatcagtttatatccaactcttgggggaagcaatcctggagtacgggcagagctcattcattcagtcaaagaacacctgaatcttatttgtggttatgcactaacggcacatccttcagcatacgcatctgtatcagtaagttacttttgccaacttagcaacgtgctattgatgcttccagttttctcctatcaccacagccaaaacataggctccatcgttatttacagttcttaattgtttattttaatttgtttttatgctggttactcagattggcaggtccaagtggaatggaaatgttggtaactcaggtttggtggtgagagtggatgctcctcttaccaatgttggtcgaccttctttctctgttcagataaatagtggtattgagctttgattatttactcctgtactctccaatctacaatagaagtgtatataatttagtgtcaatctattaatgcaacatatctccacatgtaatgatgtaaataagattgttgaaagttgatttactgatctcccctttttcctatgtagggagttcattttcttgttataactgtcttacattaaatatatttatataaatatattatttttggtagatttatctttttagacccatcattcatgtagtgttatttttataatttttctttatgggttataatgcatggaaaactgatgcagggcgaattgtttagaaatatacacacttattttgttataatctagaatggtctatctatgcctttgttaacatctttttatttgatttattttctataattcttatgttaaccataagaaaataaaatgtatatgcagatattgatttatcgaatagatatagagcaaatattcaaataaacttgaggacaatttaactaataaagtgacgaatatgattatttcctcctcacacaaatagaacaatatattagtaccgtgctaattgtatgttcaatatataccgaatgacagtactctaatatttatgcaagttattaaaattgttgttacggggcaatagtagtatagttatgcagaaaagaactagcaagttaaatattacaattattattgatgtcagaattttattcagaagaacctacaaaaatataatcccatgatggaaaagaattaaagttctgaatatcttgtgttgatgaagagttgttatgttgaatggaggcacataataataca

SEQ ID NO: 184102 - DNA, 3009 bp, Cannabis indica
gccaatccacaccttgtaattggatttttatttatcttcaatggctatttctgcttcttttgtagagttgtttgtgctgcttcttttgtgtttagagattagatattgtgattgagtgtatgtttatgtataaattgattctgcaagagtgtattttaagctaaatctgcaaatagaattgcaaatttgatatttaaaaatgtttggttgatgaaatgtttggtttgtgggatagacttgtttctttctgcttgtagtttgtactgcttcttttgtttactaaaaaaaaataaatagtaatataaattggtattgagtttgaaattaatagaaggtttaattatttaagaatggctttgaggttgtgtttttttatggaattaatacaaataaaattgtttgtgtttgtaaatgttattgatttgtgttgagattatttttagtgttatttacaggtttaaaatttgagtaggttagaaattctttgttattctgatgaaattttagtagaattaaaaaagacttcactaattaatttaataaattaataaattttaagtataaataataaattataaattatggttttaaaccaaaccaatttgttcttaagtggattggtttgattagattagtttggtttggtttgaacatttaattagtttggttcaattttaattttaaaaaactaacattacatagtgtgattcaaaaaaaataaaaattcgaacaaaatcaaaccgtgagcacccctgatttatacatgatttagtaataatttttttttttgtttttagcattaaatgtctgcagatattgctagttatcatagcggagatagtgatgataactcgtcagatcctattgttgtccccaacacatgtgagtcttctggtaattttttttttaattaaaacgcaaaagtaattaaatgaattatattaattaaatgaatatattaatgtattattttttattttatttttggtataatagcttccaaaaagaggaaagctcgtggtcaaaatgttctagttgatctagaggaaagaagagctaaatcttcagtgccactgcctttagaggtggatgtggtttcttctaaaatagtaggaaaggagagtataactttccctcgattgataggaagagaggttagattgcatgtaccaggatggtaccatagttgggcaagtgttcctcaacaacatcaagacttagtccttagtagagttaaggtaaaaaattagaatataaatctttacctaaattactttatggttaataatttttattaattttgttctccaatgcagcactattacgagatcgacaacaatgaacatgcatcaacaattttacaaattacattagctgagatggctgataaatataaaaaaagaaagagcttaagacacgctcatttcaaaaaattctacaaaaagccagaagattttgaacaggctgtagataacccgcctaatgatgttaacgcagaacattggcgacaaatttgtcaattttttacgagtcctgagtttattgctcgttctcaacaaaacaaaaacaatcgagaaaagagcaagtaccctacaacacaaggatcaaaatcattagcaggaatgcgttctgaaaatgtaagttaatatgtctatttaattaagttatcttaaattacaagttctttaacgttctctttattcttattagcgcaacgttggctacattgaaacgtggaaagaagctcatacaaataaaaagacgaagacttttgtcaatgagaatgctcgacgagattatgtatgtttatctaattatattcttatattcaaacagttgtaactttgttttgattctaacttattcttaaaacaggaacggttgaaggcagcttatgaaaagcgagctagtattcctaattctggaccagttgatgagattgcgatacttcgtgaggtgcttggtgaaaggcgaggccacaaccgaggagtaggtcgcaaattgaagggccaatcctcaactcatcgcactcagcccgtacctactcaacaaatgccaatggacccaagagtggagcgagagctagctagattgagaagaaaaatccaacgcatgagtcagaagttggcacctgaggatcgcctaccatccgatgatgagatagttgacatgggtgcaacacatccaattgggccctctcaaacacacatgtcggtagatggatctagttcgtcttctcagcctatggctactcaatatcagcagtcacaacaaactcctcttcccctcatgtttcctttcatgtttggacaaccgtcatcttctcaacagatgtcaccatttacttggccaatgacaccaatgtcgcagatgcaaatgatacaaatgatgatgcaaatgcaacagatgtggcaaatgatgcagactcagcaatttccgcagatgatgcagacacaacaaatgcaacaaacattgcagatgatgcagacaccgcaagtgcaacaaacactatgtatgccaaatattctacatcaacaaattcaagggaataaggatgatgataatgatgatgaggaggaggaagaggaagaggaaaatgaagaaaatgaggaggaagatgaggaggaggaggagtaatctacacatttggaatgttagcactattgtttactttgaaactctcatggtttttacattttcaattactggaaagcatgtaactaatagtgactttcatatcgtgcctaaaactttattagcatgaaaataggtactttcagaaacgacaaacgagcaaatttgcactgagtattactatgaggcaccatgttgtctaacatcactataaaataacatcttataaatagtagcagattattattagagtaaaataagtgagacccgatattaaatcatactaatatgatatgacactttataaaagagttaagcattattggtaccctctaacatttctcattataaaaactaaataatatattataggat

SEQ ID NO: 184103 - DNA, 1385 bp, Cannabis indica
gtattgagaaccacaagacttttttttaaatgctaagtgcatatttatttttataaacatttattaggtatattatataaaaaaatatttattatattatataaaaaatggatgacaaaaaaaagaaaccttctgtattgagtcaattgccatattcttgggccgaccatttataacatggatctactttaaaatttagtgaaatatagaaaaaaaataatattttaagtctttatttagataaaaaatatggtattttgtaaaaaaaatatggaattatgaaagtgcaattttttttttggtccctaggttggatccaaggtattggcgtagccaacttatgttcaaagccgaacttaataatattatttctgtaaatttttaaatagtttatggtactaaaaataagtttaaaattttttaaacacgcatgctacagtaaatttatttttagtattgtaagttacttaatttttttttaaatttactaaatataatattctaacttcaatgaatactaccataaaatatttgtgatcttggaaactgactgtttttgtggttcaagccattcgtagttctattgtcatgatttccatgtttgatcaagtagtaaataattgtaagactttgctatgttctttgagaaatgtgtttgttcattttctaaaacgatcagctaatatgatggctcactcatttgctagagctgattgtcaattcagtttgggaaatgtcccaactcaattattacctctcctaataattaagcttaatggttaataaaatgctattttcttgttataattatcccttctcttgtattttttaaaggaaaataaagagttaccattttcaggttttttattttttgaagaggttatttttttgtttcttattatagattggggtaaatttagcgactgacaagtcaagtcagtggcattttatgtaattaagtcgaaatcgatggggaaattgagatacagataaaaattaaatgcgatttttatataaaaagcgatcacatgcagttatcctggacctttgccggcccaagtcgggttttacccatattaaatatttaaaacccgaaataaaaatccataaaacgacgccgtttgagatcaaagtatcgccggttaccaaacaaggcctcttctctcttctccgtataaatagtaggactccggtcatttacagagagagagagagagtggactaagccttcgtcttcgttcttgatcgtttcttccttttccctcgctcttttatcggcgccattattctttctggtacacttttctctctcttcctctgtttaagtctctttcgctctctatgtatttagtatgaatttgtagtgttgttattttttttttttt

SEQ ID NO: 184104 - DNA, 881 bp, Cannabis indica
tttaattactaaaattttattgttaattgtattcataatatataaattaaattccttaattaaaaaatatttttataaaaagcgacataattaagttcttaataagaatgttgcaattaatcttgaaaatgtagattgcaataggccaggagctgtgtgtcaagatcctcgcttcattggtggtgatggaattaccttttacttccatggcaagaaagatcacaacttttgcttggtttctgactcgaaccttcacataaatgcctacttcattggaaaacgaaaccctagcatgactagagacttcacttgggtacaatcgcttggaatcctttttgacaaccacaaactcttcattggcgccaagaagacctctacatggagcaatactgtggatcgtctctccctcgcctttgatggggagcctgttattctccctgttggcgagggagctgcgtggcagtctcatgagtcctccataattgtgttgaggactcaagatgcaaattctgtagaaattgaagtggaaggtaatttcaagatcaaagcgacggtggtgcctatcaccgagagggagtcacgaattcatcgatatggcatcactgaggataactgttttgcccatcttgatttgagcttcaagttttatgctttgagtggggatgtcaatggtgttttaggtcagacttatggaaagaactatgtgagtcgagtgaagatgggagtggctgtgacagtgcttggtggcgagagagaatttactgcttcaaacttgtttgcaacggattgtgtggcggcaagatttgatgggaggtttggaaaaggtaagggtggttttgaagagtttgttggtatggagtgtggtagtggaatgggtggtc

SEQ ID NO: 184105 - DNA, 3808 bp, Cannabis indica
ccagtgtggctgatcatcctctcaaaccaactatcgatcatcgctctttacagggtattagtagttgtttccagctattgtttccctcccaagggcaggttcttacgtgttactcatccgtctgccactggaaacaccacttttctttaaacttgtatgtgttaagtcaataaaagttgactgcaaatagcctggacaacgactaagcaatctatcgcgaacgccaccttcctccattaagcaataaaatgctaaaagcactagtggtgtctaacaccctccaaagtgtcaaattgttatttgtgcaattaagtatggatctcatacaatttaatacaataatttttatggaacatagctaatcaatcacaaaatgccgcctctaagtggtgttagcaccactggtacctaatagcttaacgatgcttatagactatgtaatgagatttttctactgtaacttctccacaatccaagacttggtaatcaaattcgtacgagaaaggaaacagtttaaaagtaaaagacagtgatctgaaatatttcagtaccaaccaagatagaaaaagttttctattgaataactgtttataagtgatgaatgagtatacatgaatatgctgatagcatcatcaaaattgtatataaaaacaggtttaaccagttccacttcaagattattggagagaaactcaagtgaggataactgaccatatgatcttggcaaactgttttacagggttgaaatttgctcttttgatcagcattcagtaaacctgtctaaccaatccaattttgttttggagggtctgataaatacaatctcaacaagaatttaggaatcaaaggccagttttcccaaagcggtcccagttggagtttaacataccccaaactttctcatcaactctatgctctctgcaatagttgaacctgaagttccaacaaatccaagcgaagcacagctgcaaatggtttcctccacgtatagaagcacatcgggtaagtttgaagggccacaatgcttggtcaccttactatcaacatcacgaatttctggaagaaacccataactcatcccgtgatttccttccacaagtctttttgatgtttgtacaaccaactgatcactctctttgagaaaaaacagtttaaaccggcgtgaatcttcagccaaatcacccaagtaacttccagtccaattagcttcaggaagatcagtcatcacaaaaatatgaataggatgaagactctctccaagagattctattttctgttttaatcccataaaagtagtcttccaatggttcttgaactgtccatctagtaatctaagctgtgcacaaaggaaaggagcttgaatggtctcacgagcaaacttctttcctgcacttacaatttcagggacaaatgggagaaattcaatcttatcaatcagattttgtactctttgatctcttggggattcatgtatatcaatgtatgactctgaacctttgtaaggagcagtaaaaagactaccaaaagccaacacagtggcagagtcagcttcagaaccaggtccgagatgcttatacacatctcgccgtctcctaacataggaaattttctttttccttttgagctgatcatcaggttgaaaagaatccaatgctccatcctcatttccattttgatatgtccaaactgtagttctgcagtcttcatccacagcatataaacacttagctacactaccatcaagcccagataaaaaagatccacattgttttaggctatcaaacaaagaatattgccaatccaattcatggaaacaagtactatctatatccaaattgcaccacaatgaagcaaagatcctaaaatctatgactctaactaaggatgaagaaactaaagatgaaatgtcaatgatgtcagccatggagacatacctacaagaaaagggagatacatgattacgaataacatttatataaatcacaatcaccacaaacaagcaatttaaaaaaaggatcctaacaccattaaattcgatttcgatcacagaaatcaatccgaccgaacaaggggttaagtgaatttctcgcattggtgttataaacatgaaaaattaaacaaaacccaattgaactgtcaccctaatctcaacaaacaaaggttcaaatcgaaatgacatacctcttggtgcgaataaggtcaacgacatgatcccaaaccgtgaagcgaatctgattcggttccaaaactctgaacttggggcaactaccgagagcaacggcatggtgatccaaaatgggaggaataagtaaggttctgttcaaaatggcagagattagaagggcgttcttgaactcggagagctggttgctgaaaccactgtggggggcgtaccagaggaacttttgtccatggaatgagttgcaaggggaagaagatttggagagaagggatttaggggtgagaaagtagtaagaaagaaagaagaggaagaggcagaagagaaaggtgagggagagtagtggggatctgagtgaagaaggtctcttggagttggatggccatggtgatggtctggtggccatagctctgtttgggttcaaaacattcatcatcgctctcatttttctctttcattgctctcttacccaattaggctaccaacttattttattttatttaaattaaataataactatatgttattttttgattggtatatttaaatttatttttttaaaaaaataaaaatttaataacttgtactaatcagatatttataaaagttttaaaattataattaaggtattattactgttaaaaattaaatttaagtatttatttataataaattaaaattaaatatttataaaaaaaataaaaaaaaaatgaaacaaattcaatcaaacaagttcataatgcaccttatttcaaaaaaacacaatcataatgcaccctcaagtattagtttacacaactaattgatgagataatgtagagtaggctaccaagttattatacacaatacaacacttgtatttctcacttatatttgatgaaatgttttttttttcattagattttaatatatatttaccattaatacatacaaattagaacaaataggatttcttttttccaaattataaccctcttgattgttcaaaaaaaaaaaaccctcttaaactcttttttaaaaatatttttgttacaatattaattatatgatgttaattcgatatagtttaatatatatttagaagttaatactgtgattcatctatatgtttttggtgctacattaagaaattttaaaggtgagattgttgttgatatatcaattttttttgagagatgcttaaaattggaaatgatgtagacaatgatttaaaagtatggtttgtaatagtcaaataatttttatattttatacttcggttcactttatagagattaatttttttatggtggttatagaattgcaatctactcaaattaatgtttcggatttttattgtttttcagcagacatttctcttttagtgtcaagtttttcaggagtgttcatattttagtcatatgtgaatattgttgttcatattttagtgtcaagttcaatacaattcttttatggtagtcaaatgatcgttcatgtttattaatttatatgaatattgttgctaattagctaaatatcttttttctttggacactgaatatatatggttggaggaatttacaccttctccaatgtctttgtattatgaatcttttaattaaaaaagtagcattttattaaaaaaaaaaa

SEQ ID NO: 184106 - DNA, 2954 bp, Cannabis indica
aatagctccatgggcaacccccattaaagatgctcttagcatctcttaaagatgtgtcgtagaattgcttagtgataatatcattatttggtggcactttcttcataacattgcttaaaggaggcgtcgtataattaattagtgatattctataaccttcaaaagttgtagatacactcgtttattatttctctttgttaaaggttctcacattattaatgtgttgaaaaaaaatagaatatatatatgattcctgagttactctcatgtctaattgattttgggatagaacccaatgcatattattatacactcacatatttctacttcctcaaccttacaattctaaattctaaccagatatcaaagcaaaaacaaaaatctctaacgatccaatccaataaaaaaaattgatcgagaaaaaagtagagctaaaacaaagagccaccaaattgaaagaccgatctaaaaaagtagagtcgaaagtcaaaaaaatcacttgtaatttagaaatactgagccaaaaagttccaccgaaaatccaaaaagtatagccaaaagagtcacttgtaatttaggaatagtgaaccaaaaagagccgccagtgattaagttgtccaagatagtaagcaaaaaaaaactaccatcttaaggagctattagagagtcttacattactaatgtgttaaaaaaatagaatatatataatacataaattactcttaccataattaattaattttgagataaaatcacatttatcaaacaattctaacactattccatcaaaataaaacaagagaattgctaagacctttattcatgcaatttggtatcaaattttttaaattatgatttaataatatgaaaaaatcgttacaacattctttccttcaaaagaaaacaaaaatataaaatggtaaagttagaagcaagtgacactcatattattatagtagtgaattcataggctactccacccacttggactcctcccccaccaggacttctcaagctcaacactgacgcggcctttttgtagtcaactcactcaacaggctttggcagtgtaatccataacaatgaaggtggagttgttgcaacagtcgccttcccttatagaggaggaggagaagctgcaactctcaaagcaaatccatcttcaaagtgctactctggtgcattgaaaaaacttttcccattcatcaaatagagatagactgcaaaagaatcacgagcgccttagctgccagttccagaaaagaggatatctccctcttcggagatattatcaagcaaattcagtcagctttctctcatctccccaatgccacaatcgatcatgttaaccacacaacaaacacgtttgctcacaaattgacaaagttagtgctaaggatagaaaaagctgctttttggatgggtgatgatccctgcaatcttgagtctctccttttcacttaagggcatcccttccctaagaaaaagaccatgtttaatacttataacattttggtttggtctactggttacatcaatttggtgataaattttttatttttggtacaataattttaataattcacactaaaaacaacataaaataaatatattttatttaaaaattctaacactaataatttataataactaatttatgatataattaaatatttatcacaaattaaataatatatacatggctactagtaataaagatatagaatcatagaataatttaattttagaatttagtattattctatttttattttagttaatattaatattgttatttttattttataattttaaatataataatgatttaaattaattattacttttttgttattttgaatgtaaagaaaccaccaagttcatgtagattaaaaactcaacatataactaatgtgtggtaactaatggtgtaaaatttgatccatatcaatttcgtacataatttagtacatctttgtgaaatattgtaaagtaaaaaattatatttttacaaaagccaataaatttttacaaaataacagtaaaaacacaattgtaataatcttcagcagcaaaatgtaattctttctttgaaaaatataatttcgcagaaaacaaacaagaaccagtaataaaataacagcaaaaaataaaattacttgacacaagagaattatacgtgatataagtattctttcgaacactcgtagtccacggggccatgcttagagaatgaaataaataaataaagtctcaaaaagttacaatgataattaacttaaacaagtttacactccctctaaatttttgtcgcaatcctttgtaattctcttcacgaatctaatttctaagccacaatcaaacaacaaactcccttcgtctttgatgtgtgaatgcttacttcctcccgaagtaaggcttgaacaagtattctcccaaaagcctttctcttattcaatcaagttattaaaaccgatcctaagactagtataagaaaaaatacataagcactaaaatctagctgaacaacaaggttcacccataaagaactctctcctcacaaataagaaaatatgcaaacatgaaagctagaagaaataaatcgattggctgctctctaagttctatttatagaacatatcaaccttggagatagccacaaaattgatgtcacagctatacaacacttccctaaaaatttcatgatttccagcatcacaatcggactctacagcaacagatcaggactagaaaggaaacttgccaaaatggagcacgatcatgaatatggacttcaaacctacaaaatacattgtgtttgatctgatcttaataagacacaactggaatcattaaagagaaagagcaaagtcaaaggttccaaataaaaataacttttcataagagaattccttctgttacaagaagttttctaaacaataaaatagacagtt

SEQ ID NO: 184107 - DNA, 9296 bp, Cannabis indica
aaagaataattatatatatttttctataatatttattggtgagacacctaataaaaagccaatctttgcttttccatcttaaaaaaaaattaaagcatgggcaagttgaaaaataagtgaagatttaattacttaattaattaaaaataaaataatattaaaaaggtgtcgacaaagaaaagacaaaagcatgtcagccaagtttatccaaaacgccacgtcagcaaatccattgaactggaaatcttacgtgtccaaacacgccaacaccgttacccaatcacacaatactaagtcagctgaaccttcacgaacccttctctccctgggtcccaccccctcttatccactccacctcccacgtgctccctcacgtgacttccccccaccactccaccactacattccaattttgctgacgtcatgcccaatcacaaccctcttcggacaattttaccacccccgccaacaatgcgcgtctcttcaactcttaagggcattttggtcatttacttcgtcaaagcttgtgtggagttgacacgtggcgtgttcgcatggcacgtgtacgtaatgacgtgtcaagtggtgattcttctttttatattaacaaactcagttgtagagacgccattttttgttttttttttgaaagtcgagttttcccttcttctctggttttgaataccgactcagcgagttaacgaaactcagcgattggtacgtgttgactcaccctgtttttgtttaatttctcatggttcagctgatgagttcggctatggccgagttgagaggtaagggttctagaaaggcgacggtgaagatggagatcgatgttgaagacttatctgattctctcaattctcttcacaagcgacccaaactcgattcgtcttctcaggtttcctattttaatttatttgaaattagtttatgattaatcttgataattatttgtatttcaattcatatgtttgattgatcaattttcatataaatagttcaatcttcagtttcttataagtagttttttttttttttggacaagcaggaaaatatggactctgatacattaggagagcaatcttcgatgttcaatcctcttaatgagccaagcccactgggtttgcgtctcaggaaaagtccctctcttttagacttgattcaaatgaagctgtcacaagatcatagtgcagctaaattgtcaactttaggcaagagaaatctaaaggggggaaattctatgttaagtaatacagataaactaaaggcttccaattttccagcttcagttttaaagattggaacttggcaggtatatgccactttttaattattgagtttggaaacattttcaatttgagtttagcttttatattgatttttcttcttttggagttgcagtacaagtcaaggtatgaaggtgatttagttgcaaaatgttactttgcaaaacataagcttgtatgggaagtacttgatggtagccttaagaacaagatagaaattcagtggtcagatattgtggctctcaaggctaactatccagatgatgctccggggactttggatgttgtggtaattcttttatttattaaagataaagcggtactaaatttgatcaatcatggtgattgtgatgtgactagtttccttgtttttggtatagttggctagaccgccccttttctttagggagaccaatccacagccaagaaagcataccttgtggcagacaacgtcagattttactggaggacaagccaccatacacaggtatagatttcatttcatattattctaatcattactgtgaggaatattacttgtggtacgagttctcctagatttttatccatcgtggtcaacattattggtgtgtaaatgattatgagggatagtgatgtgtgtgtatgagacttggtcattatccaatatgtattctacgttgttggtgtgtatttgatcttcaaaagtttgaccttgaacttggcacaaaattatgtttatctaaaatttgaatagtttggtcagaaagagatatattggatttgggtgtgtattcgtatatgtgccgctgttgcttcattctcaagctatttaatatagagtgttcctttacgctacttcttcgtcttgaccaaataatggttagaactggaatctgtgattccccttttatgtttctaacttttcatggtgtagcttctaagctatgttttcaaacgagtgattgtgaccgggtcctttatatattgtcacaggcaacattttctacagtgtccacaaggcttattagggaagcattttgaaaagcttatccaatgtgaccctcgtctgaactgtttaagtcaacagccagagattgtgctagagtctccttattttgaaaccagaataactactactgacgagaagaatgaacttagcaatgggtttgatttaaagacggaagacaggcctgttttctttgggatacacgatacaacatcaacatctggtgctcagtcatcctccataaatgaacaggaattcacaaacagagctcctgaaagttattgctctgaaatctcttcagcttgctcaggtaacaaatgaaaagaaaataaaagaattcaatactcatatgatcatcttcttgtagcactaattttgagtgaatacttgttttagaattcaagggcattggagccgagaactcgaagatgctaagcagttgggatcaaatcaaagttcctggaattcacccatcaatgtcaatgagtgatctagtgaaccacattggaaattgcatatctgagaagatgacttcttcaacaaaccccgcctcgtccggaaagcaaaaaaatgacaagggcattctggaggagattacccagtacttgtttaatgattctcagtttaatttggcctcagatgagcagtctctcatgacaagggtcaattccctctgttgccttctacagaaggattcttcagcaaaccaactcttccaatccataaatgatgacaacagtattgtagatttaaacactgaagcgaaaacaagccaaataaactcaaactctggattggcatctgagtctaaaagggataactccattgatggttctgattgcaagcaacctcaagatatgtccagaaaagactcatttggggagcttcttctctctcttccaagaatagcttctctaccacagtttttgtttaacctgtcccaagattcggataatcaagccagataatcaaaaccaccctcagaaaattcttgtaaaaagtaaaaaatgtaggttgagatgtagtgatgtagacatgtttgtattctaagagctatatacttattgaaagactaatagggtagttttgctttgtagatattttgtattgtctcccactctaatgcctcttcagcttgtaaatcagtaattttcttttgaattataatacaagtttaatgatattatatgagattttctacttctacacaactaaataaaatctcattacaaaaagaaaacatgtttatttcaaagcgctaattgcaccacaacaacactcattaaaaactaaggatgtatatgcaactttcctggttctaactcctttttttttcataacagttctgtaaaaagaaacaaaaaaattgatgaaacatatacatataatatagggaggtatttttaaaactaggaaatgggttttgctaactaggtttcatcatgaggtggttcatcctcatctgggacttcttccccatcttgcaacatgttcataagtatattgatttggtctctaagcgttgcattttctctctcaacatcagcccttttgttcttttcgtcttgaagttgagcttgaaggtgttctatgagccaaccatcctcttcaactaccccatttagatcatcaatttccttatcctgtcctcccaaaaataaatacaagacaacataataaaaacaaaacaaatacatagacattactttaacatcactatgcaaaaatgatccatttcaacgatttttttgaccggggcagggcggacccacataggcgaggaaggaaaaatcgataaaaaaatgtatatatttcgttagttataatatatatttgtaattaaaaatggtatgtaggagtaatgtgttagtttttgtataatatgttaaactatcttatacaattgtcaaggttcaaatcaaactcttatttgtataaattattaaaaaggtccaccccttttacaaaataaaaaagtacaccctctcaatttaaatttaaattctgagtctgctactgacacgaaaattatatcaaattgagtcaaatgttgtttagaatcgaaaatggttactaattagtaactagttacctgtctgttcatttcttgaacagcaatcctcctcatgctttcaacaacatcaacattgactagcttcctcttcttgccaatttgccagccgcggggataagtggcggtttcaaagtccggcatggggagcaaagactcagccgttggccgctgtcggtttattcgagttgtaggctccaatggttcaaacaaagcctttctacgttcagaaagtacaggaggagttgtttctgcatcctccattttcacttcattagagagaaaattttcttcattcatattaacatcattatcttcttctcttgttgtgatcaccttctctatatcccttcctttacctgttttttttggttgtctaaacaatttagaaaactaaccaataaattaagagaaattttaaacgttaaaattccattcattacattgtcttgtgtcacatcactttgaaatttttgtaaaagccttaaaattagaggttggttggtcatagagtctaatcataaacaatcattaatgtattacaaataatgtttctcattccacaatatttgggtgcctatcataagctgccaaaaattgacataaaattattattttccaatagttgaattatattaataataatgtaaatttactttaaaatctgaaaggggcttgattgtaataaattataatcaagtccaaaggggggcaatattgactattacatttttctttaataaaaaatagaaatcaaaattagctaaattaaggtcttccattacatttttattatgtttttcttaagaaaagaccaaccactaaaatatcattaagagttaagacatacacatactccatttataaaaatatacatcaattttcatatattttcacatagccctacttatcattaagatgtggcagaacaagcaagaaaaattaaaaataataataaaataaaaataatttaataataggaaggtaagccaaccaattttaaaccaaacccaagtgaagtaacgtaagagcaaagtcagctaaaatagtcttaaactaatagtcatttcattttgtttatctctctttttctccaaaccagagtaagaaagatctgatttttacataattgactaacaaaaacaacttttatttgtaaagggtcaattccaaatttccaaattaacactcaaaactctcttttttttacccctaattttcccaagatagtatcatcataaaattcaaaagtaaatacggtaattaagtaagtaattaagaaagaaagtttaaaaatcatgatgaagcagcagaatttattaactttgattgatgatcaactcattttaatttcacatgattttttccagatattaattgttgatggggagacatatcctaactcatgcaaaaccccaatttcaaaaccccaatttcatgcaagtaaataaaaatccaatttttttttttttgaaactaaaaagaaattgatagtggtacctgttctttttcgagacttccaatcaattctagtggaagaaactggagaaaagccatccaaaactccccctcttcctcttcctccattaacccttgttctattcttgttttgattttccatggaaagagaaagagaaagagaaggagaaggagaaagagagagaagtgttataaattataatatgttgtaaaattgatttgaaattgtggggtttgagcaaaatttgatttttttttccttgttgagttgctttgggttttcgacacatacaatattcaattacattacaatacaagatagatagaagaggatgattactcatatatatatatatatgatatatatcatcatcatcatcatggttaccactaggcatcatcaaagaggaccacatcactgaatttttgaacggttaggatttactttgaattgttggtttggtgggtcctttcctttcttattctttttttttactttggaacattattaattaattaattaattattttactttatatgtatttttcttctcaattttcaaggcttgggaagatgaaaacaatcaaataaaataagagggaagttaagatttttttttggtgaataattaattaatttatttggctttgtgtggagaaggatcagagttatcagaccaacctttgttaccatgtgatcattcattttcagacaaataagagcatatatgaatatccttttggggagtctcaccaaaatttactcattttttaggtaattaaataattttattcagcaaaaaaaaaaataataaataaattgttattttattactccaaattgtaacgaagtggatccgggccttgttttgagtatttgggcttgattattagatttgtaaacgaaattattatgagagaaaattagactctatactcattttttgtttcatattttaacttttacttttattttacaactttttaatttatacccacttttataagttatatccccattatctgcattaggaagtctaattttgattagttttgtgaggttatatttggtactttgattataaaagaaggtatttatcaattaaaattattttagaattatatttggttaatgtgtaaaaaaagaggtaaatttcaacttatcccaaattatgaggtgttggcccactttatttctcctcaaccttgaacaataatttattgagcttcataaataccaaaattaatttattcatcataacttttttttttttcttcttatacaaatacagtaaatatgtttaatatgtaatattatattagatgccacaaatagtattttttaaaacaaaaatattattattattataaaaataacaataaaatgtcatgcttgtaaaactagcactactgaaattacaaaaataaatatgacatttcatagatttgttctctattttacatgctttattatttggcatgaaaatatttcatttcaacctaatgttattataagtaacttattaatttttttttttttaacttattaattttattaactactaactaacagctaagtgaagatgaaaaatgcctagccaaagtaagcaattttttaatatggccttcaatttcataaaacttaatacaaaaaacttggtaccacaaactattttaatagacaagccatttaatattattatggccttcaatcaatgcaaagttttctaagaagaaatattattattattaattcccatagttttctttgtgcttcaattgttggaggccataaaatatttattaaactaaaataaatgagcttatatgaaaatgatattaaaacaaaaataaggctgaggctgaccataaataaagcttctttcttatatcaaaataaaataaaataaatgaagctcttttttccagtgtgaataaatagccaataatttattaaaacacttaaaaccatttatggaagcaagaagttaaatttatataatctgctaattgctaagattaacttatgagttttgctgcttgtcattctaattcaaataagaataactcagaaattattacatccggtaattttcttttcagtttctgtaataattattattattattttagaccataaaacacttataaatgagtaagaaaaatatttaataatttagttgaaaaaatctcaataaattattagtagttgaaagtgttgaatttggatttaatgaatggaaattgattgaaagtagaaataatttgccagcaatatcagatgaaaatgagaaataaaatagcagaaagaaacaatgtgaaatttgataaattgtttactatagaataaaccacaataaaatgtaactattcactagtccatcttaacaaaaatgtgtataaactattttagtaccccccataatttgattgctttgtcagccatatatacatacagttgagaatttcatctatatatagttaaattcaatgcagcaaatgcagattttgtaaaaacaaaagacaattataggctcttgttactttgtctactactctggactaactaacaaaatttggagaacatcatattctgtgttcaagtaaatggattcaactctctttcatgatggtacagagaatgcatggaggattggtagcttggtcaggaggggtgttgaggtcaaggcagtgatcatgaaaggtgtggccacatggtagaatagcggacggtgggagaagatttgacctgaaagcagaaccgtctgctgataatgaaagatccctttggcatatgaaacacttgtgcccaattattttcttagtctgatttggatctgtaaaaacaaaaaagacagaattcattcaattcacaaaacaattctcattccaagccaaaagaataaatataaaggtgttaaaaataagaagaaaaaactcaggaataccttgccatttgatatgctcttgaggcttacaggaagtcttgagtgatgactgttttgttggacagcctctagtattcttattgcgacgtagtaaactcggatgtagagtttgtggaggagcaggctgtggttgagagagaatttgtgaagcagtcagggggtgcaagaccatttgtggacgagcaatctgtagctgcgagagaaaatgtgtggcgggttgtggttgcaagagaagttgtctaatggcctgtggctgttggagatattgtggagcagggtgtggtgctgagagaaattgtgtagcagccagtgattgctgtgagaaatgttgaggacgatatggaccatacgtttgaacattgtgcatctgtggatggggtgagaaggagggagtagtctggagcaggtttggaagtggtgtgttgttataagaacgctcatggttggcttgggccatgtgataaccaacgcctgacgaatttggtgaacgttttctcatcttatcgtgttgactttggaaa

SEQ ID NO: 184108 - DNA, 3923 bp, Cannabis indica
  modified_base (160)..(160): a, c, t, g, unknown or other
aagcgtttatatattacaatgtataacctgagactcgaacccaagacctccaacacacacgcactctcttatggccacttgagctagcctcaagtggttgtttttaaacttctctaacaatgtttttaaacttctctatatatatatagtttttttttanatttttcttatttatacttttcatattaatatttgtatatcattattatttataaattaactgatatagaaaaactataaagaatatgaggtaggtgtaatgtatatgtaagaaaagtaaaatagaaaaaatagagttaagtgatgatagtactctaaaaataattaaccaaataaatcccacatcaaatacgggacaaatttatcaatgctagaatggtcaattagatgttagatgttcatagttacaaatgcataatgtaaagactggtagtggtgtgctgaaattgataaaacgtataatgcaaaaatttactattcatccacttaaatcagagtttataaatttcaaaaaaaaaatcagagtttataaaaattgaaaacccttgattgcacctattgtttaagaaaagtgttcgatacctcactcacgcacattttgctagttatctttatcagcttacgagtctcttcatccaactgaacattgtctttctccatcctttcttcaactaagagtggcattttaccagctttggcataagttcttaggagtgagttatatatccctgaactaacataatgactgtttcttaaaatctccaataggtgttcggctccttcaacattaccttcctcctcaatcatcttgaatacttctctaaccaacttttcatcatgatcccattttttcacactagtcacagccttttcaaagtaatctagtacttttcccatgtgtttttctttcaaataaccccatgtgagaagctcccaagttgtgtaacaaggagatatcccttccttgaccattctatcgtggaacgtttcagccattcccatttggtttctgttgatgtatgatgcaagaagtaaatttgaaattctaacatcaccagtcccagaaactgatcgccactcggtatagagatcctcagcctccttcaactcctcgagttttagaagagaagatatcatgcaattatactcggcatcattcattttacgaaataatgatttcatctttttccaagttcgttgaacaccctccttatctcccaaattcgtatgcagactgaggagagatgaatatgcaactcgatttttccgggttgccattttctccatctctttcaaagtatatgcagctttttcagtgaacccagttttgatatacaagttggttaaagtgctatatgttacccagtcgggatctaactttgccttctttaactcaagaagagttttttctgcagattcaacatcattttgtgaagcacaaacagtaagccacagattgtgagtaacaacatctggagtagtattcctttttagctcctgaattattcctggaaccttctctagttgcccatttgagatgtaaagagacatcatgtggttataaggaagaggataatttagtaaaccgcattctgacattctttccataagagcctcagctttgtcatacaagttgttcttcacatatgtatggagaagagctgtacaggtaaagtggtctgacattccttcaggcagatcctcaaaaaatttctctgcactatctatacctcgaacttttgcaatcaagtccaagtgaacagcataatcacccgcaagcaacttgatatctttctgttctctcatccattcacatatctggtttacaataaaattgaaactgtaaacgcatgggactatcagcagagtttgcaatattcatgcaatggttcaaaaccaatgaaacacaaaacttaatctaccaaacaagtttacttgcagtattaccataatgcttaaacatgatcaaaatcaagaaatactgaataaacttgagttctatatgttagatcgaaggtttacaaacacctaagagtcaaaattccacatttcaatctcaagaaattcttaattccctcaacatacaggtaatagtaagacacattgtatagagcgtctaactagttaaatgcttaacgagaaacttacaatctcactctaaaacggaatcgtctaacacatattcattttcatgtttttcagctgggatttttgtcaaacacaatactgacgagacattagaggaaaatctatcgcacaacctcatacatcatccaagaagaaatcgcagataacattgacaaccacataatgcagaatatacgtctccagtttgttgaaaaaggaaaaagagagtagggagaagaagaagaaacctcgagggcatgtttatatcgcctgagcttacgaagctcgcgaacaacacgattgagctcgtattttcggactgagttaccttcctctttccatttgctaatagcaatcacagcactgcgttttgggaagaccaggctcagaagccttttacccaaggtgtctcggccaccgccgctggtgttggtttttgtcacagctccagtctttgagactttatttggcgccgatacgaccgcggagaaactgcgggcggcggcgatggacctccgaaattgacgaagtagcatggtctactcttgattgaacttgcctctgctactaaacccaaagagcaactctcgactccgaagctacgtttttatacttcaaaaattaaatattatacaagaacgagacttgctcccctatattttaatgcaatttttacaaaaataataataataataataataaaaaataagaattcatgatttaagccctctcaattgtataatcatatacctacacagtctcaaaattaccacactaatttattggaatttcacagcttaactgttatttctccttatagactgaaagactattaacggtcacaatcagccccttacggagtccgacgttctgtgattaatctggaagatcgaggtgtgagtttcatcactgttccctagaaacaacttatgaaaaaaatagcaatgacacttgatagatcatcaaaaggtaaatatttttccttcatcttttgtttttctgatttaatctatatgcatatggattctagagtgcagtacagtgataattactaaaatatttctgttgcatacttgatttagtactacataaccaataagaagatcccttaacttttgttttatatattctagcaatagaaatcctttctcggatgatatttgaggaggaaaagagaaaaacgaattcaaggtttctgtatttccgagggtggcctagtgatttctcacattctttctactaacgacatcatgctatttggccaagccatgattcaagaagcttctcgaattcttcattaccttgactttgtactgccaatgatattgactttaacaataagtttataatattttttttacttttaatatcggtgcagtttaatgtaaatttatacattcgatacaagtctatttaccaatatcctggaaaagacataccacttgtcatagtataagtagaccaaatcgtcgattatcacgtcagtgtaaatttgatgcacggatttatctcaagaataaataagtttgaagcatataatcataattattttctaatatgatgacatcactatatgttagaatttaatagaatttatatattaaacatataataatgtaaatataaatatgaaccaaatgattgataaagtaaaaatataatttctctactttatttgattataatcaaattaaattaaaattagattttatataatacataaaactcaacacatatattgtaatctaaagaaaagtattgtcataattgattactgttagactataatatagtat

SEQ ID NO: 184109 - DNA, 3692 bp, Cannabis indica
aatattgcttatttaatcctaatggcagtacttggtctcatatactcattgtttcttctttctgagtgactacctcactagtgcctctatcttgtagtttgagattactactgcatagaacaccagcttcagaacataataagcctacatctgattcgcaaacatgggatcttgaagagctttctgcttcccgtgcttttgttgagaaactgttagaagaaagtcttgcgaaactggagcaagaggacgtaaagttggatcaatttgtaagatgggaacttggagcctgctggatacaacacttgcaggaccaaaaaaatgcggacaaagataagaaaccatccactgagaaggctaggaatgagatgaaggttgagggacttgggacacctcttaggtcgctaaggaacaagaagaaagtagatggaagcaatgtgaaaatgcaactcgagaaaccggatggcattactgcagaagcagagggtgccacatcaccttctatagaatttaatgttgaaatcagcggcaaagaaaatgagcttgctctgaagaggttgctgtctgatgaagcctttgttcgactgaaagaatctgatactgggcttcattgcaaggtaatgtatattgcaggtgaactatctaaatattcttctttatacttggtagtgggaataacctattttttattttggcagtctcttcaagaactaattgatttatgccagaagtattatttggaagttgctcttcccaaactggtaattactgaatatgttttagttaaatacctttactttccctaatatgttatggtgattaatgtttctattacttttatatttatacaggtagcagattttggttctttagaactttcaccagttgatggtcgaactttgactgatttcatgcatactaggggtctacggatgcgttctctgggacatgttgtaagtgccctgtgcaaacctttgatcctttgtttttttgtttcttttcttggaacaacttgatcctctgtttttcaatccacccttttatatattattatcaaccttagagaactttttttttcttccctgtcatctacattccaacatgcgtgtttcccatagtacttcaaacagtttttttatcttttgttggtaatattcattttatccccatcattatttttcttgtagttttcagaaaaaattatttacttgataacaagcagaacagttagtaattggtcagtatcaaaatccaattatgcaagtcttctaatattgactgactatttcttttaatctttgtacaggtaaagctttcagaaaagctatctcatgtgcagtcactttgcattcatgaaatgattgtaagagcttttaagcacattcttcaagcagtaatttctgctgttgaagacaatgagaaaatggctgtatctatagctgctacattgaatctgatgcttgggattcctggaaaagatgaatttgataagtcttgccatgtccattctctcgtgtggagatggcttgaagtattcttgagaaagcgatatgactgggatcttagtagcttcaattacaaagacttgaggaaatttgcaatcttacgcggtctatgtcacaaggtatgttttccaaacttgggacatggcacttaatattaaatatattgacatggagaaacttgtgtgtcttattttggatgtcacaagaagctttaagtcatgtctggtagctattaatggattaacagtgttgtcatttgtttattattgttttgtggaatatgatatttaggttggtattgaggtagttccaagggattttgacatggattctccaaacccattcggaaagtccgacgtggtcagcctagttccagtgcacaaggtaatgtaatgactatgatactatttaccgtctacctaattttatgtcagtggacaagggtttcttaagtatctattatttaatttagctgcaatttttcttttatttgcagcaagctgcatgctcttctgcggatgggaggcagctactagaatcttcaaaaactgctttggataaaggaaaacttgaagatgcagttacatatggaacaaaggtgtttggagcttacaaactttttcctgttttctattatattaccagctttacttattttattcttgcaggctcttgcaaagcttgtagcagtttgtggtccataccatcggatgactgcaggagcttacagccttcttgcggtagttttatatcacactggagacttcaatcaggtcttgtttcttctttctaattttaaaaaaatccctcgttacaagatctagaaagtgcattatctcctaatatagattatataacatgtaagctttttctcagtaagtgttcaagtctagtttttttgttcgatttttcaggctacaatttatcaacaaaaagccctggatataaatgagagagaattaggacttgatcatccagacacaatgaagagttatggggatcttgctgtgttctattacagacttcagcatacagagctagctctcaagtatactttcttcttccataattattagctttgcaaactgtttctatagtctatgacctgtttctaaaaacacactagatattgataatattatatgaactgaacttcaaaaactagacacttcatggtgcttgaatgagtttacacagagtggtatgctcaattagtacaaatgttatgatctttattttcatttggtgattgtttagatttttagatatattggtagatactagtaatactagataaaaaagattatgtttaagtttttcattttgaagatcagttttcttttgtctaaaaatctacgttctttttgctgatcagatatgttaagcgtgctctgtatcttctgcatctgacatgtggtccatctcatccaaacactgctgcaacgtacattaatgtggctatgatggaagaagggcttggaaatgtgcatattgccctgagatatcttcacaaagctctgaaatgtaaccaaaggttacttgggcccgaccatattcaggttttttcattttcattgatttgctgatttttaacacaattacaaacttgatagaaatgctaaatgcactctctaactaatgatatataatatttttataatataaaataattggatagttctgcatgtcataaattgaaacaggatagtgcaaaaggtgtaaaggagaactcctttagctctcttttaaatataaataaggtcttctgttaatgagtgctatggatgtcagacatgaacaatatgcatggactgaaacttctcatttttacttagtaactttttttgattgattctccagacagcagcaagttaccatgcaattgcaattgctctctcattaatggaagcataccctttgagtgttcaacatgagcagacaaccctgcaaattctgcgagcgaagcttggtcctgatgatctgcgtacacaggtatcttctttatgttagcaaacataatttttgataataatcatcgtaggaaggaaattttgatgtaatcaatttacatttatatttttaaattttcttgtaagaaatgtgattaggatttttcatttcctaataatcctaagcagtctgtaagttgaaaatttgtaaaaaattagcctcaggatgctgctgcctggc

SEQ ID NO: 184110 - DNA, 1556 bp, Cannabis indica
ctttagcatttctcatattaaaattgctaaatcttctatttcaatttttcttttttctcaagaattcatatcaaataatttttttttcccaattttttcttattatttgttgaggttttatcatccttcaagtaatttttttttttataaaaaaaaaaatcaataaatatagtttaaagtaacaatagtagacttcgtgatattcccattgtttttttttttgatataacgtgatattcctattgttcaaaaagaaaaacctagtgaaataataaagaagcaaataaatttattcaatttggtactttagcaaaattatcaaacttgaaaagaaaaatgtatttcacttcaaaattacatatattttcactattatttttcttactcttcacatatatttataaagttacaaaatttgagaataccaaaacactctaaaacacatttattgagctctttggggccccgaaataacttgttatgaaatagaaaaacagtgaaagctagagataccttaatcaagctcagaactcttagatggagtcgtcatggcctgatacacaagtgaataatggagtgaaaattgaattttactgtatcaaaataaatgttgatgtaactttatttgatgagagtcataagtttggctttgggatagtggcttgagatgctaatagtcctttagttgaaggatgtactactctcttgcaagcaacagtggaaccagagcttgttaaagagcgataggggttcgggaggctcttagttagattaaagaccgtcaatagcaacaggtgattcctaagactgatggattgtttatgtgttgtgtaggctttgagggacttatttttgtttgatcatgtcatttaggattgtaaacgtttgctacgtttgagaaatatttttgttttttttttccattaaaatatagtggctcataattttattagagcttcaattttatattatttttgaagttttggtgtgaagtttattccatttgatttattacctttttttggtagcaaaaattaataattaataaagttgatatttccatttaaaaaataaagcacgaccttaaagtttgtccaccaaaactttctattttatataactaacaatgacttaaaattacaactttatgaatattaaaacaaaattattatgagtcaaatttatttttttcaattttttttgcaaatatatcaaaagtaatatagaacagcataactataacgtattcaattatatagaaaaaaaataatactttcatttgtatattcgaaatatagattatacaaaaaattaaaataagtgattgtaatttaaaattaatactctttcctgagatatgagtgtattccaacgaatattactattaggctcctataatactcaatatatattaacatggaatatatcttacaattgattaataatttttctataataatattaaattaaaattgaagttggatattaaattatactattaataataattgaggtttggctctgctattcaaaattgtaaggatttacttatggac

SEQ ID NO: 184111 - DNA, 4126 bp, Cannabis indica
tgaaataactcatgcatgcacacatgtactatattatattatatatgtattaatttatactaaggtttcagtaattacaaatattaatgttggagttagctgacccaatttgtacaaatttttaatttatgctgttatttattcttatgacactttcattgtgaactcaatatatatataggaaacttattaatatttttttttttgagcatttacattgaaagtgatgatcttttatgacattttatatttgttcaattaattaattaaattaacagaccaaaatcaactctaatacaagtactaattttttgttagtactattataagtcaaatagtcttaaaaaataaattcttgaagtaaactaccggagtctctttcttgacttatactttaagaataacaatacataattttcaaggcttaaagtttcaacaaaacaaagttgaataatgtgaatgtgacatataagaaatttaaagggtattaaattaactatttttttctttaatttattttgagataaaaatttcatattttggtataacaaaccaaagaaagaaattaattaagagaacccaattaacattcttttccttccttgtgtttatatggcagtattttgttgacaaatataacctagacagaatcataaacttataaacagattgagtgtgacttgtatgatgttttgatagtattattgaattattcaacacaaatattataaggaccaattgatgagattttatcattattatggtattactattctattaccattatcagctattatttaatttttttttttaaaaaaaaaccaattaaatgaaatagttaataaaggtgtattaaatttaaaggcaatgttgaaaaatatttattaaaattgtctgacatgttcttttgaatttgatgcctgaaaatgcctttctttcttggtccttttggagctttaagaaaaaataataatgaaagcatttgtgtaagtaacacctttaaaaaattaaaaaggctacttttttatttattataattattttctttcaaatttaaagtttctgccccccaattccaaaagctgggctaaaatacttttcttcaaaaatggtcttaacctttttataagtacctataaagtgaataaaaaggtctttgtaagatgatgaagtaacatggaagttgggaaccaaagtccccatttttatattttgaactattttttgaagctaaagagttaggaggaggacatgacatgatgttttattgggcaagagggcattttgggtagagtaaagaaaacataaaaaactaacacaattcttaatgacttttctacataagaatcagcatgtctctagaaggaattaatataaaattcaaagctatttgccaaattatatatatttagaatcctcaaaaataaaatgatttaacactttattttttatgatgatgtaataccactaaagtttatatttttatacatgtgtgagatgtgtacaacaagttatgttctcataagatactcaaaacattattaagagaaataagattcacaaatcaaaattttcatgacccaaattatgtttaatcactatattacacaaacacaattctttctccaaaattcattcatagccagccacaaccaaccaaattcagctaaaagaaaaccacatataataagatgttatgtcatcttctcaatttggcattaggtgcattataatttgtggttaggaatcatatgtcctttttttttccaagttctccttctctataatgaatcacacaacacaacagaactcactcaatgagcatcatcactagaccaaaacccctctattttctccattcttggcctaaaaaaggagtgaggaagtgaaaaaaagatgggcattacttgctgtggagatgaggattcaatgctactaggactggtcttggctttggtattggctatggctttctttatcatgtctcatccaccaccccaaagaagagtagccatctaccattgttcttaatattttcatgggttttctttggttcataatttggagtttattttcaagtgttgtataaaattgttcaagtataaataaagtggatttcctttctgttctcttatcttaaagtactggttttacctttctgtttgtggaaatgtcttgatatttgttccattatattatatcccaatttttaagaagagaaaaacatccaacttctagcctgtaagctctgtcattttttggctgtaacgtgtgtcatttttggctttagagttaagatcttgtcatggagactcccatacatatcaacataggattacctgttatcctctttagatatacatataaaataaatattgtattattaaacagaagaaaaattcaaaacctaacagagacaacattttcttttcttttcttttcctgaatttaatgcatgcatagttttctgtcagaaaaccatgttcaaccaagggcccccattttggtattcacaaaagaaaaaaaagaaatcccaaatcttcaacattgttaataatgcatttaatattgacacttcttccatgtactacaaatcaaataaccatataagggtccagaaaataatttgcccatatgtagctaaatcagataaaatatcatcagtacttcaaaaacaagagttatttaagttaagatataatctttcttgttagtataattcccagcctattaaagctcttgaaaaagtcttaaccagagcaaagtttttccagggccaagttctcatctccaccaacagactccaatgtacttctcactgaagcttcaggaaatcccatctctacaagtttttgtacctgtaaccatagaagataaaaccgatttcaaaagatttcgatttcattagtttcgatccaatatttgagagttaagttttatatatcatgacattttggcagataaagtctatgatatttgaactaagctaccttttcctcaaccccaagtgatgatgactttgcaaaactttctgtccagtatcgagcagtgccaacaaaggtctgatagtgtttaagatactgtaaaatgtcaccacaaaaaaaaatgtgatatgtttagattacaagaaatattcttagaaaaagatataataataacaagataaaatgtatcaaggcatgatttcaggaaactccatacaagcttcttcatttttcttttaaactaagatcactgcctatccaaacaactatagcaattgctaccgcaatacccaagaggaactcgaacctaaaaagactgtggtagcaaggcaactcaataaacttgaatgcttgatcttcacttatgtttgggataccgaatgaacaagtagtacaatcaattggaagagagaataggatacaaaatagcatgcgataaatttagatcatgagacttgttaaaaacaaatgggtgcatcacagcaagagtccatatcaaaataataaaaaaacaatcaattgggagagaaaaattatgagcaaaagattatcatagggtgtagtatatcagtaattaacacctgttgtgctaccacagcatcttgaggatcatcgggttgtggagcagaaagcaatgcttgaacagacagcagagctgtcttcaatgtcagagctggactccattggtccttcaagacatccaggcagatagctccactctgactgctgatattagggtgccttcaataggagaaaacaaaaagaaatcaagcattatcaatatcgaatcgaaaaccagtccacctgatcttgagaacgaactcaaactattggttttgctcagaaaatgctgccatcccaaatggaaaactcacttactaatactatcagtcatcactacagttgattagcaaaacacaaaatccagtgatcagagtccatacatatccttattatgcacacaaaattacctactctgcacaatgaaccaataaaagaactttgctcattgttttactccttaccaactttagttgtgaattgcattttgggaggctcaaaagggtatccatctacaaaaaaagaacaacccataattaaagcaatatcaatacacagcaattgagctaataccattatat

SEQ ID NO: 184112 - DNA, 6867 bp, Cannabis indica
tcttaaagaatataaaaataaaacagatatataatctaattttctcctcatatttaccttagctattcagcttattcaacaaaaatgttccctttgagctaatcttgtgaatcatctaccatgctcaaaacttaagcataacaacttttgcattgtcatatgatgatgttttgttgctaaattttgccagaagttgtgctatgggtcttcattaatatctttttttagtatgttaatatgtttgtttacctacaaagtttcattttagtgttgttataggtgctaataatgatgtttttatcactttttaaccttttacacatgttgtcgttttttttttttaccattatttgggatcaaaagtcttgtttgcttagctgttaacttgttactaatttttttgttagtttgttttactttaaatacttagttaaattatgtaatgtgtttttcttaagagtttttagttagtagcaaaaattgcattgaacatttaataaaagtaataatatgggtatttgaaatatgtactaaatattacacgtagacatagtgataatgaaatctttttttccaacaatttttttaattctccaactaatcattttttgtagataagatatgcattgctattagatattagtagtgtctaacactatttataaattacattttataattagttaacgatactttataaaagttaaagaattattaaaaaacactattagtgtctagcaccttttttgatgtcataccgttatgatgtaattaagtatatcgggtaccatataacataaaaaaatatattttaattgtagagcatcacctataaaaagtacataacactactgatacccaataataatactctaatttatatagaatttgacacttaattaaacatattacacattaaaaagtattagacaccactaccactttttaacattactcattaatttttatacatgaaacatatcatttttcttttaataaaagctataaatataattatcttattcttaaaaaagaaaaaataaaattaccattttatttgattggtggaaacaaatctattcacatagagaggtaagaaaagagaattgaattgatatgtccataaagtagacaaaaaacattaataataataataataataataataataataataataataataataataattctactctcttctctttctcttctcttgacttaattcagaaaacaagctaagcttaatagctataacctttgtggttctcctctctttctaatttctattccataacacttataattttcttatctcaattctcacacacaatttatcaaacacttaagctacatattcatatatacacatatatagttatatacatatatatatacacacttttcttagctgattttgttctgttcttctaatggggtctgttctggtctgttaaaggtttgttctttttggtgggtctgtgaaaattattcccttttcattgatgggtctcttaccttatattaacaccaaaaaacaaaatatagcttacagatggatctagactggtaaacctcttctcttctcctccgttaatctctctctctctctctctctctctctctcttgctatttttagcttcagtttttcccacctctcaataattttatgttttgggtttttttttttgatttaatttaaattcacttcatttatttgatgtgatttttggtgcagtaatctttgacaacatatattctcaaattctctggtccccctttttcgtatcttgattaatccggtaagtttaagcttaaattttgatctagttttgtgattaatttataattataattattatgattgttaattttttttattggaattatttgaattgaagaaaccccagaaagccaaatgggttgtttcgaagttaatttaattgggtttaccatttaaaaaacatggtttggtttgagttaattaccatattatgttcttaatgatttgggatttgggttaatatagaaatttatacaaaatcatttggattaataacaagaaaatttattattgattaataattgataataataatttggttcaagatccaaaataaagaaccattcttgcttcaacataaaattcttaacgttacatattactcacgggaatatggttttttatttattaacataataattataataatatttataaaattccttgggaatagatacaagagcacagtacattgcattttgttttgttgtggttaaaagttttgttctttgttctttgttttgtaaatattttgaaatttgtaactgaaattgaatatctcagtttatttcttatcttgcaaacataatcaattgtatttttttttggggcaatatggaagaatatattgatcatgtattattgcaagattttgtttttatgatccatattcttgtaatcaaatttctgcttatttattaagattgaatttaggattatgggttttgttacatataagaaattatcaatttttgaatatctttgttactgtttgaaattgaattatccaaacaaacctgagtttcttattctttttggcctgatttaggttctttattgggaattcggatacattttcggtacattttatcagtttcgggaaatggaagatgtgaaaatttctgaacagttgcctccagaaacctcttcattgtctcaccatgatgagattactgataaatcagttctgaatggaaaagccgaaactgggagtgacttgtctattggagaaagtactaagttaactgagactgttcaagcttctttagatcaaaaccaacttgttccaacagataatcaagcatctatctcagcaatctcagtggatacatctgtcgaaaatcaactttcgtctgatgctccagctttagactcgccaaaaacattcgatgaatcagagactcgtgatgaggttgttatgaaaagttcagaaaatggagctgtacaacatacctctaatggtaatggggttgcagaagatacctataatgaagcttcaacatcggtggagacttctgaaacaggagcaaaacacgatgcctctgatgagccgaaatctctagaacatagtatcgagactgcccatgtgccttctgcttcatcacccgagctaacaatctctaaaagtgacgatcatggtgtaccgcctattgatctttctctcccggacacaaaaattgccaaggttgttgtccgtaaagaagattttgttgattctcctaaacttgttaagcaacttattgcaaatagaggtcttattgatacaacagctccttttgagtctgttaaagaggctgtttctaagtttggaggaattgttgattggaaagcacataaaattcagacagtagaggtatacatcgattttcttatgactttcatacatttcttttctaacagctttgcttgcaaaagttaccgatcagactctctattttgttaaatgaaaaattagacctgtattttctaaaatgatacaaaataatactctaagttcaattttcgtcaatttgtttttaaaataaccaacttgaagcccgtctctagtatgaaccaatgcagaaaaaaggtaaccagcctgatcataacaccttcaggttagattattattaagttttattgagacgaaagttaaacacagtattattttgtaccattttgaacaaatggttcaatcggtaacttttgcaaaacacaaggtttatttatgaactattgtgctgacttttcgtctttggctttacagagacggaagcttgtggagcaagaacttgagaaggcgcagggggagatccccgaatacaggaaaatatcagagaccgcagagcagtcaaaagtacaagtattgaaagagttggacagcactaagagactcattgaagaattaaagcttaatctcgagagggcacaaacagaagaagatcaggcgaaacaagactcagaactcgcgaagctacgtgtggaagagatggagcaagggattgctgatgaggctagtgttgctgccaaggcacagctcgaggttgctaaggccaggcatacagctgcggtttcagagctgaaatttgtaaaagaggagttagaagcattgcgtaaagagtattcttctttggtaactgacaaagacgtggctgccaagagagccgcagaggctgttgctgcctccaaggaagttgagaaaacagttgaggaactcactatcgagctgattgcaacgaaggagtcgttggagtctgcacatgctgcacatttggaagcagaggaacaaagaattggagcgtccatggcgagggagcaagattctcttaattgggataaggaactaaaacaagctgatgaggagattcagagacttaaccaacaaattctatcggctaaggatctcaaatcgaagctcgatgctgtcctcaaccttactagttgatttaaaagccgagttagctgcttacatggaatcgaagttgaaggaggaatctggtgaaggaaactcaaatagcgaaatagagggatcagagggaaaaactcataccaacattcaagcagcagttgcttcagccaagaatgagctcgaggaagtaaaggtcaacatagaaaaagcattggctgaagtcaattgcttaaagatggctgctcaatcattaaaagtggaagttgaaactgagaaatcagctcttgcctcgatgagacagagagaaggaatggcatcgatagctgtttcatctcttgaagccgatctggacaggactaaatcagagatagctcttgttcagtcgaaggagaaagaagttgctgagaagatggtagaactaccgaggaaattacagcaagcagcgcaggacgctgatcaggccaagacacttgctcaaatggctcgtgaagagctacgaaaggcaaaggaagaaacagaacaagcaaaggctacagcaagcactatggagagtagattacttgcagcacgaaaagaaattgaggctgccaaagcttcggaaaaattggctttggcagctatcaaggccttgcaagagagtgaatcagctagatcgtctaacgatgtggattcaccttcaggggtaacactttctttagaggagtactatgaactaagcaagcgagcacacgaggcagaagagttggcaaacgcgagggttgcatcagccaactctgaaattgaactagctaaagaatctgagttaaggagcttggaaaagttggacgaagttaatcgggagatggcttctagaagagaagcattgaaaatcgcaatggataaggccgagaaggccaaggaagggaagttgggagtagaacaggagctaagaaaatggagggcagaacacgagcaacgacgcaaggccggtgaaactggtcatactgcagtgaaccccataaaaagtccaagggctagtttcgaggggagaaaagaagcaaccacctctgaccgagtatctgatgctactgttcctcctcccgtacattacgctccaagcccgaattcatatgcacgcgggaatgacagtgaaactgattcatttcaagaaaccaaggctggaaagaaaaagaagaaatctttgttcccgcgatttcttatgttcttggcaaggagaagagcacattccaccaagtcaacataacccctctcgtcctcggaattggctagtgatattctttgctgttgtggtttaagctcttatttttgttggtggtttcattctcaggcagtgaacattatatactaaattttaccatacagagaatttcttggatgtacatgttggtggtgataatttgttgaatgtattataaagatgattggatgatttttgtttatgttgtaataaagttgggttggacttgtcatcattaattttgatgattttggccaaatacttactaatatgtactgtacatgcctggaaaatgttgaaaaaatatactgttgttgtaatagtttttccaagtttgcattgcataatcaaagaattagtgtgggttttttgtgagctatttttaactctgttcagtactgatttttttttttgggtcaagaatacgaaatgggagtagttaaaaggcatgctaaatcaatctatgagttataataaaaaattacgacaattataagaaagagatgatcttgaaaatttagataatgttagaaaaattgaacttttaatccattagagtacatataagtgttatttaatactaaacttgtgataatgaatctaaaattaacttgatcatggagactaattgtcaattgaaacttatgtttcactagccaatgacataattagctagtaatttgaaatttcttcatggttatgatcaataaacacactaagaaaggccactacaatttaaaatttatttatattgatcgccaacaatttatattgtacttgcagaaataagtatgatttttttctctgaataataatcactatttaattatgttcttgaaattttttacactgttttaaatttctcgtaaattattacaataactaaattttatctctttatcttaaatttaggaaaaataattcggtaacagtaatagtttcaggaatataatttattaatttaggggatacaactcttcaataataatattttataaagtgtgaaatagttacatatcaacttttagatggaagaatatgatttgacaatagtaatagttcaaaagaactttagtataacataaaaaactcacaatcataatataatagtaatagttctggagataaaaattctatttattttacattatattgtttttaattatttttattat

SEQ ID NO: 184113 - DNA, 1941 bp, Cannabis indica
acagaattattcaaggtataaaatttgtctctaaaactctttaaatacttttgtggcagctgttagtgactcatctcatgaaggctcaccattttctgaaattatcaagcaagtgttctagcaaagtcacacttaaatcctactcaactttctataaaagaatcttaaagatagacaattggggtttgtgctcaatgtctaccaaatacactttagacagagttctacacggtcgaatccttttcttagaaatagtatttccacactacccaacatgcccagttgccaagtgcatagcaaagcacccatatgtcacccgcacatgtgcaaaactaatcatagtattttcacactacccaacgtgcccagttgccaagtgaactactcttctcatttcttataaagcacttgttttgtaaactttcagtatcttacacattattcatgtttatattctaacaatctactagttggttaaatatgaataaatgattactagctagaatatgagtattgcatgatgcacaaagcaatgacctatactaataaatcttattataaggaataactagttcaaagctttgagttactcgagatttaaaaaattcttaagcagttaaatagaaaaatactttgctttacactgtttattcatattaaccaagtaaaatgagcaagacccacattgaaaatctataaaacaagtacaagaagaaatattcacttatgatgaattactaataggtgggcctaatagagtgattgggtaacccaatggtgggactcctacttgcaaacatggtgtggacgttaaagtgctttaagcacatcttaggtgcttccttggcgtttggatatattgagttggtatgaaaccacttttttggacaaggactgagtgtgaataaagtggttactgagtggtcaggccatgctaaaaaactctccatagtgtttctaataaagattgggagcgcttgcagtggcttcttaaccttaccaaaaaatgatacttgaaacctaacttaggagttggtcaggaagaggttagcatacaggttctaaagagaaaaatgttggaaggaacttacttgttcacaagcaggagaaaaaagaaattaatttcatacttaatgcaacaaacatacctcaaagcgatacattccacgaagccccccacctaaatcaaggaccaatccatgagctcgaatctgatacacctttgcagtaactttcattcctaacttcaggcttctcgcagtaacggtagcatcagtatcagcttcggtatcattcctattatgaaaaaaagacgtaagagtcttcttaagttcatctccatcctgacttttaaacttagaatctgatttcctctcctctttcatttgggataaaagttttgacctcctatctccttcggaagcaccaactgctttggctttgctataaacatttctcgtcaaaccagcagagttttcttcctcatcacactcagcagcacttcgaattagaatttgtgggatggataaactattgagatctgccccaccgccttcatttttgttaaccaactcttcttctgatgtatctgaagagtcgtcatctttctctggtccattaaacatattttcagatgatactgaatatttaggcgcttctttcagtgattcgtgagcattatttttttcagatccagtttgagttactttcaaagatgatccagtttgagttacagctttaagggataatttaatgttgccacgaacatcctgacctatgcacctcaatgtaagcttttggccaacagacacaatatctgatacacgggtaacctgtacaaagaatattatgaggccaagacaaccaaatttcacgtttaaagaattgttgccaacataaatcatggtgaataatgtcacaaaaaaaaaaaaaaaaaaaaaa

SEQ ID NO: 184114 - DNA, 6821 bp, Cannabis indica
taaacatctccaaagtttttatcatttaataattttctttgtattttttttttctttttctcccaagcgcttgagttttcaaaacaaaaccaactaagtttttatttatttatcttgtaacaatagcaactaatatttaaaaatatttaaacaaataaaattaaagatcgacttaacgacttttttttaagtagaagtatttaattttttttttgtttataaaacctgtttcgattgttaaaatattctcatcatgattttcaaatacatagtaaaacatactatagggcgtttatagtaaaaataacatataatttttttattattattacccaattggtcaactttccgtactggtgaggaaaatctgtgaagaaagtatagagccaattcatttcactgaatattcttcgctcggtctcatggtcaaaagggaaggcgtccagcccccataaacgaatggtgtgcatggcatttttattctcgacaatcccacgagccacgtttagaaccacagccactggattggtttcgaagttccactcctctcttaagaatctcagtccagccttgtgagaaactagtttacttacactgtaccactggatctcctttgacctaagccagctctcatattcgtacttgaaagtcttgtgctcatatgaaaaggtttcgtctataattggcacccaaactatcgcgtactctttttcagtattatatttctttatcttctcacagtaaattcttctcaagatgttaatatctgactccaacatatctggtcgaaaaatcactagcagtgctttcttctttttcaatacattgatttcgacctgtaagtatacaaaaattacaaaaacatgagaattaaatatacaatatatatcttcccccttcaattaataaattgttaaatattctccctctcagctttaagcatttcatgaaatatgagacttctatcaaataattatcaaatttatccttcaaaaatatgataatggttataataagagcgtggaattacgagttttataacaaaagtcgcatatttccactaacagtcatagtttaggtaaaatatttaacatgggtaatagttacataagtactcgtcaactagattaagactacaaatcaaaaattaaagagtaaaaataaaagtagaagtaaagcttgagaaacataaagaaagttgcagagcctatagctttaatgttgaaagatgagtattctattgcatgaatatagtaggatttataataatttttcatcctctctcaacacttgggtttggggtatttataggctccaatcacctcacatacaactgtagtcctaacgagacaagtagtacaaagtacgtctactagctgcagttagcagagtattggttgcaggacgctagtggtcgggatgtcaagctatgccatagtggtgcctccactacctgtattggtcatatatacctccttgtactaccactacctcctcccatatcttcttaggtaacatggttgtacccttacacaagtactttgaccgtgtgctttcgttgtccttttgatctcatctcaattggtatcctttgcaatacatagaaataaatatgttctaagtgtcgaatgtaggaagcaatcatgggccaagagtacctaggcgaggaggtctcggctgggaactcttccttcagcgaggagatgcttagaaattgatgcatgggtgagatgctttggaggttgagtcctaggttaggtgctttgaggttaaggcccagacgagatgtatggagacaaaggcgcgcccaagaaagtgaacccccaggcgacgttgtttggggactaaggttcgagcgagaaggttgcgtcccgagcaagttgctcagggaccatggtacatgatagaaggttgggagaattgcctagggattatggctcgggcaaaaatggtggtatcccgggcaagttgcttggcgaccacgatcagcgcgaaaaggtagaggagacgggtgagttgcttggggaccatggcccgcgggaaaaggttgaggagatgggtgagaagcctgggcgggaaggtggatgagatgggcgagaaacccaaacaaaaagtcaggcaactctagcgagaagtgtttcctcgttcgggtcctgaggtctttgacacctggacacctcgatgtctttttccaatgaaagttttcttcgaagtctaaccttaaaattttactttgctaatttccaaaattaacaggtgatgatttatgggaatgattttattcagtaaaaaattagaacatgaaatacctaaataaaaaaaagcttaacgatctgttgtctacttagattaggtttcttaaaattaatagtgagacacgcactacaaaaaactgctacttttagtgacaactttttagtcataacataatttttttgacgatttttagtcacaacaaaatgtcacttgttactaaaatataatttttaattaaaagttattactaatttagttttagtcacaacaagtatagtgacaaaaaataagtttagtcacgaaaaaattgtaatttttgtgactaatacatttagccacggagtagtcacaatttttttacttttaaccacaagttttattgtgactaaaagtaagattttttgtagtgacagtgggaataaggaattcgggatagtagatttttttcttctaagtgattagtgattaacaactttattaacaactttatacattacttattaatatatattactccttattaattaaattacactaataattatatactattaattacttgctccgtatttctctataataattaacgctaatcgtaacgcgacatgtcgagaaggtgttggcaccattagtgcgtgtctaatatcaatgctctttgtcatagagaaatgctaaaggacaccagtggtgcctaacaccattctatgtgtaaatatcactattggtccaactaagtatcggatcccaaataatttaatataatagcttttaggaaatattgttagctaatcgcaacgcgacatgtggagaaagtgctaagcaccgctgatgcctaatagcattgctctttgtaataacaatctaaaagcatggatttcagtggaagcaaaagtttgaaaattttaaaacatatataattagaaagaaaaagaaaaaagaaaataaggctttatcatcatactagctagctagttcccataggccatatggctgcacttaaaaactcattcaacttattatattaaatagttttttttaacaacttactaaatagttaagccaataggatttcccattttctcatagctagtataaaaggtatatccaaaaagttcaatctgaaggcatctcaaattattgacaaaaagaaaatcatagacccccaaaacaagaaaaaaagaacaattatgaaagttgagaacaaaccgattgataattgttagagccatcaattaggtggaaatgatgagagtcttgagagaaaaagagaagtttaagaaactccatgacctcgtcagaagttttcgagagtttcaagagcttataataatgatattcctcctctgcacaattaagatcgatttaacaaattacttttcaacaaatgcaataatgttaatgaagtcagtacagtacaatatacaattgcaccaaatgtatcccatgcacttctctataattactggaaatcaaattatatcgaaccaaaaataaagaatatgaaaaatacataaaactagctaaactacagtctacaacatacatttttctctttaaaaaaaggagacaaaccattgtgtaattatatattcttaatcaaatatattttacgtattataatacttaagcaaattatgcaaacctttcattagtctaaattgggcaagttgtgctgagagtagactgaggatgttgtgaattttcgtatcatagggagataaatcgtgtggactgtcactgaaacagaaacaattacaatgtgtagtacaaatcagttgtacgtacttttttaaagatgaagaacatatttgtttctataagtaaaaaaagcaggcctatatgtagcacaaatcttttgctttagtaaaaactcaaaatgaaaatataataatcgatatttaaataattgtaactttatgtataattaattcatatacgtaaatctttccttaaagaggtaagtgatcaattgagtcatatatatatatatatatatatatagatacagacttagaagttggatgtagtcttgtcgactcccatctagtaaatttgtattattgttatttattatcctacgtatatataatattgcgaaaaaaatcatcattaattaatcacaaacaacgataatctacacataaaaaacgaaaaataataattattgaaaaaagtattcctatttctatcaatgtaataaactaattaagtttttcttagaaaaagtttgttgagcaatacgaatctcacgtagaattaatatataagagaacttactgttcactagtgagaagagtaactttattagcgcatgcaataacggtgatgacaacccaataagaattcaaagcaattggcaactcagcaatactatgtggaccataaacagaaagcttctgcaactcaaagatggtttccatcactttgagagtggccttgatcagattattaagctcaccaactacaatcttccgtttatggcgaaactctggagtgtttggaagaatacaagaacctttgagcagtgccaacgattttgtgagttgatcgtgattattggtttgatcaagctgaacaagatgcagtaaatctccaaattctttagcaaatgctgcaagagtcaacaccgcttttgcttcccatgaatagtatcgtagcttctcaaatattgccagtgttgtctcatgtgccatctctgcaactggggccttacaactcagtagctgcaatcatcatcaaacataaaaatttcttttaaactttttacacaattaatatatttatggaaatgtggtatactacttaatgaactatagtaagaataattaattattacctcgcagccaatcttcttaaggatacacataggtacattgaaacctgctttggggttattgatctccactatattgtccagaccaacttttatgtcttcctgatcgattgatcattgccattcaatcacaaagtatataataaccatattagcatgcaatatagtctgaatgaatatatatatatatatatatatatatctacctgaataacctcgtcaacaatttgacacgatcgcttaagaatgtttgcaacgataatgaaaagagaatcagcatcaaaagaatcgtcagaacaggcatgagtctcataaattttctttcttatttgctcttcggacaactcgaaagggttgatctgtgcttcaaaagcagtgttacttctacctcctgccttgaaactactattcatctccttaaaatagttggactccatataacttttgtccatagtagacattttatggctagaaaaacaacctagagtatataatttatatatatatatttatttaagtttctcaaatgtttggtgtttatgttaatgggcaatttaaggaattgctgccaaactctatttatacccaacatgagcttgctagcttgtgtttgaagatcttgtaactattatttaaatattcatgtaaacccattgacatgaaaaatgccatggaaacagatcaaatgattaccgtgggatccatcttgtcatcacttttgactcaaattgacgagttctttatacatatatatcatctattggtcaacaaacgaatcttcaataaactgctttggaatttatctgatataatggccaatattttcttaattttcagctttttcacatagtatgcagctaatcataagttacatttataaaatttctctttatctttaacattgcctagtgccgaactactttactttacataaagaaatatcatttattttatattttttttaaaaaaaaaaagcaagaaagaaagaaaaaaagctcaaatgcgcatgtctccgtgtaagttaccgataatattgtaaaacttcttcaagagtaaacaagatgtatttttttttttctgacaaaaagagaaaagaagttattacacaatactttcactgtttaaataagatttcatgagaagctagctagccaagccgtagtggcatttgataataattttattaatttttaaattttttaatcacaaacaaaattttgtttttgaaaaacaaatatgtattttataacaactttagttttttaattttaaaagcagaaaacataaatagtgtaatctgtaaatttcattttcattttcttattttatttaagtcgggttcaggttaggagtccgggtccgagaccggtctgggttcacggtgagtccagggtcaagtccagtctagctccggggtccgagtctgagaacgcggtcgagtccaaggccgaggccaaggttagggttcaggtctagggtcggggtcttgggccgggtttgaggccaggtcagggtttgggtccgggtccgggttcaaggcttggtttgggtgtgggaccacgggtgggtccggggtcgggttggatccgtggtccaggtctaggttgggatccgagtccgagttagggtctagggtccaagttggggtcggggttcgggactggggctggagtaggactcggggtccgagtccatttgtaaaatattgatcaaaaaaatataaaaaaaaatt

SEQ ID NO: 184115 - DNA, 5264 bp, Cannabis indica
ctgcctctaaagggggtttttgttgtagtgaagggaaaccaatatcactatatgcactgcacctcaccttaaaagtattcaacaccaacttgagtgataaatataggcatacatatccaaatctcgcaaaaatggctagaaccaatcaacacaacaccatttgttttttttcttttcctttggtccataacagggaattttcccctttaatttcaacatgtatatgcttatgtttatatcaacccaagacacttttactttcaccccatatattggaggaagaagattgagtgaaaaaaaggagctaagattgagggaataaatatttacaacagtttgtataaaatgcaatgtaaattatagtatagattcagctgaggttgagatttgataagataagaaatccaatcagcaagatcatcgggaaagaaccggaggggtgattgtttgggtatgcgtttctagccaactatgtggaagtaaacttcaatagtgtcattgaagtcattacataagattcaaacttgaagagtaacaaaaaaaggtaaattttcaagtaacgataactaaagcttacccaagaagccaagtaaagtgcttggggttgtaaattttaagagcactgagaagaccccaaattacattgtgtcctccaggagatcgtctcccacaaaaggctattcccaccctattaaaaagacaaaacatttaattaacgatgctgatctttttatttctattttcgctagaaaaatcaaaagtcgtactgttaacaaatagcaaagcataaaccttttagcaaggtgttcagttatgatatgagcatcagctacttttgtagtggccctaagaaagtgagccaatgggtgaccgtaagtgtgagggaaagctcgacttatggtgtgggcatcagttgggtcaaccgatgtagttgtatcaccaaattcaacgtttaatagtcgtaccctggaaacacaatcaaatataacaataaataaataaataaagaatcttagtatcattgcagcatctggtagagaaccaaagactaaatcaatagcagaacaaatctaatgcctctgcctacttcggcatgcaaatagatccaatccaatataataaagattattaatttcttttgttgatttattagggaattaccttgtttgttgtttcagcctcatctactttaattcacttataatgtcttgttgttgttgttcaaagggctaacttgtgggattccaaagacttgtgaaaatatgtataaggcattcatcacaaaagtaaacataggtaaaattccatcgtatgggaatttattatgtaccacagctcctagtagaatttggtgcagaaaatctgttattgatggcgaaacatccctatcatacattccatatttaacattggtatagagagggaaagatcacaactcagtctgtaataaaaaggaaaagtgaaacagtttgaatcactcataattttttgttaaactttccataatcatgaaggtatgaattaatggttatgagatgagactcaatccaattgaatgatgaaatgaaaaattaacttgaaattaatgaaaaatcaaagaacaacgggaagaaatggagatgcgcaaaactcattgaggctgtgcaggagaagatgtggtccgaatttggtcggagtcgaggtcatcgaaataaaacgtcatacaaagcggtagcaaaaagtggtacggggagcagattgcgacttggatggcgaagggactttagtccgtggaagaggaaagaatggagaagaataaatttggaaacgtaaaattgaaaatgaaaagttgatgaattaatatttttgtaaaataaattgtataaaagtgtaaattataagaaaaaaatgtaaaaatagaaaataaattgcaatttcccgtatactagctaatttcccaaaaattgatgtgtttttttattctaaaatagtttattgattttttagaaaaaaaaaatctaaaataataattatgaataataatatattacaataataataataataataatggtgagtgttataaaaataaaaggataacattaataataaataaagacagttaattacaatttaacttaatgatgcgggacattggctaagaggaagggtggatattgggaatttatttcaggattgcttccagtccatgttctgttcttcgaatcctgctatagatgatgagttggagtctctttttgcggagaaagtcactgtgtcagagaacgaagcgattttccgtgtgcctgatgacggagagatcaaggatgtggtgttcaagctgcatccccttaaagccccgggacctgatggatttcctggtattttctttcgaaaatattgggacattgttgggatatctgtctgttggatggtccaacagtttttcataactgggaaaatgcaggagagagtaaatgagaccttcataagtcttgttcctaagactgcgaatgctgctacttttgatcattttagacccataagcctatgtaattttgggtataaaatcatttctcgtatccttacggaccgccttaaaggatgtatggatcagctagtgtctccctttcaatcgacattcattcctggacgttggattgcggagagttccatagtcgctcaggaagtccttcattcaatgaaaagtaagagaggaaaaatgggagtaatggcggttaaaacggacatgagtaaagcttatgatcgtcttgaatggggatttctcgcccgtgttctcaaggcgaatggtttcaatagcaaggtctgtactctcctaatggaatgcgtaacatcagtcaactattctatattgctcaatggggcacctttggctcccttcaatcctaatcggggtcttcgccaaggagatcccctctcaccatttctgttcaccctatgcagcgaagttctttctaaactcatccttcgtgctgaaaggaatgctgatctaaatggtattcgtgtggcaagaaatacctctcctataactcatcttttttatgcagacgactccatattcttttgtagtgccaccgtggaaaatgcaaattctttgttgaattgtcttcataagtatgaaagatggtcgggtcaaagggttagcaacgtcaagagtggtgtggtgttctctcctaacaataggcgccactgtagagaggaaatcaaaggaattttgggctttggtaatttgaatccgaaggagaagtaccttggaaaccccttcttcttcacgaccagcaagaggaaagattttatgttcttgaaggacaaaattcttgggaaattggaagggtggaaggctaaaaacctttcccaagccgggaggacaactttggtcagttcagttctccaaagcatcccaaattattttatgtcttctgtgcaagtccctaccaccttgtgtgaggaattggattgagtggtggctaagttttggtgggctgggaatgtggacaagaagcactattctgcgatgagaagctagaacggtttgtgtcagcctaagtgctgtgggggtcttggttttagaagatttaaagatatgaatttggcgttattggccaaactttgttggatggtaatgaaggcagggacaagccttgcgtgaagttacttagggacaaatattgtaaaagtatggatctgtgggaagtggagaggactgggaaaaattcctgatgcttgagaagtttactccaggcaaagtcaatttgcgtgaagggggcatgccttttaattgcagacggttcttctcaaatttgggataggccgtggcagagaatttgaagaaatcaaagggaattttcaatttcaacacaaccagccgttatggaaagttgtcgatctatttgtgccaggatcgagaagattgaatgagaaggcgattagagactgcttctccaatgatattgcagaggatattctcaggattagaattttggaggagggggaagatgttctattttggaaggctgagggatctggtaaattcactgtcaagagtgcttattggttaagtcaacaacataggttcaatgaaccgcatctgctttggaagaagttgtggaaaacagaaattcacccaagattaaagcatttctgttggaaattgttcagtgatttactccccactaaatgcaacttaggatttctacaagttgatcaactgttgcgcgagttgtgccattctgaagtggagacggctgaccatttgttttttcaatgcaattgtgtgagggctatctggttcaggtttggtatcaggattcatgactgtaattgggataatctggtggaatttggtctatggtggtgcaatctgaatgatttgaatcttcaagtgatgattgtggtgttatgcgactcaatctggaagtggcgaaatcgaggacctggacgacatctgcaggagtattaaacttcgaactagggactttgtgtcaaagacattatggtttgatcaagaagaagagaatcgagtggtgattgatgacacgaggactgttatgtctgacttgagtgattctagaaggccgtggtgttgcaaggtagacgcttctgttgctgatggagttgctggttttgctggaattcaggttatcgatgatgatgttggaagttccaaggtgtccctgggctggaacaaagtaaggagtgtgctggagggtgaactgcttgggattgctttagcacttcggatggctaaggagtgtcatgcctctgtggttaaaatagagatggattctctggtggctgccacaacctttgggaatgccaaattaccttatggctgggatataccctttgtttcgagattgtttgtgtcagtgtaaggctttttgacaaagtcgttgtttgtcatgtgaacaaggaactacaatgttttagctgatgcaattgctcgctgggcgagagtagcatttggctgaggccagtggacaattaagggatgtatccccctcttgtggttactagtttttctttgctttcaataaagttcagttacttatacaaaaaaaaaaaattaacaatttaacttttaatatttaatatttatattagtattttttattagttaataaaaaaatatacacattgaaaaaatatatatctatcaaattatttattaaggatcaatgatatctttataactgtcaacacttataataataaaactaatgtaaattgccttttcatttttttttatgttttttgtaatatat

SEQ ID NO: 184116 - DNA, 8252 bp, Cannabis indica
gcataattgtcattttgctaagtttttttttttttctcttgttgaggtttcatcttactttgctcctggattatgagtttctgaaccgaaaccttcctcaaatcaaattacgttttatgatgggctccttaggatccattgcgaaacacccaacaattactctgatagacgcactcaccactctcaaggagctcaagcaagtccatgcccaactccttgttaacggtctccttaacgaccaccatttattgggccaattcgtggccaccattgcccttcacaaccccaaaaatcttacttactctgatcaactcctcaccaattatgacaccccaacactcttctctttcaactccatgatcagagcttactccaaaagctccacaccccacaaaagctttcacttttacaacagaattctccgctctcttaacaatctttcccctgataactacaccttcaacttcttgattcgaacgtgtgcccaactgttagcacgtgagactggcccctcggttcatggagctcttgtgaaatatgggtttgagaatgacccgcatattcaaagtgggttgattttcatgtatgctgaattgggttgcttgaattcgtgtcataaggtgtttggagggatttctagccctgatgtagtgtgtcaaacggccatggttagtgcttgtgcgaaatgtggtgatcttgggtttgcgcgggacctgtttgatgaaatgccggggagagattccattgcttggaatgctatgattgcggggtatgctcaatgtgggaagtcgagggaagcattgagtttgttttacttgatgcaaatggaaggagttaaggtgaatgaggtgtctatggtgtctgtgttatctgcgtgttctcacttaggggcattggatcaagggagatgggctcatgcgtatatagagaaaaacaagttgagggtgacagtgaatttggggacggcgctcattgatatgtatgcaaaatgcggggccatggataaggctatggaagtcttttggggaatgaaggaaaagaatgtgttcacatggagtagtgccatgggaggactagccatgaatggatttggagagaagtgtcttgagcttttttccctcatgaaaaaagatggggttcaaccaaatgaagtaacatttgtggcggttttaaggggttgtagtgtggttggactagttgacgaaggtaaagagcgatttttcttcaatgaaaacatcctacggaattgaacctgagattgagcattatggctgcttggttgatttgtatggtcgagctgggcgggtagttgaagccctaaacgtcattaatagcatgcctatgcagcctcatgctgctgcttggggtgctttgcttaatgcttgtagaatgtacaaaaatttggagttgggcgagttggcctcgagaaaaattgtagagttggagtccaagaaccatggtgcttatgtgctcttgtcaaatatatacgccgattcaaagaagtgggatggagttagtaacgtccggcaaattatgaagtctaaaggtgttaagaagattcctggttgtagtgtcattgaggttgatggtgaggttcatgaattctttgttggggacaaatctcatcctagatataatgagattgagataatgttaggagagatctctaggcggctgaaattatttggctatgtggcgaatactaatcccgtgctctttgatatagaagaggaagagaaagaggatgcattgtgtaaacacagtgagaaggttgccattgcttttggtttgataagtttaagagaaggtgttccaataaggattgtgaagaacctcagggtttgttgggattgtcatgaagttacaaaaattatttcaaaagttttcgacagagagattattgttagagataggaataggttccatcattttaaagatggtcagtgttcttgcaggggttattggtgagatatatttattaagtttcttgatattttttgactggcagaaaattttgtttattcttcatgtccttagtaatttgtgttatcttcccaagttatcaaagaaacactaatacattctttcttggatatgcaattttgaagagggattatgcttgaacactaaaaatattttctttcttggcctaattggagccagcaataacttttctcacctggacacatttgattttcattacatcaggattaagtcatctctaaatttatataccaaaagagatatctccattcagagaaatgaaaatggggaaaagggaaatgcaaaatgacattagtagtgtgtaacatcactagaatatgtcttactgctaaggtgtggggtgtttttgtataattttgagtaaattactatagattttttgtctcaaacttctctatgtactattgtagcttctcaatggagatgtttattagagttggtctctcattgttaatgtgtagaaataaattgtcatacataagatgaatgggctactcttctcattgccaattggttttgagatggaacctcattcattttaggctctcttattccaaattctaatatgtatcaaagccacttgtgatctaaagagacaagccaaactaaaaaactctcgttgtttctcttttacacctacaaatttcccgatatttggtcttgtggtatttttttaaataatgtaacctcattcatcttagtctctcttatttcaaattctgacaatactttgtaccgaatggccaaaagaagaggttgaaagataatcaacaattctttatgatattttcaaattgtacaagtattgttaaacgattcaaggtatctatattttagtaagtttttttttttgtttatttaacaaatattagttgtggtttcttagccaattgtatactcttatactgttatggagtaaacaaattcattttcttttatttcttttattttaaatatatagttgtaagttttatgggcgagttaatcatgattaatataaaaccaacatttcacgttattttttttacagttgaataacttttcattcttttttattttttcggtgtataataacaatactaccataaataaaatgtttggttgattaaataaaatgttatgttacaaaaatatttattactaatgatttattatttaatatagtggaagaatattatattattttatatgatataatattttgattaaataatataagtaataaataaattaatgggacaaataatgtttgtcaacattataaaatataaaattacatgtgtgaattatggtctaaaaggatttataaattctttatattgatcaccatataatttataactcatctctatagtattactcttaattagtaaattaagttattaattgtatttgaatgtgattaaatggtagctataaaatatagttgttggggcctattgtataaatgatataaagtcaatgtgggaagttttttgaaccgtttgaaattgaaaaaaattagtaattgattacttgttaccagattttggaattttacactacaagagacatgtcgcttagagagagatattatgtcgtctgaccatttttcaacatgtatttttaacgtgtatgaacgctgtgcttggttctaatagctcctataacccccaaatcactcatttgtccataaacgtccaatttaacattggtaatagtcgagagttttatagtggttattcatgttcaaatgagaatgaaaactctataaatagagctcatattgttcacttgttatacatgttgttaaatacactttgctgtggttagaacattgtgagaatatactcatttttagacactaagttgagcatatgaggcttgataaatctttaagaacgtttttagaatttctctaagtgttcaaggaaagaaatagctttaagaataaaggtcgttgaccttgtttgagcctttgagagatcttctctctttatttgtttttgttatgtactattattgcacatctcttcttcttctacttatataatcttgatattatacatttctttgtattttccaacgacaacgccgccaccaccatcgatactgtcaaaatccgaccccccaagaaaaatgttaagttactttttattctgccattatttttaacaaattttacatgctcagattatatttaaaaacaaaattgttagttgtgaggattttccaaatttaattctcaaaattcctattattcaagtttaaatttatttatttttttccgagtggttccaaagcttaaaacataagagtttttatactacatataaaaaaacttaacttttttttttactatgggacggaatattttttaaaaatattatattttttttttcaaaaatactgtgtaagttttatactgtgtagttaagatttcacagttgttccacgattattttttaagttgttctactattgttttaatttttttgttttattgttttacaattgtttcataaaaaaaatagtatttttataaaaaaattcttatgacataaattataaatttttgtccgaaatctaatatttttgtaaaaattccttattatttctagtaaggtaatagttggtggtactgtaacaacttgataaactgtgggtgtgtagttagaccagtaccactgatagttggtggtactggtatgtaaggctagattaatcactgatatattttttttgacaatgctattagatattttatggtacttaatactattggtggtgcattaggagtgattagtaatttattaaattaaactaaaatatataaaattcgatattaatttacacagtatgtcaattcatagtcacatgtccttttttttttctcattataactctttgtcctttctaactggatcgttgactgagtttctaacttggttaaagtactcttttctatcacaaacataaatatatgctttcactatctgagtttataaattataacaagaagccaataaaataaattgtgtagtgtccaaattattataatgctcaacttgtcgtcacaagccacatgaaatatgtgcaccaaatagtaagtgaaattgatgctaaggcataagtccaaaacatgataacagagcattctttctctccagctccaaacaactgtgtcatggttcctgtaaatccaagattttaattctctatccatttattcacacacaaatatattatatatctatatatgaattaatgaaagagctttttcattgtatacgtacctatgttcatagcaggtggtactacaaattgtagaagaagaacaaactggtacaatggttcttgctgcaccagacccaagtgaactgcccccttaacaactaatatgcctgtcaaaggcagggctatgtaacgagctactacaatgccaacaactagagatttctggattccctctcctcttagacctgaaaaagacaacaacaacaacaacaacaacaacaaagttatactgaagttcttagtagtttagtcatcttaaatgtagtgatttgcttctgtggtgttataacctctaagaagatttcctccaattataagtgtcagggctgggatggctccatccctgcacattttgagagaacagtttagatgattaataagatattatatatttatagggttaataccatttcgaattctgtattttgcaaaaattactgatcagaccattagaccttatatttctcaaaatagtataaaatagtaccgtaagctcaatttttcaaaatcttttttaatataatcaacttaaagacaatttctagcagaaacagaagtagaaaatataatcagttttgcggtaacacatctcaatcgagttattattaagtttaatttttacaaaaaaatcagctcataatactattttgtatcattttaaaaagtacaaagtctaatttatcttataacaaagcaagaaaaatcagtcgataacttttacaaaatagcatgtcccaaaatagtacatatatatatataaaatatagtttgtaccccaacaaaacagcagagtcctggatcactctaagtggagcaccacttcctatcaatgattttcggaatagaggaacaactccaattatgtatccaataatctacacaacaacaacaagtaattagtgtcaagagtttacaaagtcaataactaactaaaagtaaatgctaaatatagagacagaatttgtctaaccgctccaatagttgaaggggccaacaaagccttgagatttaactctctaaacagtttcaccaaacgtagttgttttatccctgaactttctgaatcccccacctgcaattcatctcaagaagatgattaatgtgattaattgtaatttagctaaagattgatcatcattgtgtacggtctttggcagtactttttcttcacctgcaatgcaacatcctcaggggaaggaagtagtagtggttcttctaatgattccctcgaagacttgatgtcatttatacttgttgaagatacacgaacaatgttatacacataagaccataaatatacagctccaatctgaaaattcatcagtaatgatctgtaacactctgagagatgatgtcaaaaatgataaagcaaaaaagaaagaaacttactgccattgaaagggaaacataagccatcccataagaataacagacatctgagtctccaaaggggcttcctttttctttacaaagtgctgggattataatgagaggcaagttccccaaatttcctgtgttgtgtttaaaatcaaatcaaatcgagacttagtataattattagagttagtttcacattgctaacatgtagaaataaattatcatatataagaagaatgggcaattcttcccattgtcaattagttttgagatgaaacctcattcatcttatcctaaattctaatatggatggtatcaattgttctgttgtgagcctaaagtgttgctcatcagccaaacttccactatctcccctttaacctccatttgagacctttcagtgatcactttcggccaatgtgtaacagttttcgttataaccatatataaaatgaatggactactcctcccattaccaaatagttttgagatggaatctcaatcatcttatcctaaattttaacaataataaaattaagagcaagtgaatggtgtaattaagtacctgcagcacaacaacccaaaatgaggcctcgcaagtgttgaggtggtcttgtaaagtgaataacaatccatccaagtaatgaaccaataataaatgtaatgagaacatttacaggcataaaccacctacacacaacacacacaaaaaacaaatctgaatcaaattcatcaccattacaaaaacaacaaagattcttccttttttactttttaaattacttacaacttgatcatgctatcatatgttacggtatttgcgaggctggatcccacaagcgcaggattgaatacataaaaaacaatctgtggtatttgctaattaattagttaaacacaacacaaacataattatatatatgtatgtaatatttcatggattaattaggattttgatgacttactgtgtttaaatatttgatggcatctttccccaaaatattaacgctatctaaagcaagataagaaccaagtccggtaagcaatagaactttcaagactggcatagatgctgtaacgaagagccccaaaagctccattatacaattccttcctctgcaaatcagaccttaaagaagaagaagggatcagcgcgagacactttatagggtttaacaattgatcagttatgaaaccatgcacggaaccacacgtggcggaagaaacacggttctgtacacagctaattattcttcataaatataggttgagtagagagagagaatccaacgaactgagctgtacatacatgcatatatatatacataataatacgtatacataaattcattcgtcattattattcatggcgttcgcatatttaaagatgtttatagattattagctaaaaaggatgagtttattattatcccgctataatcggatgacccttctctgaattgatttgaattaggattacgtatatatctatgatctatatctatatgttgaggtataaacagttttaaattacttaaaatacatctatttgatttttctttaattcttttaattacttttttaattttttatta

SEQ ID NO: 184117 - DNA, 4848 bp, Cannabis indica
tttcataacaggaagcaatggtgaaggacacacttgaaaaggctacagaaccaaacctcaacttgagagcctatcttaaggatgcttacgtacatcctgtcttcaaaggtggagagttagagagacccgttgccattgatgaagaagagaacagcccccttgtggccactaaaaggaactcttatcggagtagtagacatgattctgatgccagttctgaagttggtgtatgaatttagatgtattaaccactgacaatagtcatcatgctaactctcttattttctcttcttcaaaacttggaacatacttctgttttttttgttcattaacatgattaatggtgagaactgagaacagtgatacaaggaatgagcctgctttttcagtttataggctagtttccacttcccagaaactatttttttcccttctccatttttatttcttcctcaaattcctgaaacatttataaagtttagaatatgtagtcactttgtaattgaactttattggtcaccagattgctttaggggtagcccaaggcttggcttctctttctatttaattatcaaatttttgcctttcatatttagataaaaagaaaatatgcctcaaaataaaaagagggagtaaaaaataataaaagatatttatttatttgctctagtcgtgctcatattgatttcgtgttgttaaaaaatctgatccgtatttacagcactactattatacatttattcatttatcatcaccattaaatttattatctatggttgtaacaactttcctacctagatacaattctattctcattttcatgattttttattttgtctttattttcaatacacccaataaaaaaaattggtatctctacaagtactacaagtacttgtgtaaagacaaagaagcaaatgtcatataaaactttggaggaaaaaaaactaatttaataagccacgctaatttacaaggataaggattaaaactattaaatatttacaaacaatctacaattaaaggtcctgaagatgataggctttctcaacccagaagtcatcaaatcaatatctccagaaagaattgtaataagttactttttgatagcttaaaggcaaacgaaaatggtggtcgaaaccattaaacatacaaccatactctgattttgaaagtggtaaaccaaaactagatgttctctctctacaagggtacaaatagtgaaaagcagaacctcaatggcggaaggttttcacaacttgatcaattctgcgtcggcaaagagggcaatttgtcaattgtgaggagcaggttgtgcaacagcacatatgaccgcacctgcgaaaatgatagtacagagaagaaatggaataccatgaacaaaatgtcatttcaacaaaagtttactaaaaactagatagaaacagaccgagttagtgagttcttacgggacaaaaacagcattatagtcctgctcaaggcatatcacacataaatctggcattagaagatcttttttagaaccatccgatccactttcagccttgtcttctgaacctaggaaaagagttgcagcattttagtagaaatatttaagcatataccgtaagtattcttaaatggaagacactagtcaatctaccttcatcgtcattcgcagatcttttagcagcagccgcagcaagaaccctgacatgacagaaataaatgtttcattccataaagagtagctgcagtgatggtctacaaaagaaataatacaactttgtggtatgctgtggaattgttagatactcattagaaaatgtccatttataaattataagttttttacttttccaaccatattaaagttgctttaaccagattcattgccacaaaaagaaaaaaatgtagtttaacaagtacttggtctcttaataaacatgacttgaacttaccttctctgtagttcccagcgtcgttttctttccataatgtattggacggcatgcttagcaattagataagcaccaaaggccgtcaaacccacagatgcatacttgtaccacctggtaaatgcatctttgttaattacaccgatacataatagtacttagtacaggtatgtagaggaatgaataaaggtcaaccttgcccattttcctaggtttacgatgagttggtcaagggttttaggtgatacgtaaaaaggtcctttgtggggtttctgaattcggacagttccaatatcatctttggcagcctgataatagaataaattgaataagagagaggcagacattgattaaggtatacttgcatcagaaacttagattataaactaaaatatggaagttcactaaaggggttttataatataactgagcagatttggggaaaatgtttaacaaacattacaatcttcaaaatacttattgttatttttatttattttttaaactaagatccccatttgaactaccccttgagcaagtcacatgcctaaccatttgaactacccctcttgggtcgaaatacttataatttctctcatatggacatcctcgatgttatattatatgatattgagtgaatgtatatatgctcagtagcaatcaacagcacaagggatatcacaccaagcagaaaaacttgaactagaatttttatgttagcactaaagacattggtataatgcactaactgctccatgaaatgtaacactccttggaaaaaggcaacaaagattaaagatcacctcttaagagattaacgctgttcaagacatcaaatttgttatcagatttcctttttttggttctctatggaatccttttataaaaagatacaataacttaagtttcactccaagcaaggaaaaaggaaaagcatttaacagtttcatattaccctactgcatacctcgccaacaacagtcaaagaagtaccagttggaagtacccgctcaatacgtttaactccaagcatctacaagcacataaatagcagaaagttcagtcaaccaaaagagagtctgagtgtgtgtgtatgtgacaaattaagtagacaattactaataaacaagaccttgaggccttggagataatctaatgtcccacgtacaagggatctccctgattcttcaaacacctcactcgctactggcaacacaaaacctgtggcagctcgagctcccaacacataagcacgagcggtcccatcatcctggtccaaaaaattgacgaaagaaaaaaaaattactccatctatcaacactactttaatgaattatgaagcaaagcacacaaacatgaaggaatgagaaatgaatgaaagagagagcttctcaccagataccatggaacctctttactcatggataacattagagcagaatcctgtatccatgaaccagcatcattgtgtttcaaaaaatgttgttctgcctaagtaagataagaatgagactgttagtgatacaataattaaactgaagaaaataccaaagtgagaacatatgttgtaataaaagtgttgtttttctgtaattactgtttcctccacaataactccacgtaaaccactgaactcgcagttgatagggctttcagcactgactctcccggaaatcgcaacaaccaaaggtaatacacactcagcatctagcaattgtgctgagaaacaaaaataatgatttagaaattgtatataagctaagaccaccataagaaaaacaattatttgctgtttacatccaaaatgcaatgaattctaaagttgatgatatgcaatttgtggatgcactgccaggactacaactcaagtctgctgccgaaaatgaataagttcccaaacaatgttccacatatcacccgattaatagcaggcttgctaaagcaagcaaacacaaagaacttaaacaaccaaatgtaaggcacaaatcaacaacattagtttatatgccgttgccatgaatgtgaaactcaaaacttatatgtgaataatttagttacagtactaccaacctagtcattacaacaaaataatgacaataatgaacttgtatacaaagaaaaaaaaaaaaatgaaaagcacaatacctaattctttcaactgattgacccgagtgaccgatttcagaagctccgcatccctgcaaattgtcagaaacacgaaacaaaatcataacaaagaaattccaattacccaaggtgtaccattactctagaatttttcaaattttttgcagcgttataattcataatagcattagcaaattaacagtgattgactgacctgccactgctcctgccgagaaggtatagggcagctgcactcaaacagcaacttaatccaccccatggaagcatgttcgatcagctcaatttctaaaccctaattttccagcctttcaactaaaacatatgaccatacgttaaagttacaagtgcatcaatggcgattttcatccaaaaactgccacaatctgatagatttccaacagtaatatatgttatagataacgttaatatttacataaaagaaagaaagctttgatcttgcttagctgcagcgaatcgggtagatagaaaataggggaattagtgaggcagagagatgaaagaggggaacttgttggattgattatggaattggaattttgtgtttggttggcaagaaaaaagaaaaggaaaacagaagaaaattggattggattggaaggaagagaagagattcgaaggctcctccgttggtagactgtgttagcaagctatcctcgtgcttggggggcttggagttggaggagtggccattacaatttcagaagaacaaaataaattttatttgatttaataaggacaacaa

SEQ ID NO: 184118 - DNA, 4750 bp, Cannabis indica
aaatgcctaaaaaaaggcgcacctttaaagcagcctttcgcaaggatgaagaccgcatataagccttcagaagtctaaaaattaaaatatcaagtggcacgttcacatcattgtagttcctgatccaaggatgacctgataataaaagattagaccagtaagacatcaatatggcaaactatacattttttcagaaaattttgagaaactcactgagagcctgagcagctgtcattcttttccgtggatccttattcaataggcgcttaacaaagtcccttgcttctatggttaaagaaggccaaggttgttcatcaaaacttggatccgctttcaagactgctcgaaaaataccagattcggtccgggcccaaaaagggcgactaccacataacagaatatatgcaatcacacccacactccacacatctgcctctgtgctataagctctatgcaaaacttcgggggccacatagtatgcacttccaacaatatcatttagcttttcatctgtcaacaattaaaagtgtcacaagttgatccaagacttcatagttgtgacaaagggttggaaacaaacctgatttcacaaaatctgataaaccaaagtcgatggctttcaactcagaattctcatccttagaagtatacagaaaattctgatgtagagagaaaccaaatttagtgtagtgcatcaaaattataaagcatgaaatgaaatatctgatacaccagagtagcacaaataaagcagtaaacaagatgatagagaatcagagtgtgattttattgaaataggaacagaaaagttttggagacccagtttttctccgagagctagtactcgatagggttaggcagggatcctagtttttctagaatgatcagcataaatctaagataattaaaaggccattgtcttgatgtgtattttaggatactggcagttgtgtaatttggatattgacataattgtgggaagataactacaggctgtaaaggttggagaagggtatggttgtatttggttggaagagagagagactagggcccttgaacttgaacaacctagttttaccttgtacacattctggtttcctttgatcaataaaagttcagaccatatactagacatcattacctaatctctattgtatattagagtacattgttcttggatctaacaagcactagggcccttcactcagttaataagtgtcaaggatctttgaagtccatagctctgttcaccgtaccaagtttttaatatttgaacttcatgcaagcaaataacaggctgagtacgaaacactaaaacaggattataaagaaatttcacctctggtttaagatcacgatgcaccactccctgaagatgacaaaatgcaacaacatttagtatttgtaccatgacagccttagcatcgtcttccgtgtacttcccacccctacaatttaaatgaaaatttagttgaatatgtaggtgtgccacagtattgcagttataatagagctaattaccttgaaagtattctatccagaagttcccctccttcacataacctgaaacgtccaataacactttgtcagggatatgcagtgaacaagcagaaaatataatattaaggcaactgccattttcaagcttactccattactacgtagacattatcactgtcttcaaatgcttcgtagaattgtactagattattatgtcctgccaaagcttgcaatatcttaacctcccttctcacatcctcaattgctatggcagtggtcatctgataacaaagtatacaacattaagctaaagtaattcctttttttctttctttttcttattctttttctttctttattcttttttcttctttttttgaaaaaagctaaagtaatctattaggaagacaaagtgaaagagaaaacatgcttttctgtttctttctctacctcgtttcatataatatattcaatctcagcagctaaacatgcaaattattagcgaacaacagaaattaaaggagaaaaagacaagcataaaaagaaaacagtgcatgaagacaacactagtctgaattagggagacaataaaaaatgtgaaactaatcatttattcatttgcagacttcatgtctaatactgcgaatgcatgtgtgaatagaaaagagaggtttgtgcaacaaagtctacaaaacacatttgcacgcattacacaagcatttcgtgcaataacagtctaatttttaggcatacgcttcccttaaaaagaacaatgcacagatcattttcttgtttgtcaagtcaggttgacttattgataaaataataatatttcagaaatccaacttctggtattacatactattatgttttgcaactgggctcttcatctaatcacacaatacttgaggagcagaaaagtaaaacaaattgctatattagtacataatagggcgtttggtaaaggggttagactaggtgaggatggggtatgtcaaactcaattcatgattgctaaattaacttttaatgaccaacacgtttgtgttttcaagtgtgtcccagttttcatgtttaattaatggtaatattaaccccctccaagacttaaatttcacatttccttaatctaagcaccctttaactctactcccaccaagtccaagtcacataatgaacaccccctaagagagacttgaagtctggaaactcaaatattgcaatgtattccagcctaatttagttcctttctgttactaattttgaaggtcgactttttttttattcctgaatttagtagtagtgatacctctgctctccagcatgaaaaggtaatcacttggtaaagtgggacatatagggtagaggttcaagctagaaaatcattttggaaagggggccatagggaaaagccaagcaagtcgaggaaaagttttacttatcttcttcttcatcttgttttaaatcatgacctgagcatgacataaggtcttaatcctctcacaagactgtgcagtcttggcacgttctacatcacacattctttaattatatgtcaattctagtgtttgggctcaatcattcatgccatataagctcaaaagttgtacaatgtcttgtcttttatgtttacctattatcggacccggtcttcaaccatgcatctgatccaaaaatgacatgcaattgacctgataccttaggcctatatgccatggcagctactgtaggctggtgctactggccattagaagaatggtcattgtgtatgacacagttcaaccctaggccccaatcaagaccaagacccttattttgacatccctctatggttcttttcaatgactagatccactcataaacctatgggctatctaatttcttgatcatttgttggaacaatcacatcttataatcaaacttcataaaactgttttataaaagtcgcataaattttttgaaaactcttattctcattcacaaattgtgttttccaatttataaacatgaattgatttttgccaattgtgtttagttaagcttaaactaagtattaattatcacaaacagttcttctgtgataacttgatagcaagcactaaattattcagatgaggctagaagagaagatcagtatttctactcgttgacctaaaaagcaattatccaacaattatgtcactttatacaccttacactccaaagttgcaagaagtagcactgtctgaaactatccctaatattctttctcattgttaataccccaaaaggaactgtgcctaatattctacatctagaaggacacccaaacaatcaataataacaaaacccagaaatatgtgtaggatcccatcatcctaactcaacttactacttagcccacttaattgaatttacatgaatgaacccacagtgtcaagaaaaattaatagtagtaataatgactaacaaataatagaccagagagtagagacctccatgtacatctccctggtccctacacaaaattagtcataataacaacaagaagaagatggtaacaaagcaacggcaattatcaggaaaagaaacagtaacagcaaatggggtctgaattttatacagcagcaatatataatataaagtaaaataaaagttgaaacctttatccgttcagattaaacaaagatactcagaccaagacaaacccaaataccagattatactttttttttttttcttttttcaaattatacttgtaatcatttcaaacgagaaagaaagaaaaagaaaaagaaaataataaagaattaggaacatttcagccaaaaaaaaaagttaaaagaaagaaagaaaaaggaacagctaaacttccatggttgaagagcaccaaccttggactttgggatgactttgacagcaacgttctggcccttgcgctcacctttcttgaacctagcagaacaagtgtacccaaaatgcccccgacccacttcgtctcctacctccaacctgttcgtgaactccttcgagaacccaaatctcttatccagttcaaccccattttcatcctcgtccccttcctcctcaggaattgccgtggccgacgccttcttcccgtgtctccgagccagaacagcccgtatgtgtttcgccggagacggcggaggaaacggccgccggaagaacctcctgggggtagaactagcgctcttgctcccggcaggcgccggagaagatttcttcaaatagtgggcggggctagggctgt

SEQ ID NO: 184119 - DNA, 8758 bp, Cannabis indica
aactaaaaaaaataaaaaaaaaaaataactagaactaatacaaaaaaaaaaaaaatcactaaatacacgctacttttctcattaatcttgctagtcaaacttcatatacaaaaagagaaatttattgaatctagaattcactaataaaaaaaaaattgatgtttttggtaagcacggtgttcgaaagctttatgttggtggacggatgaaaataacttccctggtttgctcgccatcgctgggaaatagaggaagagaacaaaaattagtcattatataaattgtatttgtatgaatgatttacttcataagtatatgcaaaacatggtcatgttaaaatttaggaaccagagtatagaaatagctaccttgaacacgagtctgctatacaagtagtttgagcatattcattcctcataaataagctgcccaggatgtgaatagccaaagtttgtactaatccgtggagccttatcgataaaatgatgtgtccagtgatgactcccaccataaatccaaatccatatcccgtcaatattgacctccactcaaaaccatctccgaattctgattcgtccctttcctcaaaaggtggtgtcttcacctctttgcatttttctgacactggaaagccacataatcctatgttcccctcatatgaggaacttaaacctgtattgaacattttaccttggggtatacgacctgtaagttggttatgagagaggtttagcaatgaaagagatttgagatttgccaattgctctgggatttcaccagagagcatgtttcgagataaatctattgcttcaagctcctccaaacgtccaagagatactgggatgcgtttggtgaaaccattggttgacaagttgaggacaactagagatggaatttcgcctatactatctggaatttctccctgaaaatggttgtttgagagatcaatggtcttcatgatggataggattttcaatttattcatatcattgtagtcacttaatgagtattgataataaccatcctttgcgctctgataatggaagtttcgaacaggttcctcgttcacagtactccaattcctgaaatattctgatggtatctttccactgaaattatttaaggagatgtcaaaaacacgcaagtctccaaaaccccaatatgtacaaggattccatattgatccatagaatttgtttgatctcaagataagaacagccagccttggcaaagcttgtaatgaaaaaggaaatgtgtcaactatttgattatgccccagatctagaattcttaaatctctacatttggtcaatgattgcggaaatttcccttccaactgatttgaaccaatgttcagcaccttcaagttgcatatatcagtacaaattgcagatatgcttccatggaaattgttatgacgtatgtctaattgtgagagcagattgccaaaacattgaggaagtgtaccattcaagttgttattcgacaggtcgagaacacttagcttggaaaacatgtcgaactcacagtttccagttaaattattcgaccctagaaaaagagttctcaggttcgtcaatttggatatggagcttggaatttttccatttaatttgttcctatttaaggaaaaatattccagtcgagaagaagaaacattttctattttgagaggacctgtaaactggttgtcgtttagattcaggtaaactagagaaggcattgtgaacatggacaaaggaatggctccaccaaacatattgttagacaggtctagtttattaatggaattgaaattttcaaaaatatgaggtggaatggaatcagagaactggtttcctgagagatccaacgaaagaagttgggttaggtttgcaagtaatattggaaacatgccatcgaatcggttatcagaaaggtgcaaatgaagcagttgactcatgctcccaaatgaagatggaatgggaccacgaaaaagattaaaaccaaggtcaaggaaagtgagctcggcaagatctttgccaaatgataatggaagctgaccaatgaatttgttatgtgagagatcaagatatgtgagtttagaaaggttcctcaatacaactggaagatgacccttaaagttgttgtttgctatgtcaagatatgtgagctgggaaaggttccctacccatgaaggaacagttcccgatagggaacaagaattgagatctaaaacattcaaggatttgagttgtcccattgtgtcaggtaatttccctgtaaaaccacattgcctaagattcaaaatatttaaggacttgaggtagccaatggactcaggtacttctcttgaaagttttgtgaaggaagaatccagtagcctcagagaactgccagactgaaattgaggtagaacaacaataagatcatcgttgtttgacacatcaatgacttgtatgtttggaaatagaaatatatcatttggaaattcaccaactagactacatccacgaagagatagagacaccaatgaagatagatttattagggattcaggtactggtgaataaaagttgaccccatttaagttaaggtcttttaaacttttcatattttgaataaggttctccatgtctaattgctttttcaaatataaatagttttcagaaagatcaagtgaaaccaaattgatcaaaaaagagaattctgagggaatgttcccggaaaacacggagtttgagagattgagatgagttaaccttgaaagttggcgaaagcttgatggaatttgggaggaagagaagttgttgaaagccatgttgagttgttgaacttgatccaagctgaagaggctactattagcccttaaaggcccttggagcccattgttgcttagatcaaggcttagtacatgaccagttgacatattgcagctgactccactccacaggcagcagtctgtcctatcattccaagtagccataacatccctcttttgctgggaatcaacactattgtaagacttaataagttcaaactcttgtttcagctgcagcaaagcagagctttgatcagaaagacatttaaagctgaccaaagaatgtgaaacatcaaagcagcaagaaatgaagtaaaatatgaggtatggattgcggtaaatgagcttcttcatgtttacaaaattaaagattgttgcgatgttagtatgagacaatataccaagaactatttttgtatcaaggagaaagaaaagaaaatgtgcaatgtagaaatttatggttgcttggctttatattggtagaatcattttctatgtaaaagatgtgattattgcctcaacgactaagtttaatttgttgtcaatgccttgtacacctgtcattctattggaccattttcactctacaggccacacagtatctctttcaatctgtatctcttacttctaggaaatgaggcaacaatttcacaaacaagaatcttgtaaactatgtactctcttacataattccaagtatgttgtctcagtagaaaaagacaaacactgatacaaggtaagtgtacaagataccacatggatgtgcttgagtcactttcttcttattctatttttctaaacacttttccaaaattactgtcatcatgttccgaaaaatttcctagcagagaatgttttacttttgtttcttcataagaagtaccctggcctttacagatgagttttattatttattttgctaagagtgccctttacagagttatttgaggaaagtagcaagtaataccctttacttgccgtggaaaaacgctcaacgaatgaacttctgggaattttcattcctcaacattcctagcttttacttaggtaattcacacgctttatttcttttctcgactatttccattcatctaatccgaaaacaaattaaatctgaagttttccgtaatacaattggatttggaagaatgaaaacactggcccagaactgtgaacaaaagtgagagaattagaaagagatctcacgcggtgtaagtggaggtgaaaggaagttttcaccacaaaattccagagtttcgactcaaccctaaacccttgcaggtaccgccgagagctagggaagtaaaagaatgaaaaggcgtcgtgttctgttctccccgaccgtggaataagtcaccggagaatgacgaagttcacatctaccctgttttcttcgaaattacggaaatgtcccgcactcagaatgaacacagggcaatgagcttgccaaaagaagaaatctctttatcaatttggagggaacaaattactatttcaattttttattatttaccattaactaaaaaaattaaaaaaaaaattagtgtaaactaatgctcgttgcagaaagacttttttgcaaatcaattctggttattaactatcacaatttcatttcataaatagattgggtactaaaaattgttacacacataattctattgatacttgagagcttgtttagtatttttctcggaagaagagactaaactctctctacctaatacctatcacataccccgaattttgttggacaatattggtaagctcgtataatttattattaggtagagaagaatggcatttatagtagtattagacataaaaagctttagattgacacactgttgggaattcctttcccagtaagccctccttcactggaaggatagagcaaagtgtatggcatcttcactggcccaactctgttcttcaacttctgatctttgttcatcttctcaatttttagctcaatttctctcagcttatttccaaatttctcaaaggctttttctgcttccttgtctgttgtccactctggagtgtctcgctccccaagatacacctcatcagatgaatgcctagatagtatttcaactagggaaatgccgagtactgaaagcagctgcccagttattgtctttaagagagccttttcggggtctgtcttgagctcattgtattcaggagtaccctcttcaggtatgaaacggcggctcattgaagggcggtttggagggaatcctccataggggtactgcccaaaatttatggctgcgtgaagagcggaagcaatccatataatgatggtgcatgtttctattaggtcttcacgagtctgcatttctggccaccagggctcatctttcttgtcaccgtggccctcttctctgagctctttccaccatgactggagttcataatcctcttgaaccatcttatctgttttgtagtacaatgagcagtagtccttcacccatgttttaatggctgaccatatttcaagaccatcaacagcaaatggatagtcatctatcagtaaccgcagaccatgtggggaattttcatcctcaacggccactcccctgaaaaagatcaagaaggttagcatataacctttgtttttaagatcttaaatactgctggactgatttttgttcaacactaagattcacctcttgataagatcaacaggaagtgcttggccaggaaaagtccactccttgtaacttgcagaagtcatttccatgcaataccttccaggaaaaactgtagcctcaagcgctcccccagcattaatcagaatctgcctagcaactgcattcaaattcattgtgtctcggaaatgaggatgcaacagcttattaattggatgaaccacgctcagctgcctatttgttgctatcacaaatggctcaattgctgcatgcgttttcagcctacatatagagatatggatttatattcattttatggaatataagaatattaaaattaattcttgtagataagttatagatatataccagtggcttataagttgatgatagccagagtcgttcacattaacataagctttggcgagttgccaaagggatccgtcaacacctttatcagctggagtgtaaactttgctaatgcagccaaaatgatctcctccaggatgtggcaagctgagttcaattgctaaaggcttaagagtcccatctttttgcaagaaaattattgtcctggtagcataaatctttgtgttggttgcatttatccgcctaaggaatggaattagcgtgtcatggtggtctagtatgaatactttgttgttccttattgcctattgatccatataaaacaatgcccaataaatatgctaggaaaatgcaacaaaaactatctgcttcaaaattttatgtcagaggaaaatacaaaacttcacctcatctacgctgagtccatctaagttgtgttctatgtaattttttgttattttactagtgtgatctccataaactttgggatctagcttgcttcttggaggaaactcctgcaattaattcaaaaacacgatgaatgttacagataaggacttgggatcgtatccacattgattttgttttcaagattgaagagcttgagcgttaatttctttactcctctccaattgcaaagtaaaaagcataaagattaaattattacttggagacgatgaatcatgacaggatttattccagccagcatttcccttgcaaattcttcatcagtatcccatgcagtcttgttctctactccacatcaatgaaattaccaattaactaacacaaagagtatgtaatggtatgtaactaagaatagaaagcacaataaaatataccaaacgtttctgaactaagacataacaaaataagactttataacatttgtaaggggctactatgtacctttgatcacttgaggaaccggaaatttgagaaacctttcgccatcagttctgaaaatctccttgagcatctctgcgggaatattatctctaacactcttaagtaaaccctcgggcacatcaactcctccttcatagagtttaaaaacatcatcaatgctgtcgaactcgtttggagtactattgaagaggtcttctatctcaggtttcaggaactgcccaatggatttcagtgcataagcaagaaaatccgccaacttcaaatgaccaaatctctcatcccttggagcataaatgtttaagctcaaagcaagattcagacgggtctcagtattgcgatctaattattattatagcataaaaacaaaaattaacacctacccagaaaatattttctcaaaaatcaattaattcaaaaaataaaaacctgtatctgttcgttttcgcccagttcttcctctgcgaggataaggatactgaggagagcctccaagaacaggacgagcatatttagcgcctttatcaggattccccaaatcattatagtaatcataatcataaatcctatcccattcctgacgctcacccgttccattgcctctcaaattcgccaattcttcttctctatacttccgtagcgataagggagtttcactgggaagataagtctgcaaattcacccagtgcccatttcagttagccctaatttcgcaaacaatgactcgaattccatttccatacaacgaaaaagagattaaagatttcaaaaaggtgaaaaataccttattagcgaagaaaattcgaggggaatggtacttatcagacgggtaaacccaagagttgcagacgaagtggattctgccatggccaggaacattgtcgagagtgagagtcttgaggtaaaactcgctgtgatggtaattttggatgatgaaagctccgggtaccccgatcttctcatcccaatcgaaattaacgtcgaaagcggagtctcctgccgttaagggactgattgttgtaatccagtcttctaaatatgcttcttttccaagtttccctcgcattccatttcctatcaaagcaaaattcaatttcagcaaaaatcaacggctattttgtgtatttttgttttaatttttttttttaaaaaaaggaaaagaaataatatatattttttctttgtaagagaaataataatcaatttattttgtttgggctcaccgatttattattattattttgcaaagataccgatttttgattattgatatggttgtaaaaataaaatagtcgatattaaattacatatttacatgtaacatgactgatgctgagtatattttattacttaaaagaaaaaatgacactggtaagttttaaaaatggcaaaatttatttgttaaaaaaagagcaaaatattgttcggtaaccattaaaaaattaattttttgattaattaatcaaaaattatgaaaaaattataagattttgttaaataaaattaaaaaaaaataaaaaaaaacaaaatagttcccaaacaactttataaatataaaaagctaccaaaaactaaacatgaaatcattaggaaaaaacaagagtgaacttgaattttagataaataatgagagcataaccacataatttcatggtttttgtaagactcatttaacttttattttattttttatttaaatggatttaacatttatttttggtattacattattattatttttttaagaggatttttgtcttttatatcatttcaattttttttaatattcaaagcaaacaacccataaatgattctatttatattacagttgatacttcattgtcacataatacaagaagtttagccaattaagatccaaaataaataaatcataaagaaagaaaatgataaatttaacttcttttcgttgtcattttaaatttgttacgagtcacatctaatgtttcttataataagtaaaagtaatccacatgcaatcatcatcatcaccatcaccatcatcatc

SEQ ID NO: 184120 - DNA, 3975 bp, Cannabis indica
gactccatcatttttactagttactggtgaactagttcttttttgcttcttagtcttctgaggtggcttcaacatgaaagtaaaagatgttagttaggaaaaataatttaaactaaatataattgtttgtgtccattacttaccgaatctatattataaggaatggtcagatgagatggccactcaacgaaattaccgatagcatgccatacaaaaactaattcatccccatttggaaagggaagtttagcattgttattgtggcactcatctaccaacacacggtagttatccttttttaaatcattacaatgtatttttccacttttctccattaatcgtccaattgcaacaacattaccatttgttgccaataatttatattttttattatcctacagcaaaatatgaaaacataaatagatatattgtattacatttattcttcaataataatattaaccaaatgctcatttactacctccattgacgtatgggttggaatcttgcatcttgaagagactaaaggatcatttaccaccttcattgacataggggtcttgcatgttgaagaaagtattggaggtgagctctctacacttccttttaatgatgaaatttgagatgataattcagcaaatttggtcaaaaacaactctcgttctcgttcttgttctcgttcttctttttcttgttgtcgttttgcttcatactgttcagcttggctacttaatttttgctcaaatgattgctctaactttttaatgtcctctaaatactttcgtgattgatgttgttgaaattcaaattgttgttgctgaagtccactaaaaccttttgttggcttcagaaagtagtctctttgtgtaacgccccgactttggcctctgacacgaccaggatgctcgggtttccctaacacttgtgttaatatatcatttgtcccaatttctacaagtgacccttcttttctcttatctaggaggccatcctacaatagttaaatttataaatttaacaataaattataataaaggataaaaataatggtttataatagcattttacaacttacaatggcatccccaatatgcttgtcacattcatttacatattttcctgatgcatcttttcttgcctccttccaaagtatagatcgatcaattggctcatccgtgtcgagttcagtttgctttaataaaatgaactcaattagttgtaaattttttaataatccaacacaaaatctaaaacgcacttacaaggtcaaattctatttgcttataactacgtcgtgatgagtgatgaggatactccagagctgcgcgcctctcttgttgtttctttctgaattcctaattaaattcatataatttttgctttcattaaattaattaataaatgaatttaaaaaaaaaacttagtatcaaacacttacttgaaattctttagtttgtcgtttggaaacaaagactttccattcctcttctcgaatgctatatctttttggaggtacgtgcaatgcagtaggattttctttcaacaactttgggttgtctatgaaaggagatataaattttctattcaaatatgttttgaatgccctccacttgttgcctaccgaactcatcacttcctttttcattccatcgttgagatgaaaagctaactacaaagtttaacaaaatcaattagtataaataatataattttaagagtttgccactagtataaaaatcttacatttacatctttccaaacattttctaaagtagcagcaggaacatcgtgccaattatcaattgtaattggcaccattgacttcgcttgcatccctaaatagcattgtaatgctctttctggagttccaattgattgtcctctcttgttaaactttaaatacatcttaatcccttttattttgtctgcaattatttttgccaatcggactattcctttagtcttcctattttttttctttttagtagcaagatcgtcactagaaaactcttctaattcctcttctacattgacgtcttctacttcattttcttcaagttcctctctaagatggtccatgatcctattgaaaaaaaaaaagacaagtataaatattagtactaaataaaatagacaaataataagacaaaagaaaagtaactcaaattttaattcatgatccaagtataaccaattgaattacaaatatagataattcaaataccaacttacaatccaaattccgtcacaatcttgtcgaagatagggtccaactattgattcaaatccttcaaattcacttatatctcaaatttctttctcaaaagtttgaagttcaccaatctcatagtcatcaccatcatcaccaatgaactttggttgtgatgcaagtacaattgacaatttagaatttgatggatcttcaatgtaaaatacttgttttgcttgacttgctaatataaatgattcttctttatgggctattctgttgagatcaatcaaagtaaatcctaactcatctaatgtaacatacttatcatctacccaattgcatttgaacattgctatccgaaaagcgcgataatcaagctcccatatttcttcaatgactccataaaatttcatatctccataaaatgggttcttatcacgagctgaagcaaattgaagagtttgagcaacaatacacacaccgctattttgtgtcactctaactttatcacgagcttttgtactaaacctataaccattaatagcgaaccccttgtgcttaattgcctttatattcggacctaatgaaatccatcttaaattttcagataccttgtgagactccttactcaattgagattgaatctacaataattttaaatgaattaaaattttaataataattttctaaagataaaaatacttatgatgaagtaattataatagactaccctatcacgaaaccattgatgaaaggttcggtggtggcaatcttggatccactttcttgatttattacgattctcacgatgaagatattccaagtgttctctaccattaagaatattgttattaatacaaaataaaaattaaggattatattattgcatatgacattaatacttactctatgtaaggttgaacttcagttgtattctctaaaacatttcgatgagcaacatccctgtcttctttttttattaaagtgagccttccattattgatgcctcttccaaccacatcttcactgattgtctttttgggtataccaattgtttctacatcagtaatgtactcagaacaaaattcaactgcttcttctgctatgtaagcctcaactatacaaccctctggacggtttcgatttctaacataacctttgtaaaccttcatcagtctttcaaaaggatacatccaacggaaacatactggcccacatagtcttacttctctaacaagatgtactgccaaatgaaccatgatatcaaaaaaggatggaggaaaatattgctcaaataagcacaaagtcttggcaatttctatttccatcttctccaacttagatacatcaatcaccttggagcatatggcattgaaaaacaaacacattcgcattatagcatttctaacatgctggtcaagtgatcctcgaatagcaattggaagtaattgttgcatcaatacatgacaatcatgagacttaagaccgattagtctgcaatcttttagagatactaaattacgaatatttgacgaatacccatctggaaccttaacatttgccaaagtttcacaaagtttatgtttctcatcttttttcaatgtgtaacaagcaggcggtaaatatgtttttttttacctactttgggtgccaaatctttttttgattgagataataacacaaggtccttacgagcagatatactatctttagttttaccaggaatattgagtaaggttccaatcaaactatcgcatatattt

SEQ ID NO: 184121 - DNA, 5141 bp, Cannabis indica
atatttaattgaaacatacctttctttttgtatgtattgtacctaaaatatccgatataagagagtcacatgaatgaagagtatctttaagtgataggaccaaaattgatacaatatttaaaaaaaaaagtaaaaatgatagactttaaaaaaatgtataaaaaaaaaaaaatgacaatactctaatttttgtaatttttgtgtgtaatgatttcttttatttgttatgccttacagatgttaactgggtaactcgttttgtagcttgaaattcttcgttcgctactgaggatactgtacagtagacgagtttttataaaggtatcgttctgcacaccaagttttgccctttaattttttttaacgaggccatgactacttaaaaagcaaagaaagaaagagaaaacagagggacataacatacagttttaactaaacaaagtagtagtagtagtaatattaaagtagacatgtttttctagttcccaagtgatatggccttgtctataggaattgtaggaataggagggctccgtgtttctcccttacaatgcagagccgcttctaacgataatgcctctctctccttttctcacgcgcgcgacgccgcttacattcaacgcgccgtcgaactcgccgacatgtccgccggcttcacctctcctcaccctaatttcggctgcgtcatcgctacctcttccagcaccgttgccggcgagggctttctctacgcccaggggaccaaacctgctgaggttctcgccgtcgaggctgctggcgaacgttgccgaacctccaccgcttatcttaatatggagcccggtgattgccacggtgaccatgccgccgtctccgctctcgtcgaggttttgttgcgagtgctttgtgctttgtttcagtttgggtggaattgacttgttttgtgtgtgattgattgatggttttgttgtgtggattaggcagggattgcgagggtagtggttgggatcaggcatcctctacagcatctcagaggcaatgctgtaagggcattgagaggtcagggagtgcaggtcgatgttcttggagaagatctcaaaagcaaaatcattgaggtatgttaaaaattggccatttcttactcttttaacttccaaattttgaagaatcacgacgatcttgaactaaaaccctaatggaatgatgaatgtgatgacttggagtgaattatttgacacgaggtgtttgacaaaataaaactttttcttaatgtcaattgcagaatgccattttttatttcattttataagtctgtaaaaattagcatttccaatcaagggaagctaatttgtacagaattattaaaggaatgccatttcgcaagatgatattagagaaaagcctattttaccaattattctgtgctgttggagtttagttatgtagtaatagttgaaataaatttttgtcttcatttgcagtattcagtataacacgtccatgtttatgtctctcgtagaatgctcaaaaaacatgcctcctagtcaatgcccctttgatttgtagagcagcttcccgtgttcccttctctgttttcaagtttgcaatgacacttgatggtgagcttaattaatgtaattgcagaggcctctaagttaagaataaaggcgtgttttttgatagtctttcttttgggaaacaggaaaaattgctgctagtagtggacatgcatcatggataagcagcaaagtctctagaagtcgagtttttgaaatgcggggtagaagtgatgctgttgttgttggagggaataccgtccggagggacagtaagttgtgactttactagtgtataagctgatgtatggtgaatatatgttctgatttgttttcttattagatccaaaattgacggcaagacatggaggtgggcatatgcccatgcggattgtaatgtcacagacacttgatctgcctgaggaagcaaatctttgggatgtgtcggaagcatctaccatagttgcaacccaaaggggggctagaagaagtttccagaaatttcttgcttctaaaggagttgaagtagtggagttcgacatcttaaatcctagagacgtaatggaatactttcacgattgtggatatctttcagttttgtgggagtgtggaggaacattagctgcatctgcaatttcagctggagtaatacacaaggtccttcttacttttctattctgtttttttcttccttcttggtgggtttgttttatttgttatcataacctttgcactggactattgtcattgacatcaccagatgctgctgctatcatgcaggttttcgcatttgttgctcctaagattataggtggcaaatatgctccatctcctgtaggtgaacttggcatggttgagatgtctcaagctttagatttgattgatgtttgctatgaacaggttggcagtattctgtgctgtggtccacataccttggcaagacaatcttttgttcaaattttattgtgattggccttaactctgctcttgctacttgttcaacaggttggaccagacatgcttattagcggattccttcagcccataccagatgtaacgcctgttatcccatcagttgaagaaacttatgcaattgatcagaccgttactccatatgaatcaaaaatcatttctttctacaaaacatgggacctgtatggtgctttttcaaatttttctcctcatccaattcaaatgcctgatgacaatggtggttatgtctcctggtcgagtgtagaacattactaccaggtatcatatattaccaaatacatatcatttttttcattaaaaacatcgtttgaatgccgttaaagatttattgttaataatcaggctcagaagtttgttggagtcaatgatcctctcgcgtcagattgtgtagcaaggataaagtctgccaaaagtccggaggaggctgcaagattaggaagatcaatgcagaggcagcgccctgatctggtatagtttatgtgagctcatttttaattagtataatactggatgtttaagttactatatatccaaaggggattcaatgattttataaacctgatagaagcaccggaaattattattttctctctcatgccatgaagatttcctatagaagatataaagctgtgctaaaatttataatattcattaatcatttgcacacccaatgaaatgcatttcttgctaataattacacaagtaacatgatattaaattccatccatgatattgtgataagagtatagttttagacgtactatacatcagtttctcaaacacttatgaatagtaacctgtttcaggtaagatctgattgggaaagtgccaagatcaatgttatgtacaaagcagtgaaatgtaagttctcaatttatccgcatctgaattctatgttgctttctactgctggatctgttcttgttgaagcttcaccgcatgattttttctggggtggaggccgggatggagagggcttaaactatttggggcggcttttaatgcaattaagatccgagtttcttggtgagtcccctgctgcatctaatcaaaacactttcctagttggatagtaatagcagcaaagttagtattcttaattagcgagttctttcctgcaaccttaatattgtttcaacagagtcagaattttcatttgatagaagagaacttttagttttatattctagtctaacttaaaacatgcagaagaattcaaatgtttgaacttttaagtactgtacattgtcaatttcacaagtttttaatttgaggtacatagtataagtgaagctgcacatcttcttgtaacaggctattagtgtttgatttcactggtctgttgaatgtttgccattgtatttctttggcttgctctcaagattttcaacttataataaacagtgaaatatgttaatggaaaagctgttctctaggtttgcagacgcctggtaaagaataagagaggtgtacgaaggtatcctcaagttaagattctgctcttgagtgtcatggtataagcctgcctgactcagatcaattggttgtccagagatgaaaatggaccatagtgttcttggaattactatacaattgaccttattctttttatttatattatttcagtaagcaattatgtatattggcaattaaccatattaattttttttatgaaattaatgaaatgataatacaaatctattctttataagcactggacatactcaaagaaagagtctaaaaagaaggaaaaaatagaaagaacaaacgaccaaacaaattagaatatagtttatgtaactagcaaaatgatagaagggatcatacttcaattttattttgttattagtgtttaagttatatttttgagtaatccaatgttattgatgataaattttgtttattttatatttcgagaacttttgaaatattccaaaatacaggaacttgtttatggcaaaaaggtgaaaaagatttcctcacaaatcttcaaaaaaaaaaaaagtgctatttcgttcataatttttatgtaaatcttaagtcatcggtcaagtttcttacaaaaaaaggaaataacaggaactggaaggcatctatatctcaatgaacgagcacacaggaaatttgaatatcgaaaactgaatacaatttcggattgtgatgaaaacacatggctttctaatggcgttgattcttatttctctcaattgttctgtgttagttcaaaattattataaaaaggaaataaagagaagaacacttaatacatcttagtaaaatttatattgttttagttgaataattgtattgtctttgtgtgtgtgaaagattccgtatgaccttaattaggcttggtgatgtgtatttgcaagtggtgtagggataagactgtaaaattcctacaacatagttgacttcaaggacataatattcttgctcaaaagttgcaaattgcaacgaacagcaatgcaaggatagaattttcaagcttgtcatcattctttcttgtttctcatctgtacaatacatgggttttctgtgaaagaaataatatggctgcttctacttcttctaactttatgcccgaaaaatatgatgttttcatcagtttta

SEQ ID NO: 184122 - DNA, 1036 bp, Cannabis indica
aagtttgagagaaactttgtaaacgaaaacagagagaggattttgagattacatgttgtaatttgtagatggaatcttcatctgattcttgtaacttgttgatgattgatagtgcacgatcaagcatctaagacgagtttgacgaagacgtagccctaattttaaggtgagctctgagatcaaatttctttgtgttcttgtgagtttgttctgtttatctttaaccaacgatgatcatctaaatctttgttgttgtttagctcttgttttgcttttgggttttgctggttcgaaggctagggtttgaagctcgagattcttaaagaaggaagaagatgaggtcgtattcagctagggttttggggttgatcgaaagtattcttaatttttcgtgtctttgattttatatatacattgtggttttggggttgcaaactcaattccgtgaagtgtttgtaaacgtcattttctaccttgatgtttaatttgttggtttagttggtatagggttattctcggtattgaatttcctagtgttctcttactacttccatacgtgattagcttttttgtaaaaaaaagaaaaatatagtgataaaaacaattggtatcgaacaggactaattttttcattttttcgcttcgaaacttttgcaggtacaatatcaatttcgacattctcaaatgccactaagaaacctctttttctaccaactttaacagaactactactaatagtatttacataatcaaacattgagctaggaagctcttccaattgaactcccataaacgacatctctaaagtgtcgtttatatcacaaaactcatcgctttcttcaacgacattactcctaactgtgatccaatcttggtccgaagaccaattcgaaattgtaaagacagagtcaccaccaaccaatctttctattctttcagaagcagagctcaaagaagaaatttcatggttctcttcatcaaacgagtcccaaacattgtgatcaaaaacactctttggagaagaagaagaagaaga

SEQ ID NO: 184123 - DNA, 6622 bp, Cannabis indica
aaaaaagcattagaagaccaggcacatcttattgaccaatatgaagagatggaaaaggctcaaaatgaatgggaagagaagttcagagaaaataacattagcacaccggtaagctatatcaggaccatttatgacataataattattatttcacccttttctgaaatttagtttattaagaaatcaaattaatgtagtcagagatcttacataggcataacacatataattgaactcatgacacctgaaatttattgatgttcataaaaacaaatttatatgctctggcgatgggctgttggggttgacaatataaataaatctattcatattagtgtatttttttttctcctctctgaccaagaataaatgcgaaatgggataagtgcactttgatgtgatatattttgaattctttttccaagcagcaactggcagccttttctttttcgtttggtttcagtttatctcttgcaaggaaacttaaaagcataagcatattattaggcaagtggtgccatgcaatgcatgcatttataatacctttttcaactgaagatctatatctgtcccctgttttgaattagacatctgtttggtgcttctattctggattaagtgtttagtaatgataaataaagaacttcaatgctttttgttatcagtcattttgggatcttttataatcatatctgtctaattattgggacatgcaggattcatatgaccctggaaaccactcagatataactgaggaaagagatgaggtcaagcctctaacacttcccaataatgagacagatatctcagaacctgaagaggcaaagccaaaggaaatagatttatccaaaatgcagcctaatggtattttagcaccttcacatgctgagatggtagaggatcaaacaagcagcagaaccaattctgctggttccagatctccagctcaagaatttgcatttcctacagctagcgaaaggggaatccaacagagtgaggataaccatgattgtcaaccatcagaaatcctctgccaggacccacctttgcatgggccactgagcaaccggtctttagttagcaattcatccgagttaggcagcagttcccatgaaagagaggcttcagaaggccaaaatgatcactatgcattagtacctcacaacccacctaatgctttaggtggtgtgttggatgcactcaaacaggcaaagttatcactacatcagaaaatcaatagattgccaccagacggcagaattactgttaaaaaatccactgaacaatctccatttgatacaagaatcggggacagaacagagatccccactgggtgtagtggacttttcagattaccaactgatttctctgctgaagtaaatacacgagtcaactttctcagttctggatctcacttaacaccatattatcctgataatagagttgcagtaactgctcctgatcgatttgtttcaacgccttacatggaaaatcaagcaggatttcgaactgatgatcgcttcttctcaagtggctctttaccgtctgggtcaagagcttctactttaaattcacgttacgatccttacttgaataatggtttcaatagatacaactatacttcccatcccccctatccccctttccctgatttaatgcggcatataccctcagatgaaggattactaagaccctttcccagtagcagtaggccatatgagtcacctgtagatggatcaccattatatagtgatcaagctggacctaatatgtataggtagtattatactatatctactcttttaagtttttccaactgtatcttagaattggttattggttttatagataggttctagtttctgttccattagagggagaaggtttttgtacacagtgaaaccatttgttgtatcatgtttatgtttctgcatcataattttgattctaatttctgatataaatatttaattctactgtgactatcaattttttctttcccctttgtgcgtaaccatagtgatgcttggactaactctcagaggattctcttctgtggatgaatactctgctgaattataaaggtgtgatttaacttggttttaatattttagcagctgactatagaaggtgtgatatgcaactgtagctatctagatgcatatatgaaagtataaactcaaacgaagcaatagttatatattaaattcatgcaattcagtacatatgcatcagagaaattgtacttagtgatggaaaatgatctattgcaacatctagaaactacttcacaggaataacaaattcttgttagatgtggcagtatctggttattctaaaatttactaatattattagtagagatcagatgatcatagctataatctttttgatcaatttgcacattatactgctgtcaacgtgtattgaagatcaagttaaagtttgagctaatagttcacactacgaattatgcattatgaatacatataaacagagagagtgaaaaaaaaaaagaacgacttatgcattatcttactccgaaggtgacaatctcaaaagcaaattccatatagcagttctctaacatttattctcttctcttcttagactttattgaaaaaacaaacaggaataccagaaaatgttcagtttcctgggatacgaacagaaaattaatctaccatggtaaaacatacttgtcttgtcccacaatcttaagacaaagcaaaactacgaggctgctcatgacacaaaacaccaccaaagagcaaaccataacaaagcatagaaagaatctgtcttttgctttgttcccttcaaccgcactatgaaaatcttttccaatcttttgagcttttcccgtgatgaaaaatggtgttacaaaccatagcaaaagaggatataacctgtttgtctgcaagtaaaagggaaagttttaaacagttatactagaagaactattcacaatccaatgagccagttttccttacccaaaaccttgctaatccaaaatccttcttctgagagtttgcctcagtccatggcgaggtttccttattcccattttcaatatgactgtatggtttcatattccaatcaggaccatcaccacccacggtaacttttgattctgctggtgctttctgcattgttgttaaatacgtttttatggatgttagtacatctaagcaaatcaaaatagatgccaaaaccttaatgtagagtctaaatttgtaaaactgatatctcattttgcccaaagatttaaaatgcttcttttggtgaagaatcatgtgatattgtgcaaaagggcaataaacaatgaatactgaactctgctagaaattcctttcatgcaaaagtagtacagattttgaaaataagaataaacttaattcttttaccatggtatttcccgaagattggttgcagatcaagcatgtataaggacttggattgcatgcctagcagatagcataacacaatgcattagagtgtgctctattgaaatatattataaatcagccttgagacagacataggtaccaccttaaagcaagctgaatggatataatggccgcagggtagagctctgactgctgtagttgatgtgaataagaacttgtcgcagaccgggcagctggtctctaggcatttctccttgcactcatgatccaataatctaattgaaaggcagcagttgcaagacatacaatgaaaatagccaacaccgagccccctcccaacccggcatatattgcagaatgggcaatgataaatttccctgtagtgacaaaagatcattgcaaacttcatgcaagctctcacattttatgaaaggtcagttttgctagcagcagaaaattacaacaatttatcattacttgaaagacatgaaaaatggtttaaaagcttatgcgagggtatatgtcttcttttaagcttttaagatcagaaatctttgtttttaagaagtttttaatcttctcaaactatgttcttcatgacagaaaaagctgtctttagtgttataatatctctttcaccctcttcttgttttactttcacttcttctcaaaccatcattccagattgctaataaggtttagtatgtgaagttataatatcaaaatgttggctttagttagattgtaaccattaaactatgaagttaagggaaaaaatctttttgttttgctctctttaacaaatacattagaaagtcacccgtctaattattgtgccgagaaaacaatgcttagattaatgagttagtagcatgaaaaaaactgagactttataacctaagaccagttcttatacaagtttgctttgctttacacttatcatcaatgaccatatcacattgcataaaatatttgttataacattatgcatactgtttaggctagtgggtttcttccaaaggcttcctataaggcatagcttttgaaacttagagaaactgttatcaatttatttaggtgtttttactttttggcaattgtttgtggagaatttacttgagaaagaaagaaccaatcaatcacaaatttatgtacctttcatcatcgaaaagtttgcatatattgcaatagtacttcgccattggaaatccactgcatgaaggcgtcttgcatattggcccgatcggctgaatgatcaagcatctcatacacatcatttctgatgtttctttcctgcaagccccaccaaaaaataaaatgagataggaagttgtcaaaacttgatgcttaatagttaatgtaagaatttacctgtccattgcatggttacttatactgtcatggcaaaagttacaggtaaccagcttgtcacaacaagaagcccgaattttgcagtttcttttgtagtgctcacaaccaaataccttattctcaggatctcgaaacgatgggaatcttccttttaagttttcacctgtgcaatctttacaactcaatgattgaggaagtctttgctgagcacccatccagtaactacaagtagaacatttaaaattacacaactttagttagttacaactcagtgctaattaagtatgagtagtgaaataaacttcagggaaattaaactctttggctccaacctgatcatactgttctgtaggtatttctttgtcacattctcagaattcgagtctagacaaacctttccagtgccattcttacgaggctttaacatactgatccccatgcttctttgaaattcacctgaattggacaaagttaagaagaattaatgttattatatacagcaaatagtgataaatcttatgtaagtgccacattttctttcttctagtggtcaatgcatatcagaatttaatataccatttgggaatgttcttattgaagtgtctttccagcaatcattaagccattcactgaacattgtatttcttgttacatgctttaatgtttccatcatttgatcatgttcctcctgtgaaagagcagaaagtacccatggaagcagtaactgaagcacttcaccactagttgtccctaacatgaacccaataatccgatgctgctcttccctagaaaactgaattctaaacaatggccacatttcaagttcttcccttgacatatgttgatctatcatcattcttaaggacttgcacatgtattgaagccgaccacatagctcgtggtactgtctgatgcattcaatgtcatagtctccgaaagtacttagactcgagtccttttcattacgaacactcttcaagcttgtatgaatttgtgagatttcagaaagaagatatgaaatatgctccaactttttttcatcctgcttatgatctaccttgtatgagtgagccacattatagagtccctccttggattctaatgcagggtatactatattatccttagaatcagtatgagctctatacaaaccccaaaatagagaaaatcttccaatgaactgatgcagaaaagtctcatcataatcactaactctggcagattcaatgcttaaatattctaagtctcggcgtatggctttatgcactttaaacagaatatctattggttgttcctcacttctatctgccaaaatcattaaagatcttaaagagttgctatctttggaggaaacaggggagacaactccagcaggcaaagcaatatgaaatggtgagaatgattgaaaagtttcttctccattaacatcaaagaatctcttgtttgctcttgaagatgagcataaactctggttacgcgccctccaaccccaactagaaaagagttctacgagagcagcatctgatgctggtgctgaaagaaagaatgaaacttgtgtaagaaataaaataaaattagttctttgaatattatgtctaaatctcaaaagactgatataggacctgccaactgtatattcttgaagaagttatgagcttcttcatcagtcatcactccaatcagccatggcaagacttgtttaatcaatctcaaaggcatcatacacaagctttgatacaaaatttcttgttgccttttgacatttaagttcactctagcaagtgaaataacctagacaacagagagatcagtcaatttcaggaatgaaagaggtatgctaa

SEQ ID NO: 184124 - DNA, 3618 bp, Cannabis indica
atgaaaaccttgtgctattaattgacactggtggctatgtcataacaaacaaacaaagataatctcaattattttaaaatgacacagtttaggatgatcacttctttttttgttaaaaaaaaatgtatatatgtctctctcactaagaataaattggattacgccacggctctttttacgtatatctttatctctttttttctttcttaatataaaatatgagagcatgcaaaaaaatttaaataaataaatagttaaaagaaaacataaaatcaatatcatttgaaagagaagtataataactttcagaaaagaaaaaaggaaatataatgatttatgaacacaaaattgtgcatcaaataattacatgctatatattattttaagtgatgggtaaatttggtgtttaatttattgaaaaagttacacaaaatattatttttagtaaaatttttacatttttacgtttaattttttttaattatttttataaaaaaataatattcatataaaatcaaaataatatataaataacaaaaaataaataaaattataataagattacaacaaaaacatcaaaaaatcttatttttataaataaaattttaataactataaaatattttaaattctgcacaactatgtatttacagttttttgttgttatttttgtgtatttttaaaataattcctaaattatttgcagttcagcatatatcattactcaaaaattaaatttacacataaatacatgcactttataattactttggccaaaacaaaaattattacacaaaacctaagattaaacgacaattaaatttcaaaaacaaaacgcattgaaaaaagaaaaataatttgatgtactcattcaacaaaagaatataaattaaaaatttgggtcaactaaattcagaagaaacatatcatgccaaatacttttgtcaaaaataaatgtgcattttttttaaagtaaacagaagaactccattaaaatgcatcaaagccaaaagatcagcatacaaaagattgacaaatttaaacaactaaatcagtgggcaagtccggtcactatacccgaacctcatctaaatttaacgctcgttttgctaaaaaatgagcatcatggttctttaaccgattacaatgtgacagagatatgctatactgaaagaattctaatcagaactacccgctgacaatcagagtaagcagtaatcaccgtataccccatctgcacccaacaataaatatgcatttgaaagtgaattgtcttgcattcatttatatttttcttacttttctaaagattatatatatttttatgcaaatattacttagcacctcgggattttcaataaaaattgtctaaatatatttattctcctcagtatttgaacaatgagctgaaatattactaaaattgatgagtttgtaatttaaaaataaattacatttattataagattattttatgttaatagttttattttgaaaacctctttcataagccaagattatttgatttgacttttaccgttaaaaaaactttcttacaaaactttgtacatcaacaaaaatgacatcttttcgaggcttaaattatttcaacaaataattttaaatttgacaccatccacatccacttgagaataaagacaaaataaacttgtgaaaaagctagcatagatctgattaaaactattaaattgtaatttgtcattataaaaaactataaataattaatcaataacatcatgaatgtaatgaccattcaatgaagaacaactagcaaccacttcaatactgtacattatacttatcatcactcttctaaaatacaaattcttttcttgaaaaaagaaaaaaaaaaatgtaaaaattaagcttagcagataacacaagcattgggatcttcctcaacacttctgacatgataataatgctgaagtggaaccatttgagcattctgatgagcaatccatgtcttctgaagctcagccaaagtaattggttcttgttttttaggctcttcttttttgggttcttctttcttcttctctggtgctttaggtggtcccactgatagaatatcagcattacaatgctttctcaatttgcttaccaaactcactggatctatgtcccctgttactgtcaatttcatgtctttagaatccatggagatagaatcaacccctgcaaaacaaatcattgaattctattagatcatcattttctatgacatgggtttcgttttattttaatcaaaaaaacttagggagtataatagcatacctgaatggccagaaaactgtcttcataatcttcttcttggttctgtcatcatgaaagtccaatttcaacaccacttgctgtaacaaataattccatattagtttgattgataaaaagtaaaaactttagtagtagaaaagtgtaactgaatatatattaactaattaccttcatttttagagtatgtaagcttttgtgagatctgagcttgaagcttttcaaacactcaacagtagtagagagagagagatgggaagttgtttagggatattgataatggttttgtgaattggaagatttatataggaatgagtaagtgagtcaacggttaggtcaatgagcacagtagtcatttggtcaagatagtcatctgagtgggacccataagcccacacaacacaagtttgcaacttcgcagaaagaaagagcaaaacacttgtggacaaacaaattagagagagccattaaagtttttcaacttttcatttttctttattgaaatgaactttttcaaatcacttgaattttccaatttcttggaagccacggaaatgagagaaagtccctcaccacaagtcgtgatgatatatatagtctagtcttaaacacttgtataggttgtaccctgtggtccttgattgaaagtttttctttcctcaaaacacatctctaaacgcgtttacatctctatagaagacttttagtttttcttttgctgaattcgaagactttattagttcagataagtctcaactctccctcataacaaaaaaccaataatagatagaagcataaataaatacctatcttcatcccatttatcactgtattcgtctaattttgtcccttcattgctttataactgtataataaatagtacttgatgaaaacaattcttttagagtaattttgtaaaggttaattttttttttttttttttttaatttttacatgtaccaaattaaatttggaaaattctacaatgtagccccttaaaatggatatattgatacactcctatctgttttagcatccgaaataattttttagtcaaattttttctcatggtcgtgtacgttatagttatttaagacatcctgcaaaattttaagaaatttggaaaagtttaacacgccgaaaactatgttcaaacattgtattgcacgcgtgactattttattttatactcgtgtaaaatcgactgtttgaacattatattctatattgtaaattattctgaatttcccaaaaatttgtaggatatcataaatagttataacgtacatgaatatgaaaaaaaattgacaaattttttttctg

SEQ ID NO: 184125 - DNA, 2199 bp, Cannabis indica
aatctttaaattcaaattttgatcaccaaacgtgtcctacgaaactctgaacacaacgagacataacaagaagaaaaacaaaaaaacaacggcaacattaataatagtatgagaggcgcctgcaagtaccccaacaagcagagatatttaaggtttcatcacagcacacgaaataattcaagtctcagaaaagaaaaaataaaacacaaccattcatccagtttccgactcggcgcccagcaaagaaaaaactaaacaaattcaagtctcagacacaaagaaaagtaaaacaatcattcatcctcagtttccgactcagcactccgaagccaattaatgaagggttcagcattccaaatctgagagtctttgctggctccttcagatccttcttcaaaccacagaattatgaactcttcctcgaggatgtcagcatcgtacaattcttttagaaccagtgcaacttctttcatcaaactggatgtcaaccttttgaaaaatgcttctatagctttaagtagtagcatctgacatccctcctcctgagcagcagccacagcaatgtactttttatttttggccactacctttgaaaaacctttttcaacaccgtcaaagagagcctccaacaaaagagtcaccttttcctgagctgattccggagaagctgccagaagggactgcagttgtttggctgaagcgcctttctttatgtttgccttcagttcatcaataagtttcagaggagcaactgagtttccattctgagcattatcacttgttatggttgctgccttggtcttcttgtctggcttatttgtagatagcataaccatatcagctgttacagcactcaactgctcttgaatcctttggttaactgcctcgagtgatgtgtcagtttgccattgcacatcatcgtcatcttccatttcttccttctcatcagcatggctttctggaggtgatggatgaccatcatcagatccacctgttttctttcttgaagtgctattttttgtgataccatcttttgaggatgtgccctttttcttcacatccttcttcactttctttagctcctcatcagcagcctccccttctttcattcgctccttctcagctcttctcatagccttcttgtctttggatcccttcttctgttcaggtgggttcttaagaatgaaactggtcagcttgtccctcatatccacatcagacacaaacccacacgcagcacatttcagttggagcatctgagtttttgtaataactatctcagtttcagggtttccgcaaccatagcactggacgtatttcttaataaaattttcaagaagtccagctagcttagaagtttcatgtgccccgttaacaagagaagttccagttttctcatcaaatttagactgggctccaagctcacaaccaaaatacttagttgtgtaagaagctggccttgccaaagccttcgcaatatcaaccatgttgaccacattcgtcttaatgccatttcccctgccctcaatttttgtaatcattctgggcatcttataacggtagaaggcatcatcactatttgctgcccctatgttctgtaaggccatcttcacttcagcaataaagttggaatttaagtaaaagtggatgtcacagcagggaaatactggaatgaagagtataagcagctgatttatttccttcaaggattctctcagcaaagatggattgatcttcagcagaaaaagaaggttgcatacacttgcaaccacaccaagaatattcctcaaatggcccgagatgcatacagccaacagcttttgacaaggacctgttcttttttcttgatgaaggacaatactcaccaagcaacccaattgtttccaagaagaatatggcctgttctgacataaaataaactacaacgttcacaacttcaccttgaaaatcagcagacaacagaaaacctgcaatgtttgacagcataattatttggaattagaatgtaaatatataagcacctctgataatcataaaggaaaactttaaattaaatccactgggaaactattaaaaactgctattaaagacaaagatcacaactgatgattagcacaaagacagtttaagacatgaggtaattatatgagcttggctgagaacaaaaaataaataatttgaaaaggtaaactagtagag

SEQ ID NO: 184126 - DNA, 1185 bp, Cannabis indica
ttttcctttttttttttttttatgtatagggtgctatagtactactactacacttgtatatataaaactaaatatatattataccattattattactcattaatggtgtttaacatcacttaatagtgaccccttataaataattattaaattaaattatatgaaacccacaacttaattatcctgaaaaatttgtgggctattattattatcatgaaataaatatgtggtaaattttaataaaactaaaaattatttgtatttttcaaaagataacaaataactttggaatctcttagctatgatctattgatcttactattagttgtcaacaaacgatctacataggatttaaccatagcatccggcggctatatatatataattaaaaacccaacagtacgtgttataattattactatatatataaataaatatattagttggtaattttgttccactagttaatattagtagtaatagaagagtagaagaagaatggtttagttgggttattagagatggggcttttaggtatatggttggatttttattgggttttccttctaattattcaacttgctcaggaaaaggacagtcaaggtccagaaggggacttgtgtacgagacaaaatttgttccaacttttatcatcaatacagaaactagctagaaaggtctcttttcaaatatatataaatatagctagctagtcccccttttactcaactagattaatgggcctaattccttttcttttttggcgagtcatagctagacgctctcccataaaaggggttctaaaattcatctaatcttctaccaaatgtaactatagctaacatctttttcttttgttttttccccttgaattaacacatcaatttgcatttttggggaacatatatatagataagtatatatatttgcactatatttgttagaagaagatcgatgatcaactaagccattctctccacacatccacacaaagcaaaccaaagtatatgggaccttaaccaaaattaaattttggggtccctatttaaatttaattggtaaaggtttttaaaactcttaaaagtcaaatccatttgtaactacactttaaatatttctttaaaaaaatacaaaataaaagtaagaattaattgatctcttcatataaagtaagactctttacaa

SEQ ID NO: 184127 - DNA, 5914 bp, Cannabis indica
ttttttattatatatatataactaatatatatattaatattgatttaatcgttaaaattgagataaagatgtattttgtagataataatataatactaaacaactgcccatttttgttttgtggcctttatttcctaaatggttttttaacagttttctttctagttttttcttttaattttacttccatctttcttcgatttttttcccactttttgctacaactgctcccttcaatccaaagtatacttagcttgtctggttgtagtttacaaaaataatagtcatggatcccttaaatgataaaataaaaagcaaaaatataactctcattgagaaagaacaatctgcttttgagtttaacattagagaaccaattaattctgattttgttcttgatcgtgttctgtatgcacgaatcctgaccacgaaaaaagtttggctttctactctacaagggcaaactaaacattggaatggttgattctctatgaaaatttctgaagttgaagacatgttcatgcttacttttgggtgtgaaggagataagcaatgtgtcctaataacttgagaaccatttcactttaacaattattacatcgtgctttacatgggtaatatttgtggaagtgcactacatcaaatcttatctatttacaattctggatacaagtatacaggtttccttttatgagcaaaactgaaaaattggttgaggcacttggtaaaataattggtgaatttattaaagtttttgaagattcgctctttgaaagatgggatcttttcttgcgtattcgagtaaacattaatgtcccaaaaccattaatgaggggttgaatgatcacactatctcaagttcgagataaattttggttgaattccattatgagagattgtcagaatattgtatggaatgtgaaagattaggccatccttttaataaatgtatgatctttctcgaaaagcttgacaatggtgaggaaccggaacatgagtgtaggctaataattaaaggttctagactcctaacttgtggctatgattgatacagaactgactttgccaaaggaaatgcttggcctttactcactcgtttacccaggtcttcactgattttgacggttccatctttcaatggcagaacacaactgcagcctcgacaactgtttcgagaggagtcttctcaacaacaccaagatgagtttgacaataatgactttgctagttcttcctcaaactagatggttctacaccaaaattgaagggggaaactatctccaacttgacaaatagtatctcagttcaacaatattccatttcggataaaaaagaatcttgaatgcccactgtccattttacaccagcaacgaccttcactaacctatcaccttctgataaatgtttcattgccccaaagtttactcacccttcacttgttgcttcgggcacacctttaaaccagaaccaagatactttactctgatttgtctgtaatatatatgcctagctcatgtcttggaaccagttctaacaccatagccacttacccaccaaaccccgccactgttatgtcacaacgtagagacaatttgaatatgcctctgagcactgccaaatactccatagcagtcattatcccaaatactccatagcagtcattatccttactcgaatggaaaaataaaggaaataaaataactctccaaattgcaaatcaaagagacaacttgaagggagttcacttagagacacactaaagagatgtagggtaaccaaccatccatgtttgcttctatcttgtcagttgaagaagaactaaaccacgtagtttctgttattctaatgcattcttctagctatctctcgacaatgcagcaaaggcaagtttccaaccccgcattcagccatgaaaattgttagctggaatgcacatggtttggggaatcctagcacattttttcatctttgtttgcttgttaaagagcaacccccacatgttatttttttttaatagaaactaagttaggtcctaatgtaatttctcatttttgtcaagctttatatttcaataatagacttgaagtccctaaaggaggtttgggaatggtttgatgttgttatggaaggattgatgtagatgtaatacttttaaactttaatactaatatacttggctattatatagcttttgcaaatgaaacaagatggcatttcacagctttttatggagccccataaattcaaaatagagttcatacgtggtcactgtttgaacgactaagaatatgaaacctttatcttcatggctagttattagagatttcaatgaaatttttctctaatcaaaacaaatcgagaggagccttgaaaaatgaagcacaaatggaacatttcagaagagttcttgacaatagccatttaaatgaacaatcttttgagggagatcatttcacatgggttaaagggacacactcagtggacacaattacagaaagattagattaatgttttgttaatgatctttgggatttaaactttgatcccatcactatgcacaatctagattactacaacatagatcatagagtcggccctttcagttgatgtctgcttacataatacccaaaaccagcaaggtaaaaggcatacaagatttagatttgaaaagctttggttacaacatgaagaagaagccaccatcaatcaacaatattggaaggctccacgaactgatgctgttataaagagtttttggataacttggaagcttgtccatcttctttgcggtagtggcacaaatcaaaatttggaaatttcaaaaacactactacaaatagctttttccatgtctctttttcatgtccaacaaaaaaggtattggacatgaaaaaaaatttgggagattcctagtcttacattgatggactagaaaaaaaattatcatgtccatcaatgttggactggaaaaaaaggcggggacgtgatatattaaaaattaagagaaacctttttttagagaggcccaacgtccatcagtgttggacatggcccacgattcacatcctaccgtattggaagtgaatcatgggccacgtccaaccttgatagatgttgggcctcaaattaaacaccccacccacctaatacctccatctagcctcaaacccattcttctccctccttcaacttcaaaccacgactaggaagcaggtagagaaaatttggaaatcgcagctcttgatttagccatttagaggtattttttcttcaacttttttttatggggtcttgtttttctttttcaaaaaactatgcaaacaagtaactattgattcttttgaagtttttttcctttctcttatgggttaatattggttgtgtaagtatactaagatattcagttaacaatatgatgttctagaaagtgaagtaatgatattgtgatatgtttttaggttccttgatagtgtctcgtaggaaaggcacatgaccaaagataattagtgtaatttgtgtttagagaatcatatgactgtcttacacactttcaaataaatgaaaattaaatctgtaggatttgttttggtgtatacgctactcgtttgatcttttaacatttagtagtcatctctttccaaagagttttaggttgacattagaatcttttggggattatgtttgatagtgtgggtattatgcacatagtcaagcataagtagttagtcttagtaattttttatttgcttctatagagttgagaactcttaattgttttttcaatagccactaagagatcaagccatgttttacttcattttgaggttgtctttttctattggaatctaaccttcagttttctacttttcttagattttacatatagattttgagattcaaagaatattcttaattttattcccttggcgccaacttttaaggtaagctctagtttatacttgctcttaacatgctttcattataacttttagttgtctataattatctgatatcctataaattaataacattcatcctatttttggatcttgaatttgaagacattccaaatttgaaatccattttatgtattcgtcttagttcgaaaaatatctataacaaatcaatggcccaaatagaaaaaataagaagggaaaaacaaaaagtataagaatttaaattgaaagtttagaggcaatacctaattggaattgggttatcttgtagcgattaatatataaacgaaatccattatcttttatagtggggagtactattgttttttaattgcttgtatcatctatagaaggacaaaacaagcttttgtaggccttagcttagcgtataaggacaaacaaaattattttaatggtcaaactgtagtttttacctaacttgtaaagatttgattcttcaaattaccaagatgcaataaaaaagttaccatgctgaataatcaaaatgacaaaactgcaacagtaatggaggaattaaaaaatcccaagaacattcttgatgaacttttggctcaggaggaaacatattggcaacaaagatctcgagtggattggctacacagtggagatcaaaatataaagttttttttatgcacatgcttcttctcgcagatcaggcaataagattacatcactcattgacagtaatggagcagaaatctccttagaggctgaaatgactacaattatttctgcatattttgctgagttattcttagcttcttcggtggacattgaagctttaaattttcttacagatgcaattcccaccactattactgatgaaataaatgagtctctcctacttccctttactgctaatgaagtttttacttccttaaagtctatgagcccaggtaaaagctcaggaagtgatggtatgttggctatgttttatcaaaactattggcatattgtgggtaatacagtcattgaagtggttttagaagttttaaatgaaggtcataacatgaatttgatttaacacatcagtgatcactctcatccctcagattaaatcatcgtgtggtatgggtgacttttgtccaataagtttgtgcaactgcatatatgagctcatctcaaagatggtagttttaagatttaaggaagctctcccttttatagtatctgaaacataaattgctttcctttccaataggctcatcacaaacaacatcattgttgtttttgaagttgtccatcacatccaacataaaataaggggaaggaaaagttattcagcactgaagttggacatgagtaaagcgttcgagtagaaagggcatatctttgggcagttatgagaaaattaatggaatgtcacagcaaatggatagccttgatataaaattccccgtcatgtacaagtttctctttctcactcaatgatgaagtagtgggtcatgtgaagccaactagaggtctaagacaaggggatcttctattgccatatatcttttagatttgctatgagggactattgagattgctacaatatgaggaagcattatgaaatcttcaaggtctacatcttacaaaaagagcacattctgtctcacacttactctttgctaatgacaaccttttattttatgagaccactgaaatttctgctttggcaattaaaagagtcttgaacctataccattgagcttcaggataaatgctcaacaataaaaaattagtcatgtattttcccgtaaaactcttgaggctgcaaaaaatttattccatcaaactataaatatgccaattagtgagtgtcatgaaagatatcttggtctttcttcatacttaagctgagataaaaaggagtttcttagtaatatcaaggagcgtatttggaagctaatgcatgcttggaatgcaaattgttctccattggtggaaaagag

SEQ ID NO: 184128 - DNA, 1585 bp, Cannabis indica
aattatatgagactcgataattattatactttatcattccaaaaacatttcatacttttttcttccttaattagtacattgtattaataattgaagtcaattttaacttaccccttataattaatgattgaaaccccttccgtaacataataagttatctactaaataaatagtttgaagaaaaccaagtgtcaaaatagtcggaaatgtccataaattgttagttgagcatttgaaataatagattgaaaatgaagatacaatagttgtcaaaacttcaaattaaggacatggacacatgtcagtctttactgatatttcaatttatttctattcctaattttggtatatatgacgtcatttaatcgttgtacgcacatgtgaatttattccaaaaaaaaaaaaaaatataaagtgtgaatttaatggaaatttccatgatcctacgaattacaaatttaaatgaacattggactaaggttgttgtcgttgatggcttcccaccttttgtataattttttttctctcttttttttgttaaaattgccactttaattgacgagagataattattgttattattattagtaatttgttgttttgtgtggccatctttttggaggtggctggctaataaattttatggaagaaaagaaaaaaataagaagaaaagaaaaaaataataataataataaaaaaaaaaaagactctcctctgtccacctaaaatatcatgaataaagattgtgttgttgtgtgcctagtttgacttgcattatttttcccacttggtattgaaaatgggaagaaatgatctctctgtattttccatttgtaataaaattattttgatttaattaattattaatattatatttaagaacctattctatttattatattcacgcacatgcatacgtattccattccatcacaaatttatagctaactccaactcttacttataattatgaccctaccaataaaacaattatgagttaaaaacataaaaccctacaaaattattttatcacattactgtgtttcgtagtatttataagtaaataggatttttttttacaaaatatttatatatgatgtgttttttgaagaaaaaaaatcagacaaatcatatttattttaaaataaattaggtgtataacaatcattaccaataataatcaccactcaaatggtttagtagtggtatttagcaaggaaaaatgaaattatagtggtagtggtttcttgcttgatatatgttgaagtggtgcgttttattctaactcaaagtcacaattgtgtataattaattttaattatattctttttattgaagtgtttatatatattatattgtacaatttaggactccatcttaagattttcacacatactctcccatattttgtatgatcactttagctaatttggagtggttaattaatttcaattatactagggtttgcattcattaaatgcaatttaataacttcaaaacaaaacaaaaataccaataatattataaagcgtttagaatttagagtttaagatttaaagtagtctcttatgttttttttgttttg

SEQ ID NO: 184129 - DNA, 8586 bp, Cannabis indica
agtacatgtcaaaattcaagttaatttctaccattcatatagcataaagtacattacattattggccatattaagaattatatcaatcatgacagatcatttggcaaagtatcttcatgtgaaatgcaaagtcttacttttatcattatagtattaccacaaatcttatctactaaacaagtgtttatataaacatttaaagaaattgtcaaaattaaaaagaataaacatttaaaaaattgtacaattttctaaaagatgtcagaagtaataaatatcgaaataatataaaaataaaaactcggttacaatacaaaggaagaaaatttaactaattttttagttaaaaaaagaatgaaaaataaggaaaaatgggtatgggggagacatttttggattgagaatgatatgcagatcccatctttgtcttccaacgagaaccccgaagcaccctggaattcctcaaaggtcaaagcttttcttagctgatctgccacagggctttgccggttgccggtcaccggtcacattcctggcggtggagagttaattgttcaattctaaatcttgaatctgattcaacaaacgccattggaaggtgagtttgatcaatgcaggtagttatttgggattgtttggttgatgggaaaaatacagaagaaaaagaaaattgaaatatgggtttatgatatattcgcctttggcactgttaatttaattattgcaactgtttcaaaatctcttcttttgaaggaaaaaagataaaagtgaaatgacgtgaaaaaaagctgaattgttatttcaacttttctgggtcccactttaatcgtgttgcatattcgaaatctggtcacttttccttctctgaattctacattttctcaggaatcaaacaaactacattcatcaccacattgtgttttgttttgctttaatacgtttggatctagaaataaaaaagagaaaaaaaaaagaatcattttacaatttaacattaatgatctaggtagtggtacaacatttgacttatcgaagactttgacgattgagatggttttgttgaattcaattgaggtgaaaattaagttacaaaaagaaaacatggaattcaccattgcattttcttaatttattgagttttttttttatgcttttgttgtaatctttgtataaacttctggagatttgcaattagttgtctttttctttaaagctgtagcgagattatacagggccttgcacatattacacgtacatatataatgatacaaggtagcatttttttttcttctattcatacagttgtttattactgtttccttttttcctgttccatactaaagctgtagagttgggagtgtaatgattttggaagactagagaaagtggatggaagtacatttgtgaagaaaggtgcaagaagcaggtgttcgatggaggtagacatggattctcgagaattttgtgcaaatggggtatgcatgaaagcaacagaagttgaggtcaagctcgacgaaggaaatattcaggaggcagaatgttcattgagagaagggttatcactcaatttcgaggttgggtttttctttctctgtggatatgttcttgaaatgaacaaaaggcaaaacaaaatggatacttgatgattgtggaacctgacaatatgatcatctggatacttccattgtgatgaacagttttttttttgttttgttttccttaattttttttatctgtacagttcttagagataatgcttataaactacatggtatttattacaatgatgtttcataacagattatgataatgtacaggaagcaagagctcttctaggaaagttggagtatcaaagaggtaatgtggaaagtgctcttcgtgtgtttgatgggatcgatctccaagctgctatactgcgattacaaccttctcttgctgaaaaaccatcatctaagaagggccgctctcgttccgagtcacagcatgcagtctcgcagcatgctgctagtcttgttttggaagccatatacttaaaagccaagtctcatcaaaagcttggtagattgactggtaggaaattgctttaattaataagattatttggagatcaattgaaaatcttaattgctttttcctgttttttcttctctttcgtgttatgttgttttggagctcattgatttatgttttgcagaggctgctcaagaatgcaagagtgtgcttgatgcggtggaaaagatatttcaccaaggcatacctgatgtagaagtggataataagttgcaagaaatagtaagtaacgccgtagagctccttcccgagctttggaagcaggctggttgccttcaagaagctattgctgcttatagacgtgccctccttagtccctggaaccttgagaatgactgctgcacaagaattcagaaagcttttgcagtatttctactgtacagtggagtagaggccactccacccagtttaggtttccagatcgatagctcttatgtgcctaaaaataatttggaagaggcgatactgcttttaatggttcttgtgaagaaatatcaccttggtaagaccaaatgggatccatcagtgatggagcacctaacatttgcattatctgtatgcaaccaatcttcagttttggcaaatcaagttgaagagatcatgcctggtgtgtatcatcgtgttgaccgttggaattctttagctctttgttatagtggagcaggacaaaagaatgttgctttaaatcttttaaggaagtcgctacacaaacatgaacgaccagatgacctcatggccttgttattggccgccaagatctgcagtgaggattctcatctcgctgctgagggaatgggctatgcacagagggcaatcagtattgcacagcaagaggccgagcacttgaagggtgtcggtctccacatgctgggtctttgtctagggaagcacgctaaagtttgctcttctgattttgagaggtctcgaattcagtctgaagcattgaaaacattagatggagcaattgctttcgaacacaagagctcggaattgatttttgacttggcagttcagtatgccgaacatcgtaatctgaatgctgctttgcgatatgcaaaacaatttattgatgaaacagggggctctatgataaaaggttggagattgcttgctctcattttatctgctcaacaaagattttctgaggctgaagtggttacagatgctgctttagatgagactgcaaagtgggatcaaggaccgcttctcaggcttaaagcaaagctaaagatctcgcaatcacttcccatggatgctattgaaacttatcgctatctacttgctttggttcaagctcaaaggaagtcttttggccctttcagaattgatcctcaggttggagtctgaaccttctttttttaatcctcattcacactaaaataagtaacaaacacaatatagttaaagcagtattcttagtgatgaaagggctataatatatcatgcaacattttagaagatttttatttttaatcagacagagctgaattttcttcacatgtaactaaatggaggattagttgttcttttatccttttgtttaatcatttgtatcaattggtgtaatgtgtgaaggcattgaactcataaggaatgatgataagctagcattcgtatattagtagcatagtttaatgagtactcaacttgtttctttgtatatttttcctacctcgttttattcttttttacatattgtatattttccaatcaacctgtcctctaatattctttgctcttcttttgtgtagtggtagaatttcttgatttatagatttattttattcttttttaatgatagattgacgatgatacagtcaacgaaattgaagtatggcatggtttagcaaacttatactctagcctttcacactggaaggatgcagagatatgtttggggaaagccagacaacttaaagagtacactgcagaaacattgcacacagaaggcaagaactctatttttctcatttttttcttcattaaatttcctgagtcatatatatatataaaaatatatagtgctttgctctagtttcctaagattatgtttggaaagaagaatatgactgtgttggatggtacactattttaaatgtgttttagttatgaaattagagaacatattgagctaccaaataattcaccatttttataaacttaggatagtttaattccacccaatccgccatttttgtgtatgattagtgagataaaaattgtaattttgttttcatttttattcctcgtaattttaatgtttgcaaatggttaactcattctgttttttttttcttttattattattattgtttttgaacaaatgcattgctttgttaagtcacccatcaatgtcataccttgtttgatggacctgtatacatgtcactctcaacaaagctttcctcaatgttaggacaattaggcagttaggagttcgttagaactaactgtttaattagttaattgtccttaagcttagctgagttagttaagcttgtcttgatggttctgttattctattactgattgtatataagcttgtaattcacattcaagatcagtaatgaaatactatctttcaatgtctcttttgttcaccctttctctgtctttactctctctttcgttctctctctgtttcttgtaactctctcacaatgttcaatcaaaccacatataatgatctgtgttcccctgatatcactcatggcttcttggaaccaatggatttaattaaaatcattgtgtttgaactcctgtaaaactatagaatttcattcattaaaagttgtatgattcaacaccaattattgattaatctgatgtgatatttttctttgtgaatgactaggccttatgtatgaaagacgaggacaaatgcaggaagctcttggcacctactgtggtgctcttcttattgaccccagttatgttccttgccggatcttgattggttctcttatgtcaaagatgggatcagacgctttgcctgtggcaagaagcatgctttcagatgcattaaggatagatcctaccaatcgaaatgcttggtataacttgggaatggttcacagagacgatggaagaattgctgatgctacagactgcttccaagcagctgccatgctcgaggaatctgacccgatagaaagcttcagctcaacttgttgactggctttccctgcatattcacggcacaaatttctttaggatacccctacttctctggccatcatatctttaacctttacaaagtgaagtgaggcgtaatactcaagattccaattgattttattttccctaatcacaacacaaatcatcagaaggcacaaactgctcaccatattttgggaaatacagattacaaaacactggcaaaacgtagtttatgatggaatactgaaaagaaattaaattatagattatattattttttggggaggcgttgagagaaagtcatttaaagggcttatagcaatgtacttgtcaattttgctcagctgtgtaaagtttaattgttatttttttatttactgggccagtaatttttatggcttcgattatggtaagggctgctgaagttgtatttcaatttattcttcatttatgcttaaacagtatactggattcattaccaatagaatagaaagcaagaaaatgatgattaagtcaatttctgggttaaaatttaatttccacacacggatacgactgaattataaaacttcaactttaagggacaaacatcttcagtcttgcaaaagagttatttttgcaggacaaaccagtcccaaagtttatttattcaataattgcaacagaaacattttggaactgtttttctttctttttttttttaatcaataattggtcattaataataccatataaatgtagaaaattaaaaatagtagcgtatgcaggcacataatatttaatacgactaactaaaatactagttcaaatcatttagtgattgtccaacaataatacagccacacaacaaaatgcttggattaaatttccactagttcctcagccagaccaaacaaatcaacattaatgttgctaagtccaatgttttaggggatcggcctagaagttacaaacgggatatcaaaaggggaaccgagactaagccctcttcacccatgactggctggaacaaatccaactccccgtaacgctcaagcacacgcatcctacatccttcggcagccatcaaaccagttgagtaggcaccatgaacagacccaggatagtccatacttgtagcttccccagcaaagaataggttatctactgggacccttagcctctcatacaggtcatgagctttgcccacttcatcatagctataggatccaagtgaattaatgtctgtgccccaatgagaaacaagatagtgaatctgcataaataatataagaacaaataagttaaaaaagaattaaaatattcttgtgataaaaaaccgaaaagaagcctttcaaagaaactgaatagaagtataaagctcaccgggtcagaagcatcagggaggatcttcttgagttgtgtaaaagcaaaatctgcagctgcttcatcagacattttctctatgtctttggcaagctgccccgcaggcatatacacaaggacgttatgattagtggccttgtggagatttagaaagtagctgcacccataagatgtctctgcaaccactcccaagaactcaacatttggccagaacaccttttcaaaatgtagaactatcttgttctcaatccccacaccaagatcagcaatggctgcttccttccagtctggcagctttggttcaaattttatgacatttgctttcagaacaccaagaggaatagcaatcacagcagcatctgccacaaagtagtcccattttctacggttaccttcactccattgtaacgccttgctatttttgttaccctgaagacaggaatggtaaatgctgcttaaaccagaacacaaagtatgaaacaaaaatgctaactcaatggatctgaaaaattatacctgtggctcaagcggacatcaagacctttggcaagtgtgttaacaacaggaagatagcctctcaccatcagtccatgaccaccaggaagcaattcctcctgtgcatatgataaagaacatacaaagttagtgcataaaataaaaaaaagccgcttagtaaaaacattggtacattttgcaaaaacttgatccaaactgaacataaaaaagaaacaaaaaaaaaacatagtctaacttctacgctatcaaaattaatctcccactcaaaccatttagtaatttacttttggtgaaagatgtatttgtgtttcttcatctctttgttgcgtaagtatgcaacaaaagtaacaccatattattaacaagcacagttcacaaaatatatttgccagctcaatgttaccacattctttagtttagtttgttttagaaccgaatcttgaaaagtattaagcatattctgcaaattcttgtatcttgcaaacagtaacagcatgcatattctcttatctaaactgtagcgttagaatgagcttcaaagtttaaaactatttgtgctaggtttgagaagtactgaattaacctcaagttgggctagtcttaaggtaatatcccaccaaaacaaagaaaacaaaaatattgttttctttttttgcagcattttttttttacagttaatacaaaagaattgtcacagttacataaaataaaatctctaatccacaatttgctataaaattagagatcaaccataatttgaattactaattaatcagaggcttgcctgatcccaagatttaagtgaaattgtatcagcatctgcagcaaaccagccctccattctgcacaaataccattgaagtaccttatgggctaatccctccaacctgcatcaacaaaacaatgctagattttaagaaatcacaaacacattaataaatttctttgtagcatcaattgcagtttgctcactttaagtccggtctcctttcaaacacaattgagaaagcctgtcgaatagacaagtcttcggtgatttcttgtcttactttatctgtctgcattatgtaaaagtaacaaaatcaaaagatgcccaccaagtttcataaacaactccagagaccaaataataatgtacagtattccaattatattcccactagtaactattctaatgaccaagtaattgagacagattacatgcctcttttaaaatttcttcaaattcctcaccaactcttgtgaccaaatcttgtggaacttgatttccatccatatcaaagagtgcatagctgcaaaatatgaaaacgccttataagtcgataaatattcaactaagagtggtaggcaacattacacaacagaaagaaactccagcagactagcaatgctggatttgaaaaaataatccgaaaaatattaaaaacttcagattaaaaaataattgatctacacattgcaagagcttgtggatat

SEQ ID NO: 184130 - DNA, 1180 bp, Cannabis indica
caaaaagaaatcatttaactattggataaagaatcacctaaaggtgggattattttggagaattgtactaattggactccaacatgtccaaaaactagaatacaaagttgggaaacaccatataccaaaagtgtttcgtaaatagaaaagtctcacatactctttgagtaaattacgttaaactaggttattttcactctgtatttgtttctccactcctcatgattttgcagctaccatcaaaatcaagttttcatttatattagggatatttacatcatatattcaaatttttaactttttttattgcagggcgaaatttttttcaaaattactgtgtaagttttataactgtgttaagtttttactgttgtttaatggttattttttatttgttctactattgtttttagttgttctattttgtgttccactattgttttataaagatataatatttttgaaaaaaaaaaattgtatagcagtatttttgtaaaagttaactcaaattctaatatttttgtaaattttactttattttattctcgagacaaaaaaaaggtggcacactttaaaacatgttataatatatgcaaacatgtccaatctatgtccgaatttgacaaaacaaaaaattatgatcttaaaaaaaatgtcaaatttcatgtgtaaacaatttttatgcccgaacattatttttagtgtataatattagaataataaaaatacttaatggaataataaaaccaacaaaataaaaactatgcaaaaataatacaatagcaaaataagagatgaaataatgttacaattattcaaaacaaaagtcacacacgaaatagagagaacacaaagatcaattacaaagagacaagagatgtgagagcaaactcttaacaccacatacactttaagtgtatatatagtaagggagccaccaaattttaatttgtcaaaaaacttatttctatcactacaagcacttagaaaaatgaaagaaatggaaagaattttctgaaattataaagcctaaagagtctttttagccaggtctcttctcgtaataaaaactagtagtgaatctataagcctctatttatagtgtttaagtaaccacaattttaaaattcaaactctaaatctcatgttaccaacacttaaatgagtgacataaatagga

SEQ ID NO: 184131 - DNA, 4173 bp, Cannabis indica
aatattaacggtaacaaaatctgctgattttattcttcagaatattctttattctttgatccagatgcttctagacctttcatttcaacatgccccctcaagctgagctgtggagagggcgagacagtcagcttgttcttcaagtattgaaaggttgaatacggcagtgacttagttaaaatatcagcagtttgctcttcggttgggacatatctcacttctatgtctttgtttaaaactttatctctgatgaagtgcacatctatttctatgtgctttgtccttgcatgaaaaacagggttggaagctaattgtctagcacctgaattgtcgcaccatatgattgttggtttggtgtggtttatgccgatttcagtgagcaatgactgaagccaaattatctcagtgtaggtttgagctaaggctctatattcgactacagtactagatcgagcgactgattttgttttcttgaactccaactaattagatttgagccgaagtagacacagtatcctgaagtggattttcggtcatcaagtgagctggcccaatctgaatcacagtaactttcaatggcagaactggttgattttacaaattggatgccttcaccaattgtccctgctatatacctcaatattcttttgcaagctaaccaatgtttcttggtgggagcttgaaggaattgactgagtttgtttaccgaataggcaatgtcgggtctgctgagtgtaagatattgcagtgcaccaataacgctcctatattgagtcatatcttcaaaaggttcactgtcaagaagatgaagtttgttactttgaatcatgggagttgggtaaggtttggccccaagcatgtgagtctttttgagaagatcaagagagtatttggtttgtgacaagtgtagaccatcttgccccctagttgtctcaaaaccaaggaagtaatttaccgaaccaagagacttgagagcaaattgagagttcaattgccggatgatgtgcttgacttgagaagaattgttgccggtaagaagtatgtcatcaacatagacgagaacatagaggcgagcatccccatgacagtaataaaagagagagttatcggagacagagttcttgaatccaagagtaatgaaggagatgcgaagagtgtcaaaccaggctcgcgaagcttgtttaaggtcgtagatagctcgatgaagcttgcagacgtggtgaggaaatttgggatcaatgtaaccttcgggttgtgacatgtaaacctcttcattcaaggtgccattgagaaaggcattattgatgccgatttgttgaatgtcccaatcaaaagagacagcaagagatagaatgactcggatggtggatggcttcactacaggactaaatgtttcgaaaaaatcaacaccaggaagctgttggaaaccttttgctacgagacgcgctttgcgtcgttcaaccgagccatcagagtggaatttaattcgaaaaatccatttgttgacaacaatgtgcatgtgaggcaagcgggggacaagagtgtatgtttgtttttgattaaggcaaggtgctcaatgtccatagcatttttccaaactggaatggcaagggcagcagccacagagtcgggtatggtgagggtgagagcaggaagttgaggttctttgagaagtgaggcaaggtaagttttgggtttgtatattcccgccttggatcgtgtgatcatggggtgactcggggcaggggcagcaggggagggtaggtgaggtgagggaggggaaagaggcagaggtggtaggtggatttctgatgggatagtggagaaagaacttactgcttgtgaacttgtaggctgatcggaggaggatgctgaacccgaagatggtgatgaaggatttggtgcaggacttgttgagcaatgaggagtatcggtggtgagccttggtgtgctgtcatcataagaggtagctgtaacaaaaggtaaccaatgattataattaaagttagagtgagaatatgtgaactgtgatgttgtggactggtttaggccaaaaccagtggcgaatggaaattccatttcattgaatgacacactgtgggcgatgtaaattcaaccacttggatgaaggcaacgatagcctttgtgattggggctgtagcctaggaagacacacttggctgaccgaaaagcaaatttgtgattgttgtagtcacggagatgaggaaagcaagcacaaccaaacactttcaaaaatttcagattcggagtcacttcaatttttctagaggagactggtgagctaaagttggtgtggagaggtgattaattagaaaagtggctgtggtgaaggcatcacaccaaaatctaagaggcatggaggcttgtgctagtagtgtgagtcccatttcaatgatgtggcggtgcttccgttcggatttaccattttgggggtgtgtgtgtggacaaggatgacgaaagtgaactcctatagactgaagaaaaggagctaaactcctatactctcctccccaatcggactgaagggttttaattttggcatcaaacttcctttcaacgaatttttgaaagttgatgaaggtttgtttgacatcagactttaattttaaaggaaaaatccatgtaaagttgctatggtcatctatgaagtgaacatagtacctataaccctctcttgattcgattggagatggaccccaaacatcggaatgaatgagttcaagcggtgagtgactgactgagttggatgcactgtagtgtttgtatttggattttcctatgtgacaagcattgcaaaattttggattagattgaagagagactttttcatttgttaacatgtgtttcattacattgatatttgggtggcccaacctcatgtgccatacattgatatcataattaaaagaagactcggcaaacagtgaatgaacaagttttggactggacacaggactcgatttaactttgtttgaactagactgaggaagcttggcagatttgctgctcttggaggaaaataaacaacatgaattgaaaggagatttggacttgaatgatgacagtggcacaccaagtcttagccgatacaaaccattgctaagcattccctgcagcagctccgccttcgtggttagatccttcacaacacagcgatcaatataaaattcaacagatacagcattgtctttggttaattgagagatagataacaaatttttagtgatagctggaacacaaagaatatttttcaagttcaagtgtttattggaattgtgtatgaaactagatccaacgtgagtagcaggaagaggaaaaccattgccaatgagtaagtgtgtgatacctttccgatctgatttttgttgcagatttgaaggctcagctgtgacatggttggtggcaccactgtcgatgtaccacgcattgtcactgttgttctcagttgctgtgaagtaagcttgttgatcgttggaagagttgttttgattgttatttccctgctggtatgattgctgctgctgattggttgtttgtgattgaaagttgggatcaaaccgatggtaacatttagcaattgtatgacctattttgttgcacagttgacaggtaggtcgattgttgttggttcttcctctcccacgtcctcttccacggttggagaaagagcggtttgagaactgattgggagcagcgggttgacctccaagtgtgagattccttcgcatttgagcggcaagattggcagtgggattaaagtcaccattggtgttgttgtgttgttccagacgaatttcatggctttgtagcatatactgcacttcctgcaatgtgatggagtcatgtttagaggttaaattgaccaccacagattcatattcatgacctagtcctcccaaaatgtacagaatcaagtcatcatctgaaagaagttgtcctgcagcagagagaccgtcagaaatatttttcattttgagaatatagtcatgtatagtgagacttcccttttttagagactgaagctggaaacgaagttgtaggatcttgctttggagctggtggtgtaaagtcggtcaaggatgacccagagttcatgagacgattggcagccaacaacatgtcaacatagattcagagatggagtttagtaaa

SEQ ID NO: 184132 - DNA, 1865 bp, Cannabis indica
aaaaaaaaaaaacaaaattactgctaaaatatagcatcttgtaaaaaaaaaaaagttattctaagtgtcaaaaggttatttaaattttgtcactaaaaattgatctaattttagatcacaattcacaaatgacatgattttgaatcacaataaatgcactatttttatagttatttttatatcatttttaatattttattattaaacttagttattgcattacatgtacattttatatttattttttattgaaacacaatgctaaaaattaatgcaaatataatacaaaattattttttttgccaaatatataacacaatttttatatggagatgatcttatctaagtagaaaataaatcaagagcaaattgtataaaaaattacatttgattataacaaaaataaatccgaattgtattggatagccatcataaatatgttttaaagaaaagttttaagctttactaaattaaattttatttgacaattttgttttggtcagatttttaattgattatttggtgcataagctaagtccaaattaaataaaagaaacattttcagtactcaaaattttaactttataaatggcacagacctaatgaatttttttagcggcataagtacttaatgttaaaaaacctgtaatttttgtttaattccgataatatgaactccattagtatctttaatttataaccaggcttaatttctgaatttgtagaaagaagattttagaaataactgatactgtaagttgctgtcctgacctaataatttaaaatgtgggcctcacatgtatcatgtttaagaaactaacgaagttcatcttgatggaattggatgaaaattacaattttattaatattaagtacttatgccgctaaaaaaaattattttgtttataccagtttcaaattcaaaattttaactatttatcatgaatatgcgtttgacttcttaaatttgttaaatgacaattctggcctagtattacaaaacaaaacaaattgacacttgaaatttaattttagatgtcaaacaaatttttaataggattaaatataaaattgtcgttgaaaaatttagataaaaatatcattttttagagggaaaccgaggtaggttaaaataacaaaagtaacaatattatacaaataattgaagattttttccatttataaaagtccattgtctatcctaaggacatgcacagatacaccaggataactagacaacaaaatcttaatattagaaaaaataaacctcaaaattgagagttgtgacttccgacccaccaatacagtacctacaaaataaagaaaaaaaattaattaatattaaatatttgataaaatataaaattttatataaaaattgccacacataataatctaatgtaaagactaggacttatatgttcttgtctccattgttgaaggtaactacaatacatttaatgtgttttaattagaccatattgaccttacaaatcaaaactgctttacaaaactaaaactatccatactggccttagaaaaataaaactagccgtactgactttataaaaccaaaactagccatactggccttataaaaaaaatctagtcatattagctttacgaaattaaaattagtcagctgtataaaacaaaactagccaacattagccgtacaaaataaaactagctacattgattttataaaataaaattaaagaccaacttgaccataaataacaactaaaaacccaaacatttttcttccacttttgttttcttaaacccaaagatctatgaattaaaccatgtttgattaaccaaacaaacaaacggccctctatcttttttttctctctctctct

SEQ ID NO: 184133 - DNA, 2475 bp, Cannabis indica
aaattaaaacagagataagttagggattatgcggcgggagaagcatttctattaaggtatgtaaccattacatatatactcttgaaatagaaaaatgtcttaaataggatttttttaaataaaaaaaataaaaaacatcataaaaatttactaaaataaaaaatataagtggaatagtgtgtaatgtgtatagtaaatataaaattaataaatcgaaaataagtgattaaatatatttttttcaaagtaattacgtgtgattattttcataaaaaggaaaataactcactaatttaatcaataaaaaacttaaaaaaataaaattattttaatgatagtagttacgtttttaaattttaaatatatatttttatatcgggatgaatatctattttctcttgttccgattttaacttaggtatgaacgtttaaatctatatttgctttggctcccaaaattcaacccccgccccacaccctattagaggcggcatgtaccgaacccacagtataattgtcattcctagaagaactatctaccaaaaaagatgtatgaaaatgaaatcttatggaaaataaccctttcttttcagaacttttatgtactttatttttatttttattgcgagagagaacaaaaaagaaaaaaaagaactttagtgaacctaattagacaatgtttaataaactcacatgcatataatattggccagtagtttttgtatttggcaaataattgtaatcagtgaattacacatgtaaaatcatatttgctcttgattatcaaaaagaaaataaattactgacatgcttatctttctaacctgcaaaacacagacccaccgttttctgtctatgggtttctttttggttttctcttctcatcccttctatgcagagtaaagcatttatttaatagttgtttagtattcacaacaatatgtcaatagctcagcgttttgtatcccaacaatgaattgttatattacatgtgtgtctagaatagagcaaaatcttatcctactaaatgaaacttttcatgggcgatttgaaccttattgcctctcaggatgagaaacaaggggtagtaaggttatggatagcgatacgaagatactaagagaggttctccgctgcacggggagtgttgacctgggctacgtggggtgccccttttcacttggcagaataatagattcaatggagatttgaccagagaacgattggaccgggcggtggcgtcggctgagtgggtaattcggttccctaatgcaaaagtcactaatgctcctataacaatctcagatcacgcgtttatcctggtagatacgggggagggtgggagtaatagattcctgccttttaaattttttgaagcttggggaagagatccttcttgtgaggacactatagctcgggcgtgggacaaggaaaacggttgcaaatcgtttggaaaaagattaaatgagaccagaagtgtcctgcagaaatggagaaaaaataattttggggattgtgataaagagatcaagcagattgaagaaagactcctatggatccaaggacaaccgctgaatgaaaccctatctcttgaagaaaaagagctcagattaaaaatcaatgagctatggattagaaaagagagtatctggcgccagaagtcaagagaattatggcttgaagcgggggacagaaactccaaattctttcacgcatctacggtcattagaagacagagaaatagaatttgggagatcacttcttctagtggagtgcggttgagagatgaaagaaggattggaaaggctttcaatgagttctttcaagagctttactcgtctgagatcccgagtatccctaatgatttccatagtttattcattacccaagtctcggccgaggaaaatagcatgataaaggctattccttctcaagaagaaattataaatacagtggcggctcttcatcctctaaaggctccaggccctgatgggttttcgggatgcttctatcgacagtattggaagatagttggggagagtgtaatcaatctggtccagggtttcttctctcacggaagattggacgggaatctaaactatacttacttatgtctcatcccaaaatcggaagtggcggatagtgtggagaaatttagacctattagcctttgtaatttcgcttacaagatcatagcgaaaattctggcaactaggctaaggttagtcatggataaactggtgtctccccttcaatcggcctttatcccggggaggtggattgcggaatcgtccatcctcacccaggaattgtacatactatcaagaagaagaaggggaaaggtgggctcatggcccttaagctagatatgcacaaggcctatgacagaattgagtggattttccttgagaaggtgcttcgtgctaatggttttgatactccagtttgtgatcttttaatgacatgcgtgacgac

SEQ ID NO: 184134 - DNA, 2349 bp, Cannabis indica
actttcttgtttagatttttttattttttcaacattaattgatttaggtttcttgttaatttgtatttggaataattgccttcattaatttatgattgtttatgtttataatagttccacacaattaggtggttcagtcttgtgaactttgttagattcttatttgggcacctaaatattttgcattgattttcaggaatttaagcatggaaagtaattgcaaatttgtagaaattaaatcccagaattttgaaatttgagttcatatgatatgtatatagggttttgagttcatttgattctgtagttttctttagcatttttctcacttcttgaaacttagtaaaagctttatgatccattttgctgactgaccatgttcaattgtgtataattttaccctagttccaagtcttgttagaaactatggtggttatggtgtttctaatcattcttctttatagaactttacaattctttttctttcttttggtgataatggagagacattaattgcccgagaaatttaccaaactaacaatgtgaaatactaaattttgccaaataacctcacttaatttactctatgtgattatgatggtcacatagtgtaattctatagtcgttttgcgattataatggtcgtttatggccgcacagtgtaatatggtcatttttgcgaccatagttattttcttaattgccccccacgaagagtatttaatggttttttaacttcttcctttttgattatatggtattgacaatacttaaatttgcaggtttatgaactcaacatcttgagtcaagaggtctcttgagtgagtaataggttttgggtataaagatttagaatggcagatgaagtttctagcttttggggccctgttacatccactgattggtgtgagaaaaactatatgcattcttcttatgttgcagagtttttcaacaccatatcgaacatcccgtgcgttgttttagcactctttggtcttgtaaatgctcttagacagcgttttgagaagaggtttagtgttctgcatctatctaatatgacacttgccattgggagcatggtgtaccatgctactttgcaacgtgtgtaagtatcttctttgctttttattttaatatgttaaccttgaccgggttttgttagtttctacattttgtttactattgatgtttgaaactttgctttttctctcatccctagtatatagataggaagttgttccatgtgtctagcatctaaattttatttttatctaacaatttgaagcttcttttgcttttgaagttgattagcttagctcgatagcctaattatgcctttcgttaatctgtttttcacttttcatgatctttttctgccaaatgccctttcagagtttatatgaaatgcctctctataacttgtttatgctacaaacatgaaatgttgtgctctcttctgcaaacattttcaagcccaaaacctttcttgagattccaaagcactgatcatctgattataatttacttgatttttttgtgaactttggaagtaatgcttgtacccattttctctgttttccgatgaagctttggaagtaaaatcgttcttacagttgaaacagattgtagcttaaattgtaacctcggaacataatctttgcctactttctctattttcagacagcagcaaggagatgaaaccccaatggtatgggaaatgctgttatatatctacatcctctactcaccagattggcattaccgaagcacaatgcccaccttcctgtttctctacggtgctgcatttgctgttttccattcactcgttcggtttggaatgggcttcaaggttcattacatgatcctctgtcttctgtgcatcccacggatgtacaagtactacatccacacaacagatgcacacgcgaaatggctagcaaagctgtacttggggacgatactcgtaggaagtttttgttggctcttcgaccgagttttctgcaagaacatctcgttttggtacattaacccgcaaggtcacgctctgtggcatgtcttgatgggtttcaattcttatttcgccaacactttcttgatgttctgtcgcgcccaacaactgggttggaatccgaaagtagtccagtgcttgggttttcttccttatgttaaggtacagaaaccaaagacacagtgagtaaaaaaaaaaaaaccaaaaacaaaaaaaaacgaagaaagtaaaagaacttttgagttagtgaaaatttagtcagtgcaggaaaagaagctttcttttaatttttattttttttgtttttctacttactcttctttcactttcttccctactcc

SEQ ID NO: 184135 - DNA, 8635 bp, Cannabis indica
tcaccaagttttatctcaaaaacaatcttaattgttaatataacataacccttcagttgagtacctacagttataaaagattgatgtttgtatctagaaaaaacaaagtaaatgtcattacaagagtttgaaactactaataatgtaccatttcccttgctttccttctaagaagttggcataactactacctattcaagattataaaagaaaatatcaacaaccattgtagttagtattggtacttttataattttcccaaaaatttctagacaatatttacattgcattccttgcctacttccttttccccacaaccaacttacttttccttcttgttctacctgacttctgtaatcgtgtttgttttcattctaagggtactgttgcagtattgttgatcaaacatgctttcatttttcttgaatgcacatgtcaacattgccaagattgtcaaaatgcatgtttgagaagttcctgtcctagaaaagaatcttggtaataatgtaatggcactggtgtagtgcaggtttaccaacactaatacagtttaatacctatatgttgagatgggtaaagagtattgttggcaagaattttagccaaaacatttgtgatcatgtttcaaactttttgatgatcccactccgatatttcagatgcttgtgatattgtttgcagaatagaattgtgttacataaattttgttatgaaattaaaaagatatcgaaaaaaatttataaaacagtataatcctcctttaattgcgaaaacttggaataatttttgtttatacaatctctaatatattgttagcattgataactcgttcttctatgttctttttcttatgatgtttaattcaattctaccatccatatgtgaccttaatttatagtaagtaaacattacaagtaaggatatatctagaaaaagatattcaaactttagaacatttgagaacaaaattgcttcactggatggataaagaagttctagaactgaatgtggtgattatgaaaattgtcaaaatgatgaagaatggatatccgaaaaatgactaaattgttaaatcttttgagtggtttccatgtccctattatacgacataacataagtatgctgttgcttgtcatccagaatactgtgaaaaatatgccaaggcagaagacattggagctgctgcagaggacaaatcgagcgatgaggaggaactgagtgacaacgagtctgattccggtgatgatcaagttgttggccaagcagatccctaaaatatgaggggtttctgttctctctgtatctgtacattatgttttagccatcgtaaaattcatctgaaactccatttaagactgtacatttggtagggggaaaaatttccccacccctctttatttccttcttccactgtaaataaagtatgttccagattgcaatctttgttatgtctcttaaatttagtgttatcgcattgtgtgatagatatgacactacattatgcaatgcaatttcttttggtctttcggccatacaagcagatattatccttccaagtgaaaatgtttaaacatctacactcacactctaatatgtttatatacatatatttatgtattagctttgtatttcttggagagacgtaaaatgcaccatcttcaaaattaaaagcagtccaaaaaatatatcttacaaaaagataatgtggaatgtagcatttgttgctcagaaattccattccattgtagtcattgtctactgtttactgaaatctactctttttaaaatgaatgtttactgaaatctacttttgctcgacaagaaatgtttatctggaccttttcgattacatcaaatgaccgatccaagtgaaaaaaatacactacactacagcttgagcatctgagaaaattgctatacttgaccaactattatgaactgcccgatgcaaggctagaagaattgcttgtacttcagattccttagctgaatttgccttttatctaatttgaatttgtcgcccaacttccataggattgattaaccatcacagctgcactaccagcatctccatctacccaggatgcatcagtcacgagaaggaattctatccaaaccagcgatttgtttaacaacgcttccatgaatttcttcagagactagtaaaaaggaccattaacttgacaactttccatcgaatctctgaattcattaaattccatccaaggaatccaaggctgattccacaaatcaatatgaactcccgttgcttccagagcacaacttccctgaaaaataatatttctcgttttgaagctacttttctggaagggggggagtcactacctttctgttccgtgcaccaaaagtttagaacaaatgcaatcttttttgaggatgcattagtctcattctcggccaagctcaaagctagcttagaaaggaatgtcttcaaatcttctgcgtccaagaccacctgatagtttcggttgacatatgttttcccatgatttgtgtgccaaaatctatccttgtccaaactacctatgcaccaatatttcacaccaccattgcatccaactctctgcatatttactgacatagcataaatagggagacttgctgccactgatttgatcattgttgtccttccagcaaaatacagaatgtgtaccagaattcgtaattttaaatttgtacatggtatccaactccaaacatgcattgacaataacttcgtagcaatttttgtcctaatgaacacagaacaagaataagaaaatcaaataactggatgagaatgaattatataagttttaccctccaatttttcatctcaaaccactatacacaaaattaaatattcatctttttttttatttaaaaatataaactcccatatttttttagtctattattgtcattatttgcactagaatagtagaattcagttggaaatgctctcaaagaaccacaactactccagctttaaagccatttcagcctgcaattcaagcaaagctttgcaagtgaagtctctttgttgacggtagttttggaaaactataaactctgacgattaatatgaagcatatctatacaaagagttgtaatttatgagggacaatgctaagaattccatgggaagaggcgattgtaacctacaaggcggataaaacagatccctaaactatattaacaatattggctaataattgcagttgggccaagaagggccaccaataatgaacacgaaaaaaaaaaggtagggaaagtaagaaaagtctccattacatcagtatcctattctttctaggtcatagatggcttggcctcctcttcccagaatctgtcctcaacctcttaactgggtttgcccaaccaacagaccctccacccccatttgaaggttgagcagactggttagcccaccctggagaatgagtggcttgttgagttagtcttgtgtctctggtaacggaaacagaaccggggcttttaataccacgagtcatgctggggggtgaaacagggccaaccgacccagtcctaaccttcgccagagacttttccctgtcttttcttttcttcttgcaaataacgagatccccaggatgagcaggacgaggagaatcatcttgctgaatttgctctctgccactgccactaccatgtctcagttctttctgtgacacaaggcttctcatcctggattcttcactattgtatacaggtcccctttgctgcggcttctgtagggggcttgggtcaggttccacctcatttatcatcttctgtctcttgcttaaaacagcagcagctggcctaggtgaaggagcagcagttgtggaaactgggctagaaaatgaaagagcacttctagcttctcgaaattctgtgtcatggaatgcaattttcaagatatcgaagaacaaatcatgtactttcctggcttcagttcgtacctgggcattagtaattacactattagagaccattatattcctgttctaggagaggtaggtaggtacatggatgaggatggctcaagaacgcaacaggcaaagtactgttctgattttgaattttacaaaatgattctaacactataaatattttattttaaaaatctgtggatcagtaacaacctcaagaggcgaatgcaattagtatgatcgtcctaaagtaaacagaaacacagaatttaaaaggcattacctcatgtgagaacgcataataatgcattgcacttctcaacatagactgcacatcaaataccagctccataacaccattatactctaacctctctatacgctgatcaatctttcttaaatccaaaagattattcccagatccagttgtgtagccagtattctcaatccgcttccacaaatctgtaagcaaaggtacaatttgaggtccttccttatctattctcctttgaagcttgcttatcacattcttgcactgcattcagagaagtttagttcagtccacataatagaaacatgaagagtaatcgcaatggaaaacaatgttcatacggacaatatttcccacaataatcaaattcaccttgtacaccatatccaccaagatacactttacctcagggaatcagtaaatttacaatatccaaccaattaacaataattataaacacattaatcagtcgttgaccagaaatatgaactggggcaaagcagtcactaggctttccagaaaattaaccatgagtactcgacacacaaacaatatgaaatattccccctacttagcagctgaaaacagacacctcattcctcttcaagtatgtggttttcacaaggcaaagtcaacaatgctataatacgatgcatcatcagtacagaaagcaagaagctgcagaaaagagacgaagtgaacagtacatacccttctctggatgatctcaggcatcttagagcccaaaacagtagtaccgctagaatttccaacttttccatcccaattgtctctaagatgctcagtagcatcatctacagaagcagacatgttattcaatctgctactaccagacttgggagaagattttggtgaggcatgcaattttgctgtatttgctattctccttgaaggcagattccgcctagttttcaaggattcattttgttcatgcctcaaagaattggaatctgcataggatttgatgtccgggtcacctcgtaactgtgtcacattcttgtggtcctgaaatggcaacagtgatgaatctccacgttgaagagacaaatctccacggtgtagggaagatgtctcattactggatttctcttctggcctttccacattgtgacgggggcgaatacgaagactacgtttcctctttatcttgggctgtaaaacctgttcatcttcagcctcctcacgctcatgaatccaactcccagattgttggtgatccatgtgtgaatctccagatacagcaatttcaccctcctctaattcatctgtctgcaaaaattaaacagaatatgacatcaaagagacataaaaagcaaataattatgacaaataaaataaacacgatgaaaagttgcttacaagtcttttcgatgcagaaccgggtctactatctaacgctgatagtgacccaaatttctgcgaggaaactggagacactatccttgtcacttttcgagtgtctgaagatgaccctgaggagccagcttcttctactgtatggttaactctaacaccttctgaagttcgaggatactcaaatacaccatcacaagttggaccatcttcttctacttggtctttattacattcgggtgccgcagcagcaccaccaaattcatcatcctcaaactccccaatttctccttcttcttcatgcaaagaatatccatttctctcgtcagaacttgcttccgagtattcaccattgtcatcatctaattccttgtaatttggatgctttttccccttcggtcgtcccctcctcctctcagtttttggggatgaatcagagcccacttcattggatcccactccaacgttcccaccaaacaaaatgttctttgatggtctttttgataaatttgcaacggttgtattaacttcccgtgtaccaacacgaagccatttagggacctggtcataactagtcatttcctcaatccaatcaaattcttcatccatttgatcgaacaattcaacttcttcttcacttctagctatcatgcgattaacctcttgcaaggagggaacatcatgaacggtttcttgatatctctcctcgtcatgcaataatgtctccaatgtcatgcgtctctcttcatgagtggttctctggtcaaagcgaccagcatttataacctcatcagccatgtcaatcttatactgctgaatgttgtttctaatgaggctctcaatggatcccacataccgatccttaccggcaaggtcatcctctgaatcaactgtacctccatttctcagttcatcctctttttgatggctaggaattttgtcaacaactgcttccatatatatgactttgacttctcttgtttgtccaatacgatgggccctggctactgcctgttcttcatttttagggtttgggtcaggatcatatatgattactgtatcagcagactgaagattaagccctcgaccagcagcacgaatactaagcaagaagataaagcaatctgaaccagggctattaaagtccactatggctgattcacgatcttctaaactagttgtgccatcaattcgtctatatacaagtcttcgccactgcaagtattcctccaatatatcaaggagttttgtcatggtactgaagagaagtactcgatgtcctgttctctgaagtttgataaggattctatccataatccacagttttccacaagatcttacaatgaattccttggataagtcactgtaatatggataattaagcaatggatgattgcaggttttacgtagttccatacacctgttatttaacgttttatacaccttagctgtataaattggatttttttgaaccctccgcctctcatcttctggatcaactcgaatagtaccagtagatttaatccaatcataaatagcactctgaatagccgacattctacattttaatataattgaaacctgcaatacagaattgcaaatgagaaagaaccatgaaaccacataaagcacgtaactaaggaccacaacaaaagccaaccttcggggaagggaaccctcgacatcctcaacacgccgccggagcatgaatggttctaaaatttggtggagccgatggatgattatgactttcttttcagtctctaaccagtcatcttctgcattctgtgtaggagcttctctttgaaatggctttgagaaccaatcatgaaatgccttcctattatcaaacacttcagggagaagtagattcaaaagtgaccacaattccttcaaatcgttctgcaaaaaatcaaaaaacccgaaactcaaaagcagactaaaaagtgatcataaatccttcaaaaaaataatataacataacaaaagaacaaaagttgactataattgtaaacatggatgatactatcataattaaatgttgaaatagagaacgtatgtcacttctattactattactatcactaaataaccaattccgatctcaagcaaagccatattcacaactaatacttcctcattatataggtttcttttatctcattcactacgtccataaaaagaacacaatcttggaatttttaaagacccttggctaacaaatagcataattaaatcatcaacacgtggaaattttcgatgaatgaatgagtttctgtttaaatatggagctaatataattaaaaaatgcaactacaaacttaagcattgttgcattccataaacaaaacagtgacagcaataggcttattatctaacttgtatcaaacagctattagtacattttcgcgataattaaggagagaacattgaatcaattcacaatttaaataaacacagaaggcaaaattttgacaagctacttatctggtgcccagttaactataattattatttttggaaaaaaaagtgacagcaaaacaagattgatagacataagtttattattaaatcacaactcaaaatactaaacatttcagtatttgcatattttaatgtacctgtaatggtgtcccagtaagaagaagacgcctctgacaacgatacctatcaagatcgcgagctagaactgattccctatctttcatcctctgtgcttcatcaattataatgtacttccaatctattttagaaagctttgagcgatcatacatgatgaactcataagttgtcacaaggacattgaatttcatggcacagacctcctaatcaacgtaaagaaacctagttagcaaataatcagaaaaagaacaagaatatatccaaatcaaatatttcttacctgggaaaataattttgatctctgatctttgctaccaacataatatatgcaagacacagatggcaaccaggtatgcagctcactctgcaaatacacactgttaagcatgctagtaatggtaagaaaatatcaaaaccaacagagaatgagctc

SEQ ID NO: 184136 - DNA, 4470 bp, Cannabis indica
tttctgcatctacttgacgatgcctcctgccgagtatggaaaactcaagctgccaaggaccatctcggatcttcgcgtgcttaagtgggttttcctttttccatttttttaatccaataattatataagtccgtactagagttgaatcgagtcatcaaacttttacttttcgttaagtggtttcacttgcagatctcatctatacctttccatagatatggtgcggaagttaatttgtttgaaatcatgaattttgatgggaagtagctagcttggaataaagggcatagaaaatgaatgtttcatagatagcttcaggggaagggaagctatatcagttttgtaattttggatcacatacagcagagatgctgttataagtagatatatatttttatatttattcatgtacgcatacttttagaagggcatatacagattctcgttctccttatttgatttcaaagaattctatatttgattgctttccatgaatttgtgtctctctaagattactttttcaaaattctccagagataatcttgcaacgtattcaaaggagtttcctgcgcaattcattctgggttactgctccacgtatatcttcatgcagacctttatgattcctggaacaatttttatgtccttgctagctggagctctttttggtgttatcaaaggtcttttcttggttgtctttaatgccactgctggagcttgctcgtgctttttcttgtctaagttaataggaaggcctttagttagctggttgtggccagaaaagttgagatttttccaggcagaggtacttctattatctttagttttagttacacttcccatcgtttttttggcttgatctttaaacttaatttttgtggttctagattgcaaagcgcaaggaaaagcttcttaattacatgcttttcttgagggtaactccaacattgccaaacctttttatcaacttggcatccccaattgttgacataccgtttcacattttctttttggcaactttgattggtcttattccagcagcatatatcacagtcagggtaagtgtttgtcctattttttttcctccaataataattattatgtgcgaatctacttgcacaaatgcacatcttccgggaaaaagatagtgtagatagtagcatatgcttatgctggtttatgaagtttttacctggtcactttttttatcagtagtttttatttttagtgattacttggttctgcctcatgattttacttttaagtaaaaagtgtagtgttggtttgatttacataggccatcttatctagtcactcccccctttaagttagcaatgcaagttaacgtggtatttatatcaatagtctgattattcttacatttatattctcacgatctccctcctattgagtactacttcatttgtactattgggtgcacccgcttttggtggattaattgctgctgctactaggtgctgtgtactgtaaactgctgtactcatatgtggtttgcaacacttttaccttttaggaatagtagtaactttacaggttgtgaatgaagaaattatgttgaatggaaggacctacaagaagtttaattaggagaaccagattcgagtagtatcctgtccctcagattgtaatgtgaagagataattatcttaaaatgttgaacgtatattgcagattatggagactaggtgagagttatcatagtagtcaccctagcatgcatggtttgacagttgtgttttggtctcatgattcttaataaggtttgttttggtgtttgagctttctacgactgcaagaatcttgattgataatggaatatatgtgattaagttttatccttgaatgtgggaatgctcatgtactcgtgtctgcaaacttaatttgacaaatgattgaagctatagaatcatcctcaagctgtagaatgatagaagttctgagttctgaaccatgtgttagtgtaatttctgttgaagaaatcttaatctttatgaaattccttggcttgtgtagtggactagtaatttctagttaatatcttctcgtaggtcatttactgaaagaatccaattttattcaaataattaatttttgtttactatgtaagacaattttattatgtatcagttattattattattattgaaaatgatcaattacattatcctaaaaagcacttgtccactgtatttaaaagaaaaaaccattgttactacttgtacaagtaaaaaaaataaaaatcatatttgtttggatatggtacgttggtacgtgaaaatttaaatgaccgattgaagtagaaagatatcttaagaaataaaaattcaaatgagagttggaaatataccgtaattttgataccgatttgggtgtgtttctcaatcactaattttgatagatgaatagttctaaaacccattttaccaactctccaaacatttagagtgcataattcttactgtttcttgttatacatttggtgagtttaaatattctgtcattcgttggggactggataattcattttatgttcctgttggctgttggcgttctcgtcataatctcttaggtgcttgcagccttgttaaatttgtgatttgctttttgtacttggaagtcaagaatgtttacacagaagtcaagcttttctttctgcaatttatattaaacattgctcctctacatttctatgttagttttacttcaaatgtgttgacaattttccctgtgttagaaatactaaatttgtgcatgaatttttgttcaccatctattagcagctatgaactgaatttatgaattttgtttgtgatgtatgaaaatgttatgtttgatataaaagccaatttctttccgcagagactaatggttttcttcagattttataaaattgcttcattagctgcttagtgaagtttatatgaatttgctattggtcataacagatgctaaagttagtctcatagtacttaggtagtttttgccgattatgcacaacttagaacatcataagctgcactgtgcttgttgcgcttgtgcaggttggttttcagcgatgttaacctattgttaatttatgacacattttattgatatgtagagcaaaatgttaatctttgatacagatatagtgattttctcatggtattgatttggttgttaatcaggctggccttgctctcggggatctgaagtcagttaaagatctatatgattttaagacattgttcgtgcttttcctcatcggttccctcatcatatttcctacccttttgaagaggaagcgaatttatgaataagaacacactgtcaaagggggcttattatgtgcccctacacactaaattgtaagctctaacaattatatagattagttttatccaaaagattatattggaaattgtggtgtactaatatagttaatttcattcttttaatagaaagatgggttcatatacaaaactcagtgaagcatatttaagaattttgtaatgttatgcaccatcatcatgtacacaacaacaattcatgcttctttgttgtaatggaaaaaatgttattacggacagggttaatttggattgtatatttatttttgtgcttgtgctacctataacttgaagctaagcgtatgtattttataaaaatgtcgtggagcaaaataatcaattactaacaagggaatatgatactatgttgccaattttggaattttagtgaactcccatccataaatttgattacaattaggtcattggtgatttattatatttgggatttagctagaatttaagggctcgtttgctagatcgtataatgaccgtattgtattaaataataaataacactattttgggataaaatattgtattgtattaattattacgatcttatattttaagacaatgtaaatcatagtattcaatacgtaacaaatgatttgtattagcttgtattataatatttacaaagggctagggattgatcccgaaatcctagacttggattgagactcggaccctgacctcgacccatacccgagacccggaattgcgaccccgacttggacccaagaccaagaccaaagccctggcctaggacctagactcgaactcggacacaaaccctcaaacacggattgcgagccgaacctcggactcagaccgggacctcaaatgcggaccaagactcgaagttggacctggaccccaactgggagctgggacccggactcaaacttggacctcaaccccaaccccgaactcggacgtaaacctggaccttgcaccccagacccttaaccgaaccctggacttggacctagattgggaaccccaaaaccccacgccatgtccgggttaggctcaggcctggggtccgatgtttggggctgggtctaggtctggatcttggttcgagtttgagatcagtgttcaagaccgagtctcg

SEQ ID NO: 184137 - DNA, 2787 bp, Cannabis indica
tttttttgtggcttttctttaatctacttttttcgatcgactattttatttccttttagattggatatttataagtagtttttttttttaactttgataccgtggtagaattttataaggtgcatatgatcattgacggaggcgcatggaaactatgggggattgtagccctccctcaaatttttatttttatatatttgtcatgtataataaatgcaccaaaaaaattacatgtaggcatgaacaattagcccccctaaactaactttctcacaatttgctctcccagaatatgtacaatttctcctttcgtcattttatgaggttctatttcaaaattaattaaaaatgagaagtagctcatgcatgttacatacgatgttatatttttacaccttaataatgtgggaccctgacatccctccttaagatggtggctagttttcgctcaccaatcttggacagctcgttcgcaaagtgatacttttggcggctcacaacaaatcacaagcgattatttttggctcgtcttttttagactaagggcagttttagctcacaacgaatcacaagcaattttttttacctcgtctttttagaccagttgtagtttttttttttgactcggatacttatagatattttttgttacaagtgcagtattaaaaactgttgcaatgcaattttgttgtggtaaaaaattagtgagtttagtaaattatatagattctaatgaattgtgagaattgaattgtggtaaaaaaaaaatatctatgactaggtattattaaatattaaacaattcaaataaatattttattttatttattttactcatccatactaaataaattctcgaataattagtaattttgttttcttgaactttttacactatcaagttgtgtcctcgtggtatatgactcgttaataatactcctcaaaatataactttacagtaatgtggtccttctatcatattttattcaaaataactgtgaaacgagtaagttggatagtattgataaatagatgcaaaataaatatctttcaccttttttactttaataattgaaaaactaaaatcaaaagtataaattattatgaaaaagaaaatgtattttattatattatccattaacataaaaagagtgaagagtatttaatttatattcatttatcaattatcatccaccactttacttattttatgataaaaatgaatgaaatgtgatggaatgactatatatgttactctaaaagttatattttagagttattattatcaagtcgtaaactataggtggcacaacttggtagtgcaaaaattttaagggagaaaagtgataattatgcttgtttatcgcattttttgaaaactgatttaaaaatagattaatctaaagaaaatgtgtttagaaagtaaatgagacaagattttttacgtggttaaggtattaataagtctttatccacaagtcaatattattgagctatttggctatggagtgttttacacaagtgtcttcttgcccaaatttttaaacccaaaatttctaactctgaaaatgcaactctttgcatgaagggttcttggtctttttataggtgagtagtcggattctcgggctggtccagacttgctaggtttttctaaatggaaataagttctaagatttggcaaagtacaattgaatattaactattgggttgggtaggtgaggcccaattcggattgtgactgttgtccgttaggatcgtaccatttgatgatgacaactgggcatgcatcgccgttcgtgaagagtgatgtcagagtagtgggtttttgttctttctctcttcttactgctgaaaacaaaactagggttctaatgggttaatgttctaatttttttttacctaaaacaacaatggtggttaaggttctactcttctctaaacccagaaaaattatggctttctcatggtaaatattcatccaaaaaaccgagttactcaaacgcgaaaaaccaaccaagaaaactcactactctctcggtcaaaacttaagaacaaatccaaaaaatctcttggcccaaaaactcaccaaaccgaacaaagaacaataatattcaaacacaatatcatagaaatcaaaagttagggttatgagaaaacaaacagtgcaaagacaacacccaaaaatgttctcgaagttcacccaacaataactaattctctgtcaagctctcctcagagtagtcttatcttcattcatcaacatatcagctagtaaaggttacaactctactaactctctccttttacaaagttactaactctctttttctctcttttgcaaatacacattgaggatagcaacacaacaatgtgttatctctttctcacaatggctctttactggaaagctctctcaataggttcagtgacaatattgatctagagttataactggttgaaccctagtgattaaagtcgtaactaactgatttttgtaactgtctttttcttgatcttggaagagaaacactttgtacctatatttatcttgtgtttctgttttttgtaagttgtgttggtaaaaatgtcatttcatacctaatgattaataatatgatacttagattatataaagaaaaccgtagtaacaaacataatttgagaggaagccaaagactatcgtaatttcacaataatcggtagatacaataagtttcatataaaattacccaataaaggaatataattgatttttacatacaaaataattaaacaaaaaaaaaa

SEQ ID NO: 184138 - DNA, 3453 bp, Cannabis indica
gggctactatcctatgccatcaatttcacatatatgttcttgtgttcacgagttcgatatttggattaaatcattactaggttttatcccaacaaaagtttatgtagaaaataacaagaacacactaccgtaaacagtaaccccaagtcacagaatcactttgataagatggttttgttgttttattctataaaataaaacatacatagtggttaagtttgtattggaatataatttaatgactgaaatttcctcactctgcagtctggttgctgcaaacccccaacagaatgtggctacgggtacgtgaatgagacgatatggacgccaggaggagggttggcggggactattgccgactgcactagatggagcaacgatcaaggtcagctttgctttggttgcgactcttgcaaagctggtgtcctcggtagcatcaagaagagctggaggaaagtctctgttattaacattgtggtgcttatcctcctagtcatcttttatgtcattggctgtgcagcttttcgaaacaatcgcaggatcgacaatgaagaatccaccggtgaaactcggatgacaaaggcacaacctagtaggattcatttttaagtttgtaactgaacaagaattatgtacaaggttttggcaatcaatttataggagtggtatgatgtaatgtaatgatcatgtcaatgatttgtaatctaaacaggttgagatgcttttagtttgtcttcttttttcataacattatatgtcatgacatgattttccagttttgtttgtacatatccatatatgttgcataggttacatttggataactaaatatttacaaatgtcaatttaagtgttttaaatatttggaataaataggattttttccctgaacaaattgttgcaatatgatggtctatatttaacaattttaagttatctttagtcagcttattagcaattaagctacaaatattaactctaagaacccatatgcatattctcataatttatcattagactactatttatgtatttttttcttgaactcttgagttgggtcaaattaatgttgtattagtattacatcaacaaattgtttaaggaaatttgcagcacttaactgtagggggttatttgcagcgatttttatacttaacaaaaaaaaagttgggaggacaaaactctacaagaatcgtagttaaggggggcaaatcctgtttattcaaaatcaaaatccttgcacaacactagtttttcagattttcccatgtatgtatgcacaatagaaaagaattttgtacacaaacatgaaagaatctaatttcaattatttaatttgagagcaactggtcatttggcaagagaataaattagtcaattacagcatactaaaacagaaatgaatattcctgaaagtgtaaactatgttcacaaacttacatttgtgtaatgagttctggttgtataactgcctataacttcatccttcctcaataggtggtgtacctaaaactttagaaggaacctgcatactgaaattatttccataaacaaagaatcagcaactgatatatatgtgaagttaagtaaaatatatctttataaatctagcagaatatctaagaaaaaagagtaataaatcttactcggttccatcttcggctactgcagagtcactagttttacttttaactaccatgtgatcttcacggcatctttctggaagccatcttgctattgtgtactcataaacagtgaatttttcagtgcatgatggagttatagcattatcaccatttctactgacattaaggactaacaatgtcttgacaacaccaccacaaagccgagttgtgcaatgaatatcagaccaagtcctcaaccttgagtttccatgccagcaaccattttcttcttctggtgataaaacaagcacagcaaactcagaatggatcagagctggatggtgacggtaggcgacaaagtccacaccatatctaaccccagacatcacaacccaattcttcattcgaagatgcgaataagctttgtaaaaatcagggaaagtctctttcttggacttcatgtaaagccatagctgttcatcattcatcaagtgtttgtttcgtcaactatcatgaggcacttgagagaataatgaaggtaaaaagcttcctccatgcccagctgaaaccattgcttacttttctcagatgtagtaatgggtacaccaaaacatgagcgattaaggagatcggcttcttgtgcttctgtaccaagaagaacactgcagccacaaagtaatccttgagcctctgatttgattagagaagattgaagttgtaacactattttcgacatggggtcagcaagagctttggcttctgacccctttcctttccatcttggccccattaaaacctatcccaataccaaacaggaagaattgtttagatatgcatgacacaccttgacatgtgaaaatatccaatttagattcaatcttccacatcaaagaaaatggttcactttgtattcagcaatagagtacccaatttagataaaaaatgaactgttattttcatctaaaatctaaacaatgaatcattattggtcaaatcttgataagttcgtttcttttgaacaaacacaataatttaaaatacaagatggaatttcgtccaataattggtctgcattataaaattgaagtaactaagttgaaactgaggtgacagaaacaaattaaactgttttaaacaaatgaaattagtgtaattatgttataagaaagacaatacatttgatcatatcatgcttcaaactcaactagaaaaaaagaataaacaaataaattaataaatcaatgaactgaaaagtaaactacattcatactaagataagctgcctcagtctttgaggcattttataaaacattacaatttcatatctctttctgaggcattttatcaaacaactaatgtgcattaattttgagaaacagatataattatatcaaatgtaatatttcaaaatttaatttaaataaaacaaaactgaaacttaaaattaaataaacctaaaacaataaattcccaaaactcaaaacacaaatcaatcgtgtttttcatttaaattaaataccagattaaaaaacaaatgaatcgctagacttgtaagaacaaacccatattgaaaaatttaccaaataaaaagaacaagaagtatgctcagatgtttcatggttgttcggaggagatgcgtgaggatgaaagatgagtgcggcggaggacgactgcaaaggttgggcttgcgaggaggagagggtcccataatttgttttaagtagcttatttaattttggctaattagtatttatgcccctaaattttaacatgtactaaattatgtctctgaattttttaggctcttaaaaattctctctgaactaaa

SEQ ID NO: 184139 - DNA, 8152 bp, Cannabis indica
atactttttgaaataagttgtactgaatttttctatatatttataatatttttacttatgtttttctgtaactataaattaagtcattaaaaatatttaaagtatattaattaattattttttcttattttaaaacctcatattaaaatatattgatttaatttattttgtttatggtttttctttcaataatcttcattttgttttgatggtttttatgcgttttatgggtgtttttaattttgtgcatttttcggcttacgtgccatatttatggcttgtctctaattatttagggtagtttagtggtacatttaatgaataaaaaaagtaatttattttgtgctcttagcttctacattaacgatctttcagttttaacaaataaatattttaactttttatatttatagattgttttatattataatatggattattttacccttttctttcattttagctattaattttattaaattatgttgtaatagagttttatttattgttgttttgtaggcctattttgtggagggcttacgactacagagactttgccgataaggttaattcaaagattgtctcttctaatacatgttgttgcttggtgttgtttattttttcagctattaacaaaggaatggtgttttaatgagctgggtgtgttgtttgaggatgatatagctttattgtctaaatttctgggggcagttttgtcccatgtggcttgcgatatgaatttttgcagctcatggtttggcaaagcatgtccttcggttagacgatgagctatcctggtttgaggacgtgccaccaccaattttgaagtgtcgtgttgttaatcatgtgtgattttgatcaccgcgtcaaaaaaaattgagaaaagattaaaacaagaaaataaacaataaaaaaataaaataaggaagcaagatgcaagtaaattgatatgaaaattaacaaagatttaaagttaggattattgatttcaattgtatctatctattatggtctaacatgattcaatttctatgcaatagcaggtttactcaagtaatttataatcttctcagatatataaatttcaattatatgcaaattttctactttcgtgataaattaaacacaaaaatcctataagctatccaaaccacataggtactctcatcctatatcaaactttgctcctattttactatagcataattgacactcacttcttagatgtcgtatcaaaattataaacatttaattggtgattaagcaattaaaagtaattaagtacgaatgaaatagaatacatagaaaatcgaaaaaaattaaatcacattaaaacaataaatcgatgtcaaacaatattcatcaataccatgataaattgtttagctactcttattcatctaagaacttgacacataccaattaaaagcaaagaagaaaatagagaagaacagaatattgaaaactccgtcaaaaaagccttcgcggtcgtttctgctctctaatttttgtactctctgaatgcttcgtcaaatataagaaagttcacctctttttatagccaaaatacgataaaaatatctaaaaaaatataaatttttgaaattttcaagggacgggccgcagaataagaattgagtgtttaggcataacacccctaaatttgggcggcaagcctattgataatactttggccataactcttttaatattgttcaaaattggacgattcaagattttttggaaagttgaaagagagatctagaacttttaagctttgacattctctaaaatatgatctaaacatagttgaattcagacttgaattttgaattttattttcttgtaaaattttctctattttatagataaccattttctaaaatttcaccaatttatacattccaaggtcgacacctaaaaccaaagaaaataagcataattctattccaaaaagtgacaataaagaagaaaattagctctaacaatgacgtaaataataggctaaatatagcctaacagattggagacccaaagaggatataatgcctcgatgatgaagtcattttcctgtagctttttaacttcatctttcaatgcttgtagatccatttaaatctcaaagtttttgatatgaaccatgagatcttcttttcgagtgtacattttcaaatttggtatttttttacttggttggcaggggcaatgcatttaagcatgcagagaaaggcaattcttgagtcctgtcaagttccagatcagaaatctttgtgccaggaaagccttgtactaggctcttgagttgatccaattgtgtttgcactgcacgatcaactctggtcgtccctggtcaagctagcctttgttcagtcaaccgttattgtaggttgataggaggttggtcatttttggataagatgtttatgtctcaattagttcttcttcagtttaagtcatgcggaaggtattcttcctccctgggacccattctatcaaacacaaaattttgggccttgggttagaatttgtctgagcattttaggaaggaatgtcgttaatgcgctcggtgttgttattatgatttcttcggttggcgcgtgcatcagttgggtggctagtggcaccatcctcattcagatttgggtaagattccccactacgagaccgactttagtcttgcttgggtgggatatcttccctccttctttcatctctaggaaggtcctaaaactggcctatcctgccatatgccttatcaagcaggatttcttcatcatttggccaattagaaggcatcctttttgggaagcagttaggcccattaggcgtgaggtttgcccacggtccttaaggtgttgagtttccctcgagatgtaggtggctttttcctgaagggggtcccttacgagtgattgttcttccaaacgggatccaaccctttcatagagtcatctaattatcttattttcctccctattttggcagtttaactctacttgggtggcttgtaggattgtggctttttgatccatccattcccagaatttgcatctctgttgggcgaagcatcaaggtggttgaacatgattggttgggttcttaatcgtgggtagaacttggacattcgggtccatagacattggatctttggattcagttgacacacttctccttgtcagaaccatggtgattattaggtgcggaaggatgagatcttcattagagtttgaagctttcaatgaaaaaaccaaaatgttgtttggagaattggcaaactgactcgaatttcaataaattctaattaattaccaataaaaacttagaaatactaagtaaaagaacaacaaaaattatagaggttcagccctttaaatatttgtaatgacctactccctttaattgtattgatattgagataatgtcgtgcagattactaaggaagacaaagtgaattctagctacagctctcaagattcttacaaataatattgttcacaaaagtgctcttggagtcgagattatgatttcaagtccttgttccttgtgaatatgctcactatttataagatgtagggaagcacatttaaatatttgaaagataactaatacataaaatccctctttttttaggggagttatattctatttgaaactcctatacttttggactgaagagtttcagtatttgtaggatgatattggagatatttgcagagtttgttgaagaaaaaatcaaggcatgttaagtcctacccaacctttctgggaccctttacccctactggcgtgccgatagctagaccaggctctctttgagacttgactttttgatgagattacctaatgaagcaatcttgtaaggttcgtagatattttccctcctgaccatcagattggtaatccaaccaggtccatctaggaaggtaatatacatttgattgatatcagccttctgtgggaactgcccaacattctcctacccataaatctcacattgttacaagtgtctactaaattaggccatgtgtgattgccacattggattggtgaaagttgggataacacaaggtgactatttataacacgaaaccacgatctggggcattaaacgatcctacggtgttcctcattttggaagatgcacaacttaaatatgatggctgggagaactcgcaaacaagcacattttgaggtgacatttgggtactcgagtatccgcctgtcaccctacatttatggcattataatgattaagggcaagaaaaccaatcgacatcattaaaattgaggtgaaaagtgttcggtaaattttgatacgcaagtatacacaatcaaaacaagtagtataatgatacgtaaggtatcgttcccacgagaattgattattaaataccaattaattaattctttagttctatttatgaataataatttttggataaaaggtaaagaaaataaacaataacaaaattttagaaaaataacaataataaaaacaatgaaggattattatgatccccaactatcctttattttatttcataatgtaattacctactttctcttcttcctattaaattgataagttgagttaagaagtttataatttggttaagacttataaacccaatctatgtgaaaactttctatatttctatggtaattttaatcatacaaatagcattaaacatagcaactaataaaatcatacaaacaacctaggtatttttgtcctaaatcaatttgcatccatatcaatcagagcatattcaaatctcaccattcagaattttgacttgaatttataaataacaattaaagttgatcagtcaataattataaaaattaaaacagattgaaaaattgaaaaaagagaagaagtagaagttgaataaatcacatcaattcataaaataaactcaagtggttcacataataatccttaaaagaacttaaccactaaaatacattctaaaataaataaaatttattgacaaacataaatgatagagatggaagtggaagaacattgtttggagtccttcaccggtgctttctactccttactctccttctacactcagaatcctctcaatttttgaatggtgttcaagctttgccatcagccccctttaagtagagccaacaattgaagtttcccattttattctcactaaggccacagccttgcttgcaatttcccattttctgtactaatttttgcagtttcccatttttaatttcctactgcaacgaccaaataaaaacaaaatccaagcataaatatgcacaataaaataatacaaatactaaaacacaccctattagactctaaagaaagcattaaaataaccttaacaaaaagacgttgattagactggctaactcttatataacacctagccaattcgagcggctaagaactcgacgtgcgataagaacgttatacttcatacccttcgagagcaatcgaagagtcaaataattaatacaagtcccacgtcaaaatcctttgacctgaaccttgggggtaaatgtaagacctattttttaccatatatgaaaccccatgtggcagagagagactcattcataggcatattagcatcccttgtcgatttaatccactcctagaatctacaagtgatgagagatccagaagtagccttccctttgctaaggaaaataatagaggaggcttctagttgtccaggaggtgccaagcccccagattacaggtcttccaggacagtgagcctaacatagtaacatagattccaaagcatattactatacatgaccataacaacacaagattagtatcattataaagccatacttgacccattcaccaaggaagagaaaaagttatggctatgcactgtcacatcaattgcatatgggacaaatcttgtctcaccaaacacttaccacggaggcttggcaacacttaaagactagaagttcacgcacctctttacctcctatcacctttcttttttaataccttgaagtacaataggaaagagggctttcggactcacacacaaaaagtgagcttttatattgtaacttgaacattctctaatcaagagaacattccaatcataaataaaaagtgactcgtggactacagttcattaacactggccccacgtaaaaatcctatctttatttttcttaatcatctttatgaacagttatttagtggttgtcaaaaatctcgatcaacaggcctcttttaacggtaatagtctactctcctttttgttgtattactaatgaaagaatattaagatcacaaggtccgaccatgtgagttttcttaatatctctagaaaggttacaaatattttcaaagtattttctctgttgtaagtccttaaaaggagaaagtccccctccatggtcaattgacctactatttatagagaaagtaatgcattaagtcctaaaataataggagaaagattagggtggatttgaatgtgaattctactatttcctcattttgttaaatcaaatttcatgaaaacagggattttatattggtcatatttttgtgggagtgattaaggaaagtatcttaaatatcttcagcgatttttctaattgccaaatcacattatgcaggtgaagtcttaaacttattcggatgttttagcattatcagtcgtgatcagtacaaagtaatgttatatttcgtccagagttaattttccttgccacgtgttaatttgcttagtgccacatcattactataaattttaaaataacaattacttaccatggtataatttaaagttcataaaagtcattcctttccttgtgtagatatgcctaattgatcaccaatcccgaatagacgaaccaacattcaaaatctgatacaaattctcaaaacaagagatcacttaccactaacggaatattgtgtaatagtcaggttcatttccatatataataataataatatttttttaaaaagaaaataatattaattataaatagaaactttaacagcgaattgttcattcaatttaaagacatgactcagtctccaaaacaagtaaacctaataagagaaagaaataacaataactaatataaagctcctcagacatttcattgtcaagataagcaacagttttattagcaaaactttaaccatctcagacaaaagagtgaactttgttgatttataaatcctcggaacacacataggtctaatatatacattggaattaattaacgagagtattgaataatagaactgagcttgatcagtactgtacacgtgtacatgaggaaaagggaagataaagtgatgagatgagcattgttattgggcactagtggtgtttggtaccactaatgccttttagcatttcttgtgatgagcattgctattgggcatcagtggtgcctagcacccttaagacgtgtcgtcttgcggtttgctaacgatatttcttaaaaactattatattaaattatatgggacccaatactaaattagaccaatagcaatattgacacgtaagagagtattttgcatcatataccttttagtatttctcgtgatgagatatatgtggacaaatgaggatatatataataataatttaattaaatgatgtcatcagacaaacaggagcaagtactactcacacacaaaaagtaagtaaaatccattccgtatttacttgtatggtcctgtcaataaataatatgtgcaccagtttaagggatattcataatcgcaatcacgtactctccaaaatccaaattggaatgttgcaagatcttcctatcttctcaacttatacgtacaacccaaacaaatgactgtctctctactacataaacctatgctaccaccgacttaaaagttaaaacccaattcatttggtatcttctcaactccacttacattttcttgttcttgttaccattacataccggtgtttgcagtgtgggtagtgcagtttttgaccattttttcaaactaacccgcacatgcagttttccaatttcccaaactgcacccgcactgcgagactaaaaaaccgcaaaaaccacaccgtaaaacatggtgaggtgcggtgtaatttttgcggtttctgcggttttgactatcaccaaataatta

SEQ ID NO: 184140 - DNA, 7372 bp, Cannabis indica
aatctggaataatttttctgtttccatgctgctcttttttcaatccagttcgttcgcgtcacttttattggtcctctgcaggaagtgaagctatgtttacagaccttggtcatttctccgcgacatcaatcagggtatgcataaccaatggctgcaaaagtgaaattccattattttctaatcatatggacaaaatttgatgaacctgtgaagaaagactttaaccagtaatgccttctattttttttttaatattatcactttttgaattagttggcagataagtttgaattttgacctctagatgatgttttctgttaatttaaaaaaatgtatgttcatctagatcagggcaatctatcaaggttgacattaaaacatatagaagctagcattaattgtccctcacgtcttgttcagttccacttttgtgtcagatttgtgaggttatttgtataggtttgctgtcaagaattgaatcaatcatgcatttttgctatggcatccgagacttcaccatcatacccaagagtcttataattttcttctcttggttatttacatcttattctatgactgtggcttaagccttcaacataaaagcaaactggttaatgagctatgttttcatattcccttatttatatttttttttcggataagagaaaagttgggtatcttacttggaaattatactgctggagatttgaagtgtgatcatcgactagatctgcaattggccaattctcttttaatcccaagcttgagtatcatatctagcggcttcacgatagataaatactttttaggagtctggaccgttcttttgagttagaagttgtgacgggtttttcattgccattttttttttctcaggtctgttttgtaagtcatatattgctgtgaataattccctaaagcatgctgatattgtgcaggttgcattttcatgtattatttatccatgtttggtacttcaatacatggggcaagctgcatttctttccaaaaacttatcggcagcacctctgagcttttacgcttctattcctggtatgcatacaacccgcctaaactttctgagtaacagctctatttgaagaccatagatgttatcagatagttttttacatgattatcttttgatagtgttttcttattgcttgctctcttttcttttatgccaacgtacatacaagattgagagagaaaatcactgtcatggaaaaaaaacatatcagacatttgtctttgtttcattatgataattcccctaaaagcataattattttgtttacagaatgttcttgccatgtttgtagatcccttcttttggccaatttttggtgtggcaactctggctgggattgttgctagccaggcagttatctccaccacattaatgattatcaaagagtgtgacgcgtttggatgtttccctcgtatcaagattgttcataccaggagatggcttcctggtcaagtatacattccagagataaactggatcctcatggttctcagtctattagtcacactgggttttcgaaatacaaatcatataggaaatgcttatggtaagtttttctttccttgttaatctattttgtacatatttttgtttgttcctggactgagtgttgctgttgtaatttcaggcattgcatacatgacgatgacaatcgtgacaacgtgtttggcatcacttgtcattaaccttgcttggcaaaagtctgtggtgctttcacttttattcagtgtgctatttggatcagttgagatcatttacttctcgtcttcttgtatgagaatccctaaaggtggatgggtacctcttctgttctctgcaatattcttgttcattatgtacgtgtggtattatgggtcatggaagaaatattcacaagaccttcataacaagctctccatgaggtggatcctcacgctaggtcctagtctcgggatcattaaagttcctggaatcggtctcatctacacagaactagccacaggagtcccagcaacatttactcacttcttaaccaccttaccagctttttaccaagtcgttgtattcgtctgtattaaaactgttcctgtatctcatgtattccacaaagaaaggtttctcattggtcggattggtcccaaatcctacaggctgtaccgctgcatcattcgaaatggttataaagacatatgtaaaaatgaagaagagttcgaaagcgaactagtgatgagcatagcagagttcatccaaatggaggcagagggcactggggcagtggatggctcagtggatggtcgtatggcagttgtgcggacatctgaaaagttcggtacaagattagtggtatcaacaccgtcaagtcctggagtaagcaacagtatcaatcaaacatcggtgattttaagtggctacaagtcacctacactacagaaattgcaggctagttacgagcaagaatattcacctcagctcacctttaggagggggttacgattcgagttactaaatactaagtacaaggatcctcgtgtgaaagaagagctgttggaactcgttgaagccaagcgtgctggggtaacatacgttataggccactcgcatataaaagcacggtcaaattcatcgtttctacaccagtttgcgattaatatagcctactctttcctcagaaagaactgcagatcccctgctgtggccttaaatattcctcatatttgtctaattgaggtgggtatgaactactgtgtctagaactctattgcaaatggttactagtttctccacaatttcatggcagaccgaccgatttcacatagagattctctgtgctcaagctcaccaatcacaaacaatcacctccaggcttcaaggacacttctttattttgtgacatgaatctttgttttgtcatataactctcaaatttaggtgtgattccctcgcttggaaatgaagttttgacccttttttcttttctttctttgggtttgtttgtagaataataataaattaaaagttaattaaagtaccaattaagttgcaataccttaatttctgcatatgtgagtgtgaaaatgttgaatttattcccaatctcatacatacttgagttaaacaagagatctaatttaaaaacattaaaaaagggcatacaaaacaaaatatttgatcaacatatcaatttttagacataataattttacatgagaagggatatttacaacttggcaaactgaaatgacaattatgaaaggaatacacccaagtggtaatattctattccattctattctattctatatctataccaaccaaaaaaaaaatctttttatttcatttgagtagaaatgcatccacttaatctgccctaaatcaagagctaaaatttaattaagaaaaagaaaatcaaatgagaaaagaggctcttaaaataagattggtgaaagaaagaacaaaaaagattcaatttttaagtttcaatcattacataattcaataatgaaacatataataaagctaaagttcatacatttatgtatgtgtaattatatattggaaaaaaatcaaaacccaattgcccaattacagaacaagtggaaaaacgatatatcctagaaaatccaaaaacctcatttttatttttcagaccacaccaacaacaactctcccagaaaatatcccattattttctttcttcccaaacagcttttacttgactcggccgtcaacccaagtgggaacgctttttctgagctgcttagttgatgtaaaagccaactcggaagctttaagaatcggttactgagtcactgactcggtcctaatcgagctccagtatgttgagttcttcttgctctcaggcccttctccgccgcccttttcttcctccctcaaccccaattactagggttcctaatcgacccagagatagatttccaattacccggagctttcggatctctgaaccccatttcagtcctctgaagaaggtaataatttaaggtttcattgttgctaaagctcaattttggtttaaacaaaattcttgtgaaaaataaaaataaaaatcaatactttatgctgttttattcataaccaaaagattaatatgattagagtgttgattatacaacttgtaggacttgattctcattttccaaagaaaggtagaaagaaatcgttagttcttatgtaaatttcactaaaaaaaaattgaatctttacttatcaggaatggaaaagaatttcatgttttagacaagaggattcttcatcagaaacccagaaatctgcatacattgaacacactactacgcctgaggaagtcattaaatctgagaccacccagaaatctgaatatattgaacactcttgtccaccttcaaatgcagtcagaagagattttccattaagtcttggagaggtaataaggcggttttatgttacaagtaatttctgttagtgtctttagccttttatttatatgtaatgagattttctgccatatgaatgctgatgaaattcaagttattagttcagactctcaaagcatttgctgttgtctcttcaattcttatcacttattttgatatctgataggaattttgatagaccccaacattagtatggtgaggttgagtatagcaaataagagagatgtgattaagtgtattgaggagagaagggtatgctatgtgttgagtaaaactctttgcatcaaaggggcctaagggctcccatagcttgtaattggttttctcgtatattcaatatcaacttccacattctactccattattcgactactgtttcactgatatttctgctatggcttaaagaatttggcagcagcgtcttatcaaagtttgaatgctactagcatcaacctaaattagagtctcgaatttaaacatattgattgagcttcttagcttaatatcttattgttgtaaactaagttaacactgtgcatttagtattagcttgtgttttgttatgctgtaatgtaaagacttgtaatgaatattgatcttattaatcatatgtaagtatgcattttcaataggtttccagaccattataaattgttcaattctttctgtataggagtaatgtgtattaaccagctcatggtgtgagtgatacattaattcattgattatgaagtgctagatataatagtactcttcttctatttttggaaatgtcagcaaaaacactagttcggagaagaaaattaatttgattatgcaacaaagttgtcgtcgatatggttattattaataattaaagaattttcattatgctaaattgctttcgctgactcgcttcattgcattttagcttgcaaatgtagttttcaaatcaatagagaagcgatggactgtaccgtggacagcagagaccataatgcaggcaagtactttccaccttaactatattttagaaatcattttgaaattccataaacaagttcttgctgctttcaaatcgaaaacttgagcttttagaataaattagaacaatttgtttcagtggtcataccacacagctaaaaaatcctagatttatgaaaacgatttgaatgttggtgcaggttatgcttctttgggttgctgcattctgttttataggatcttcggttgctccaatagcgacccatatggcaggtctcagtagggaatccctaacacttcgagggcaagcatttttcagtctcttaactgatgtaactgaagggcttgctggaatcatgattcttcatcgctgcttgtctcggtttcgtcccctcccaccagattggtttagatttagcttcaaaggaaactggtacatcgatgttgctttgggatgcctcatgtttccccttgtcaacgggctctcacatttcaatctcaaactcttgccactttttccatccacacccgtcactctatcaagcgttgaacagtcagtagtggcatgcgatcgagtagcaatggcactgtatgcaatagtagtctcagtttgcgctcctgtatgggaagagatcgtctttaggggctttcttctcccatctttgaccaagtacatgccagtgtggtgtgcaattctggtgagctcagtagtctttgccatggcacatttcaacgtacaaaagatgctcccgcttatctttctcggggttgtgatgggtgctgtcttcgctcgctcaagaaatctacttccatcaatgctcttgcatagcctttggaatagctttgtgtttctagacctaatgaagtaaagctgctgctactgctgaacatattacttgccttattttttcggtgatcgtcgagcccattttcgggtcagattcgtggcacaacctgcacagtatcccgagccttacgatctcctcataaacccggctgcaatctgatcggtaaacatcctaaggatgaagtatataacttactgaatgcattaaaattgatgaagaaactcagtatttcatcagaagaatcagttggcagtgttgatgttcatgtctttgataaattatataacatagcaagtgaaagggacagagatagagaaggatagaatagtttttgtaaatgattattttcatgttgatcttatcttttcaagccaccattattacaaagctcttgtagttgttgttccataagtccctcccccttgtttaattatttatttttcttttcaattaagattctcttatgaaaatagtacacaaaaacatagagattaacttaaaatgatcaataaaacaagagatgcatgacttgtgttgtgtttgccactgaaaaaactgaataaataaaaataatattttgatgtttttgtaaaaaaaatttgtctaatggtatgttaaagtttgtgccaaatttgataggtgttaaaagttaggccgaattaggtacaagatataaatttaacatataattagatatagtgttaaatttaacatataattaatgcacttttttatttacatttattatttagtattaatgatttgttttaatacacttttataattataatattgctattatttttttaaaaaactatatttaatttattaattattattagtgactataatgtattagagtataattgtaaaaagtaaaatgctaaaaggtatcagaggtgcttactgtctagtactcttctcgttgttatattgttattggtacaattaaatatcggatctcacataatgtaatatgataacatttaaagaatatagttaattaatcgtaagacaccacctctaaaaatagtgtccaataactatgcttttgcaaaaaatttcaaaatatagaatttatcaattttttataccaaatttaacacattttttttacc

SEQ ID NO: 184141 - DNA, 1613 bp, Cannabis indica
ttttttaaaaaaaaataagatgagagagttattagagagagagtgaaagaaataaattattaaggaatttatgcataaagcccaattttgaattatgctcttaattaggaaactaatatgttaattaacatttttggttagtgaaatttgatcaaataaaattactaattacttttagataagcttctcttctcgttctcagcacagaagcatacgtagagagaagacagattgaaattgaaacttgaaagcgaagacgtggagctataagataaactaaactattacgatgcggttgagtctacgataaacattgtggttcgcgtgtactaattggttaggtagcaggtttgatgatgtgtcgatgttacattggctacctatataattagagatgacgtgttttctgacgtgggtataacttattggcgcggttagtaggtataatttgagtaattcatctcctaattaatatttaataatatatatattttgttaactgtttttattggcctatggaatagctgtgttcgattcatttttttcttctcattttcaaaagaagatatgaaaatagccaccaaagatgactatcattcaaaaaaaaattttaaaacctgtgcattcattgatgtactataacaagtaagcatacaagaatttttcaatgtccaaataacttccttatctaagcttaaagtgtacttagctagttaatgagcgacgatatttacctcttgagtgacgtagtaaacagtagcagaaaaaaaaaataaaaatagcaagaaattaatgtgagaaataaaaaatgaagattagtaatggttgattatttgacactatcaactaaaaccttacaattcgattctatataacatattgaaaaataattttttagataccagttgagggcttgttgaagagagtgggcttccattagtagtggtaaaaatactccaggccacggaatggaagttgcagctattatgtctctattattctcccttactataaactcaagtcccattttatattttttagcatcttgagtcgcattgatatttaacttcaagagacctataggtggcgatacacattgtgatgagaaaagtttagttaattgcactaaggatgatgggaaagtcatgttatgcagctggtactaatgaaagtaggtcattgtccagtgtagcactgtgttaggatctatgattttctgatggtgaagcacttcattcctgcaatgccataatttccacaacaagcaaagagaaaactagaagtctctagtagggaagtggttagaaatcatatgcattatatcaacacatgatattaaactgtatttattgatataatcataaaatgtagttaattagtttccataccttctggattgcaaagcaaccaaatagtgcatgtgctagggtctcttcatcacagtggcagcgacaacaagctgaattggtaatgatttttcggtgttgaagcttgaatccagctggaaaagcatcgaggtaagccttctaaacaaagtgtttgactttggaaggtattggtagatggcaaagagatttccatcatttttgttgtgaaaatgtattggaagagaa

SEQ ID NO: 184142 - DNA, 1592 bp, Cannabis indica
tatatatatatataaagaaaactaccaaagcagcttttgtgaaaaacagaaccagctttaataaatgtcacacatctcataattttgaagttattattatgcgtccattttattaaggtgacaatagttttgaagtcactctattttgtatttctagtgtcatatacatctcatacgtgtgtttgttgcgtataaatattggcatagtgattataaagttagtacacagtatttgtgcactatatttgctatttggtgatggtgccccccacttttcctctccaatatatttatatgtcattataattaacgtagtctttttcttttggtttcacttttccaatgtttcgaatagcttcggttatttcgaggtgcttcttcgcatcctgccttcccgcatttgcaattgcaagcttctctcggggcaagtactttaccgccaaacttagcagaaaactggactcatataaatctttctatcagaaaactggactcataggataagcttttctaggaggtgaaatagtagatatatgtcattaaaaatcaagataaaatggctacaggcatgtacaggttttctatgcatgttaggattttttgcagaaaaataatttgagaaattcttactcacaccctgttttttgtgttcaaaggaatagaaacaacagttaaagctttattatatgtagtcaaatctcaaatgtactgtcatattacaaaattggtaagtaagatactagtttctaaatctgtcgcatcatatgccaacgaaaggaaaaaaaaaacacatctgatttctcatcgaaatggcaaaaattgcttcctttgatttctctgtgaacctaccaactataataactgttgttccaatagagtcacatcataacagtagtctatacaaaaatctttcacggttattcctccctcctaagcattgtcgcaatgatgaatgggtgatgggggcagtgtctctatatccatatctgcaacagtaaaatcaatcttcttctcaacagggtagttcatcattgtactaaacttccactttgactgacaaaaaaaaaaagacagaaaggggcttgagaccaggtcctattattaacatgtcacaaaatctagaaagcagtcgtatcttatttttgaaccttaggcggtgtgctgcttctatgcacttcagttgaacctacggagtagtacattgatagtaatttcttgtgatcaagttccagtgcagtgttttctgcagaaagattgttgacctgtgcaccatagctccatatcagtttataactagggatctacaaacaacaaataaaagaaaacggagaggcagagagtaaaggcaaaatttccacagtagggagtggttctaaggcctatcttgtctcaccaattcttcagctttacaaaggctcattttcagatgctccttctcagtctctactatcttcaactgagcagctattgacatgactttttgagtcgatggctttaaactacaaataatagcaaaattaatatgaaaaacgattcataaggataattatacaaactcacttattatagagggacttacgaattccacattt

SEQ ID NO: 184143 - DNA, 8001 bp, Cannabis indica
tttttccttcttcttcttctccaatcaagccacataattttggatcaagccctatcccctttctacgacattaatcattgtaatgtcgtttgtggtaaaattctctttctgaggtagcattcatgtttctctccttcaaatcagttcaaacctttacggaaattttttcatttaattctctaattctttgttcatttaataactatctcttcttccttttggtttcataaaaataaaaaacagagcaccgctgagttcgatttgaggatatatcaatggcagatcaacctcaaaagccaccgctacagaaaccaccgggctatagagacccaactacgacgccgggaaagcccccgatgagcagaccgccgcctcgaaaaccagtgttaccggcttcttttcaccacacgaaacggcgtcggaattggtgtcgtacttgctgttgcttcttctttgttttcctacttctcctaatcttagtcctcgccatggccggtgggctcttctacctctggttcgacccgaagctacccgtcttccacctccagtcgtttcgggtacccaaattcaatgtcacggtcaagtccgacgggacttatctcgacgcacataccgtgactcggatcgaggtgaagaacccaaatagtaaattggagattttctatggtaaaacccaggtgagtgttacggcagggggagaggacaccttgtttgggtcgcaacaagttagtgggttccttcaggggaagaagaacacgacgagtttgaagattgagacggcggtgaagaaccaattggtggacgatgggttagggacgaagcttaaaaatggtttcaaacacaagggtttggtggtggacgtggaagctcgaactcgggtcgggtttatcgttcaaggattgaaggttgggactgtggaagtggatgcattgtgtggtggagtgagcttgaagaagcttgacagcggtgacatgcccaagtgctctatcaatttgttcaaatggtattattaaccaaaacaaaaacaccaaaacttttcttaaattttactttttaatattatattaatttattggtgttgattcttttctctactttttttttacctctctttttatttgtgatttgggtttaagaatttaatgttaattatatcaagtaagtagtgcttttgtttaaaaataatcaatcatggttaaatgattgcttataaaataatcaattacgcttaaaacataagggtaatcattattacactcttgggtaatcataaccatttaaaactaatatgtgtagtgttcacattaagatctgaaaactttggcgtttacatataatctacacatagttatctttcatattataatgattaataatttaaatagtctattgccttgtgagtcatatataaatggggttgatttctatttattttctatttatttaatataaaaagttattttgaatgcaggatcaacttacattattgatatatggcattatggttcacattcacatatggaggctgttaatagaagaagagtataatgtataaagtacataattatatatatcattttgttttggagcttcaattttcggctggcatttgtacctatgcaaaccccgggttgttgctagttttattacaaatatttatgttataaacctatacaacatattcttcacttgggaaaatcaaaaggataaaaatatattgtaattaaaagtgggattggatttgtttatgtattgaattttggtggttgaacttgaattggtaaattattataggttttttttttctttaacatagtaagtgtaagattcttatagtggttgtgaggttttaagtggggctcttagatcttgccagcttgacatatctttagacaagagggaaagataattaattatacgaatcttaaattagtgagaaattagatgtaatgtaacatctcattactatgtttaaatacacaattattttattttattttattaaaaaaattcttttgtagaataaggtgttacatattattcgttgggttggaaatgaagtggggtgattaccaagagtgtctgcctcgtaaagaaaaaagagtcggtggacagtgaactttgctttgtagaatagattaattaggagatctttgaaaggatcttcttaacttatccattctattatatatgcaaaatagcaaaggctttttaatttaatcatatgcttttgattttaactgaaaatcttatcacagactcgcaattcataatgaaaaataattaaattggaccatgcatgcatgtgtgctttgatgtgatgtctcccaactattttgtcattacctttatttattttcctctatttgatgcgataatggttttgttcatcttcatgtcatgtcgatgatttacattgtgttagggtagagtttagcgttagcttgagttaatgtgaaaagatagcaatgtaatagttagttatgatagagaataattagtattggatgtaggataggataggaggctcatcatctcctcttacaatttggtgtcttattttctgtcaaacttataaaatttaagcaatgccaattaaaggtgttaaatggccctcaatttcaaaagttagacatggaatatgtcaccaaaatgaagggaagcaggggcaaacctatgtatagctaagaggtggccatatacatgtaaaaaaaaaattacctcatatattattttttattttatttttctttttaaatgttcgatttgtgttatatgagttgttatatagatttaggctaatactttattagtcactatgtaaatttcggtaaacatataataaaaactattttaaagtataaaaataaaaaaaaaattaaaaattattatttattttatttttaaaatgtctttaactattgtggctcctccgagtatcgtctcaagcctattagaagcctaaggcaaaatttcaaaataagacattaaaaaaaatttaataaatatttaaacattaaacataataggacttttaaggttaggttgggtcttgtcttgagaactaaagttccattattatttttttgttgggttgttcattagacacactacctgaggcctcccctcctaaatgaaaatggagtgaaaaagccaaaataattgggagtataaaaaaaatgagaaaattacaatgtagactcattttactttatttgttttaatttttacttctattttcgtattttttaagatatatccacttttatagatgatgtctccattaaaccccttaaattaatgtaaattatatactagacttaagtagagagtaggagtgtattaggcaacccactcataaaagtgggtatattataataaaatataatataagagtattttttatcaatggatataaaaataattattttttaatttatcccaaaaaataaggggccttttgggctgagaggcatgagtttttctattccaaaagttgtttcacaaagaaggagcgacataacagtgttagtttctaagagcctgtaacaggtaagcagatacaattgaaattttaccattcgaatcattgccctgaaggctttcctactttcaaaatggcttttcaactgtgtccgtgtcctgataatacaacctattcagcttgcgaagctcccactccccattgtctatagtagtaaatttgccatagtcaaagagcttggagtaagaacctcattcaaagttgggcaaaaaacagtaccatgagccaccgacgaatctttccagacattaatatctctcccatcaacaaatagcaaacacccttccttagaacctcttttgcctaccacattcttacaaaactaagaatcagagttcttgtagttgcaatgaaaaaaataagtactcttaaggtatttgacagttgcaacataagaattgatctttattaatgaatttctatccctattttattaaaaatgctcaattcatctttatagtttttcgaaagcctagctcttgtgagacttgaggaggcaaagtttatcccacgttttgagaacaaatcacggttctctttctagttccttcaaaaaaaatttgaaccatgccatcaattttgaacgccaactattgaattttttttataatttgcataaaataaattgagaagaacaaaccaactgatataataagcgttacatagaataaattcagatggacaaaatacatgaaccaataaaaaatgggacaaaatataaaagctaaaatgttacatattcataactttatatcaaaaaaagaaaaagattataaagtttttttataaggtaagaaattataaagttaggaggagggaagtgctcaagctcaagtggtcaaatggtaggagtataatatacatacagaatattcaaaagtacaacagggccccacaaacctaccaatcaccggtcgaaattcttcaccactcaactctcatcagaaccgtatgctgattgactgaaatatgtcattaaaatcaagggttaagaattcatctcagtcttgcagaaccaggttcacataaaaaggaaaagcgaaattattttcctttgctcctctcctcttttcttttttgtttgcttcctcagatttccttcttcttctttctttttccctgtgtctccctcctatccctcgaaagttctttcttttagatccgtaacgatctttgacattcaaccatggcatcaaagcggatcttgaaggagctcaaggatctccagaaagacccgcctacatcttgcagcgctggtattttcttgagtctttacctttgctctttgttttcctagccctttccaatacatgatctgtagttttttgttcttttgagcatctgggtattcataaaaagtcgtgtattctggatgtaagtgtaaatatatgtgctttatatttttgcgggtatttttgtatatgccgtatgaggaatgacgacggtgttatggttccttactaggtttggtgcaaagggttagctcaaatgggtcttgtttaattatttatttaaggagatattttatatattatatttttttggaagttgtacgagcattcatgatgattatgtaatattttgtataatttacgtacaatttttgtaagacctgcaaacaaatttgttgcttgaagggagctatttttacggggttgtgtaaatgcttgaaatgccatgtgaatttgttggtgcaatatagtagcagttatacttacatatataaatttgcttaacacgtttagtcatgtgcactcctaaatgaattgggtttgagataagcgttggttttggtgacaggccctgtagctgaagacatgtttcactggcaagcgacgataatgggtcccccagatagtccttatgcagggggagtctttctagtgaccattcatttccctcctgattatccatttaaaccaccaaaggtatggggtcatgtgccattatttattatccatttcaagaatttatcatgtttcttgattgattagtctgatgagtcctgttactttaatttggaattcctttttgtggttcctctcattttctctcgtgttaagaagttcaaaagaatctcgtttgggcaagaaaattttgggtataatactgatgtcatgggaattgagtttgttgaaaatgatcttgttattgatgcatggcaagtggcgtactctaggtttgactgatgtggttattaggcttagtttataaaagtggcctggtgtagttttgtatggggcatttagtttgctataatgggttggcacttggtagctgtcgtagggtatctcaataagtttatctataatctattttgctcaggagatagttttgaaaagatttggatccattatggattggatgccatgtcatgtaggcacatttcgtttcaaggtttctgaccttgaaatttcaaattggattatttatgttatattgtaagtagtttctgtatttgtggagcatggcatgttactgtgtacttgttcttggcagtaatgaaactaaaagaactttaatgcagtataaaggtgtattctgaattctgatcatccatttatataatttttgcaggttgcattcagaactaaagtttttcacccaaatatcaacagcaatggcagtatctgtcttgacattttgaaagaacagtggagccctgccttgacaatatccaaggtcatgatctcttaatgactttatttatggatgtcgtggtttttaaatttctgcaaaccagataaccacaggagggttgtggtttgcttagtcatgagaattggctattagtgagtactatgttggaagtaacttgagaagtcttaatactactctgccaattagcatgtattgcaaattgggaatggtataatgcgaccatgatttaggttccccttttatagtgaatttctttaagttatctacttgagaagaaatccttctgtccaattcaaacatgctcagaaaatgtcctatcgggttgtttatttctctaattatatagtctgtgcggtgcataatcttgctatttttttgacttgagttgacaaatgaactgctgtatattatattgtattgtaaatgtcatcatgtgcatatcatctagattctatcaaggaatttatattccttgagtagcttttgaactactgctggaaaaagctttagagagaatttagtcttccagtctcatgcacagttgctttgcaccattctttctgtcttttcatttatggtagtttttaagtgggtgggaagggttcttgtttctattttaggtgttgctttccatttgttccctgttgacggacccaaacccagacgatccgctagtgccagagatcgcacatatgtacaagacggatagggccaagtacgagactactgctagaagctggacccagaagtatgccatgggctaacgtgcttagtggtgaggacatttaggaggttgaattataccttgttatgtataaaaatgaagtgtggtctgtacctttaatattgcaatagatttatatttgctctcttgaaattaagactattatctgtattcttaattatgaacgtctatgtagacctctctcaatgttgtttgatataccaagtgatgtatttttctttatgttatcatatatttagccttttggttttcaattatgtacaagtttgacttattcgtagtcccactccaagaccaggtagtactgctttgaaggttggggaattagccttgaattttgttgacagttgactgttacgattctttctttgtaattaattacgttttgttggatcaagtcttaggcagtctttctttcacaagagtagtgcaaaatgttctacattgtttggcaattttagaagaaacacttaaacttaaaactaaactgcagaattcattttaggacacttccaccattattgtttattacaagagtaggtttcagtaaattatattacttttttttcccaacgatgtcacttttacgtggtcagttatttttacatttacatacctaaatactatattacacatatattttgaaggttatttattacctaccattttttctttttatttattttttaaagtggatttcattcaacaaactagaaattacaaagaaaaaagcaagtctctctgaatagcagatcttacaactgagggattgacccagggcagggcgtggaagtactcttttggttggagtggctatggctccattcaatttcaaaaaactggattaataataaaagtggagttatatataagtataaggtatctttgaatcattaatattcactttaaagaaattgttattgtacaactttatgttataattcgaataataaatatatgaaggaggttttaatgattacatcaaatctgtaaccactttggttacatttattttcaatcattggatctaaaaggttgtgattaatttaaa

SEQ ID NO: 184144 - DNA, 7336 bp, Cannabis indica
ttacccacctaagtctctctctttctcttaaatataaccaaaaaccaaaaatcttcgagttcaagaactatcacagaaaataacaatccaaaggaacacaggaaaactttatacataaataaaaatacctaaagcattacctcttcagaaagcgagttttagccacggcagcgttaagcgcgtagcagaaaatggcgataatggccatcgccgccgccacaatcaacgacctaccggaggttattctttcggttatcttctccttcatttctgacgtccggagccgaaaccgcctctccttggtctgccgaagattccggacattggaaagagccacgcgcacctccctcgcgctccgtggtaacgcgcgcgaccttcacctgatcccacgctgtttcagctccgtcacccacctcgatctctccctcctctcgccgtggggtcacgcgttgctttctccagtcgcgtcctccatcgacccgaatctcctggcgcgtcgcctagaagtggcgttccctttggtgacctcactcgccgtttacgcgcgatcagcaagcacgctacaggttttgatacctcaatggcctggattgcgccacgtcaagctggtccggtggcatcaacggccgcaatcacagcccggcgacgacttcgtcccgttatttgagcattgtcattcgctaacgactgtggacttgtcggagttctattactggacggaggacctccctccggctctccaagcctctcaagccgtagccaaatccctcaccaagctagatcttctgacgacgtcgtttacggaagggttcaaggatgacgagattcgtgtgatcacggaggcttgccctaacctcaaacagttcctcgtcgcttgcaggttcgatcccaggctgattggtttctgtcggcgatgaggttctcctcaccatagccgccaattgtcccaacctttcgcttcttcacgtggcagatacttcatcgttctggaacacgcgtggcaatcccgaggacgatgggtttaccgcggaggacgccagaattagccgcgccggcttggttgatttcttctcggggcttcaatttattgaggagttgtttctggatgtttgccagaatgtcagggacagtggattagctctggaagttcttgctcggagatgccctaggttaaaggttctgaagctcggccaattccatgggttgtgtgcaacggttggatcgcagctggatggaattgctctttgccaagggctggagtcgttgtggatcaagaactcggcggacttgacggacatggggctaattgagatagctagaggttgttgtaggttaaagaagcttcatatctatgggtgcaaggggattacagtaaaagggttgagaacactggcttgcttgctccggcggaccctcgttgacgtttccatctcttgttgtaagaacctcgacgccaaggggtcgttgcaagctctggagccaatttgcgatcggattcagcggctccacatcgattgcatctgggaaaatttgaacgattctgatggagggtattataattttgatttaattgactctatcgaacataataagggcattgactacgacgagtacgagcagagaagcaaaagatgcaagttggatggagacgccatggccaatagctcctatgacggcgatgggttttggtgcagcaagagctgggatcgtctagagtatctctctctatggatagccgtgggagagcaactatcgccacttacaatggtgggtctggaggactgtccaaacttggaggagattaggataaagattgagggagattgccggagaagagccagaccaaatcaagaattcgggttgagctccctcactatttatccaaagctaactaaactaattttggattgtagggacaccataggctacgctttgactgcgccagccggtcaaatggatctaagcctttgggagaggttttttcttaatggaattgagatacttagtcttgacgaacttgattactggccgcctcaggaccaggatgtgaaccagcgcagcctctctctaccagctgctgggttgctcgctgagtgtatcacgttgaggaaactcttcatccatggaaccattcatgagcatttcatgaatttctttctcaagataccaaacctcagggatgcgcagctcagaggaacttactatcctgcgcccgaaaacgatacaagtacggagatgagagttgattcttgttgtcgttttgaagatgcactcaatagtcgtgtcattgaagactgacaaagaaaactaataacaaatccttgaaagttttgccgggaaactaatgaatgtgcaatgtaataagttttgagaaattttcacaatacgatatattattatatcttttttttagttgtcgatttcacacgtactaaatccaattacaatgaagctggctaaaaattgcatgtaaatttcttttttcccttgtggggttaaggaaaatactcgtggagcttgagaaaatgtggaaaagaaattgaatttaactttgcatataaatttctcttatttaatactaaaaaagaaaatactcgtgaaaaagaaatggaattcaactcaactcttcttgctcattcaacaaactctgatttgattgcacaaaaaaggatggatgggtttgcaccattggaaaggggaaatgaaacaaaaaagacaacactttatgattgtacaatggtaagaaaactcatgacagtgtacaactgaagccgagaatacaagacagtacctccctacccaaggttttctatacaaacaacaggctctatcagcaaagagaatactcgcagtccagcaatcgggtgagtatctcctcacagtttggcctttgatctggttctacccaacaatctgttcagtaaaggaaaataaaatggttttaatttttatatactgaacacataaaatgagagtaatttaagaactccattaaagttaaattatccatctctaacctgaaatcagcctgcctagtggaccttcaggaatctccagcctggacccctcattagcaacagcataaactacctgtagaacggtagatcatgctcaattcaccactcaacaattcgaatatagttcttgaagaataagaaaagtaatgtgttataatcaaaataattgaatggacagtatatactgctggcatataccctttctggtggtacaccttcccacggtctgctcagagtacagagttcccacattatgacccctagactgaatatatcacatttttcactgaagggttcatttcgaattagttcaggtgccatccattctggagttcctgcagacgaggagtccttaatgggactctcagtcattattcttgatagcccaaaatcacagatcttgactgtccaatgcttattcacaagacaatttgcactttttaggtcccgatgaactatcttcattcggtgtatgcacatcaaccccctgttcagaagatattagtcagcacacggtagcattccttgtcaattagaaaatgaatgaaagagaaaaagctcataaattagcaagttcattttaagtagtcggtaaacaacagatgatatcaattatcatctgaactagacgtagcatcgcctgcacccgactaatttcatgcaatacaagaagattcaaaaaaaaactaataacttccaatgatatgtctaggaacaataattactaaaaaagggaagaggaaaaaaagagtacacagagagagaaaataaataaaacaaaaggtaccaaaggttcaaggaaacgaggcaattacatgcatgaaattgtaaagttaaaaaaaatacagcagatttaaaagaaacacagcccagattcttggaccgttcaaaacctacaaactatatacccaacgtgggaggaaaaaaaggtaggacgctggacagacctgcaaatgtctcgcaacatttttaaccttctacgccagctaagcttcttcttttgaccactagagtgaataagataatacaaggatcctgtctccatgtactcagtaaccattgacagacgtggaggcttcgtacacgcacccagaaataagataactgcagataccaacaccctccatcacaaattgttgaaaacaatgtgaactagatcaactaggtatgctacatccaacaatttaaataacatatagagattaaaaacttgaaaaatagagccgtcaggtaaagaggtaagtaccatttggatgtcgaagtcggcttgataaccacacataccaacataaagagcaggatgttagaaacaagatagtaaacaaaatataccaaagaacataacatataagataaaaattaagaacgctataagaataagtgtgctcagtgaatacctaagaatggatatctcattgcagaaatcttccatgttttcggcagttaaatcttgctctaagaaaaccttaattgctacatctgttccattccaaatgccgcggaagacttctccaaagaaacctagatgtgaaaaatatacaaacatcaacaaaatgaaaagacttgaccttaagtaactcctttatatgaaaaggagaaaacaaagtatgttgccccaagatggatgaactgtttttgtcatgtcattgtatataatgtttgggtacatatttaggatgtacatatcattgctctaaaccaagttgttaaagttagtaaaatgttttacataaagtggcaattatgattcccaatagttcgattaatgatggaaatacagataggaaagagaataatgaaggcctaaactatttataacaatttctagctatcatccataactttccaataaatctatacagtatactattgaccttcaacattcattacagacaaattcattttattcaccaaagatttatatgtaaatatctagtccatacacccatttcaattgctcaatacattctcacagaaagcttacaattcaaaaagtctggatatatgacgaggaaaacaaaaagtggcttcaagccaaaattgcagaaagttctaaaattatacttaccaataccaacacgtgttccaacagtcaactctgagaaatcaatattccattcattgtaaggtaatagaggttggttattaaacaacgaagactgaagaactctattccatgttgagaccaattcctcatttactacataaccagagtgcccacttctgttggaattttgacttctataatcatggggagatgagggcagtgacattgccttctgagaaccaattgtgtcctgaaatatagaagaaagaaaattcttcactgataactatcatgtcatgaagatacttagcatgaagtggcatgtaaagaaattagcattcaggaaaaaagctagaatgcttaaatcagtagcttatcaaaatttaaatataaagaactttaaaaaaaaaaaaaaaattagccctgcataaatcaatataatgtcatgaagatacttgcagcatgaagtgacatgaagagcaactaaccttcatgaaaaaagctaaaatgcttaaatcattagcttaccgaaatttcaaaatactgaattttaaacaaatttgccaagtaaaacaatattataacttttcattttccaataaaaaacttaaaactacataaatatacatgtgaacatcaaaaacttcatttggctcatactaataactcaaattaacatagacagcatcacaaaccaaaattaaaaagtacatgttaatagttaatactgctcaactgattgcaaccaccctcccagattccttagcaagtgtgccaaacaaatctcagtatacatatacaaaatgaactagctattagcaatgatgataaatcagattttccacatcctgagcttatccactataataattgaatagacatagaggaaaggcataagatagacttcttagcaagcgtgcccattatataggtttacacatacacacatgaaacaatcattaacatagagaacaaatcaaatatttccacgtactacaattttgcaaattaggctgtcttttgctaccaaagtaaaagaaacatacgttctgtagattagaaatatttctgtcatctgaaggatgtgaaaacgatccatcctcaccccgctctctcaaaatacgattttgcttcaatgtgtcattcatagcccgcacagccctttgatggttcaataaaatattattattctccacaattaaacaagattacaatatgtaaaaagtaaaataactcttgccaaatataattttaacatgcaacatatacctaaagattccaaatcacgaccaagacaaagacactactaaaacagaacacgttgtcaattattatagaataatttttacagttatccatagcagatgccaaagccctaattacgtatacaaatatgactattttgagaccataataactaaagtcaatctccaaccccaacaaaggaaaaaccctccacccttcaaatctttaaacccatcaatagcaacatacaaaacatgaggaagacagagatacttaaaaggctactccatcagtccattgtatgtgtaactaaatttcttttgacgttatttcccacactaaatgctctccaatattagttacctgaatactacagaatcacaactgaacagaacagaaaaaggaaaaaaagatctatagcatatacttagtttattaaccaatcattattatttttccaaagaaaactctctagctcattaacctccttaaaatatctagaattgaggtagataaaaagaaaacagaagacttcctttttcgaaagagggagaggtaggacagaaaagagtggggatagagcaaaatccattttttggcaaaagggaaagcggaagggagatgaaagatagagggatgaggctgacttccaaatctgccaaaattaatccctcaaaaatatggaaggatgagattacaaaacaaaaaaaaaataaataataataattactctctgaatagtttaaatatatattttatgataagtagtgcagtaattttctattgaaatattgtatccaacctttccactctcctcccaacatgaaacgacatagagaagaattattatcttctcaatccttcttaccaaacatagtgttgcaatgcaaaaaaaattagctgattcttcagtatcccttcatacatctctgcaaactattcctatccaacctttccactcttctcccaacatatgaaacaatgtagaaaaagagttactatcctctcaatccttcttaccaaacat

SEQ ID NO: 184145 - DNA, 4342 bp, Cannabis indica
acctcatttcttttttctactcctaacgacccttttttttttgttttttttctctttttttgctataattttttttttttttgaaattccgggacagggatcaaaggggtgggattgttattttgttccaagggatcatcatccaatcacaacatatctctttcacataacaagaaaagaaacagagataagctgaaatagtaagctaccactagtagggtctgtatctcctgttacgacttccttcatcactgccactgcctcctcctcgccctgcctgtccacttggaccattgtttcgatcaattctcctgggccgaggagtgggcatctgtacacctggctgctgactgcacaagcccaacacggtcagaaatgttcttaagagatggaaaatgatgtgatgaatattgagtaactacttacagaacatagccaattcgcccatctggaagaaccatgggcaccatttgcattccggctggcattggtccacgaccatatatcattggctgtagatcatacaccaatccaattaagaaaaagcagaataaaggcccagtcgagacaagactcaagagtaaaaaactaaaaaacaaccgaataacaagccaagatagcttttaaggtacctgctgaaaccctgcagcagcaacaccatatccagaccctagagtgccataaggatttccaggaaaaccgccatagcctgggtggggaagatggcttgcatgaggtgcggtattgtaagaataagatccatcaggttttctatcagtctgaggcttggcaaggacaacctctagagcttggcctgcaattcatatccacgaaagattcagtatatctacgtgtaaattcaatttatataatagttattccaaaggaaggagtaggttcagttcaaatgttggaaaatattatgcccatccaaaaaaacatttaggaaaaatcaaaaaacaagagcatagcttgataatccaataatacccttcattacttgtaagaaccaaagaattgtaccttttctccttaaaatcttacacctaacctattaattattttcattatcaattcagtaaaataaacctaagatcaattttttgccaaaaggcatccaaatcccctagtattgaattgaagatgggagtaatttgtaatatacaagatctgccacagttattcaatatgaacctaacagaatcgcaagataaagtaccatcaatttcatatttctctgagtctttgacagccttcagagcacttgacctttcagcataatgaacgaaaccaaaatcccgcttgccttgcccacctttgccaggtggcatgactacttttgtcacttcaccatgacgctggaaaagctccttcagttgttcagtggtagtattctcaggaatatttttcacgtagagagccttcacctgagaatgagagaaagcatataaaaaataaatacatagcatgtaccacattaaaccctacactactacaatattttgggatgcaaaaaaaaaaaactatagataagagcttggtagttctatttaccaacttaacaaaaaatgattttttcattcacataacattttagaagctgtaaagaatacagtaattacaaatacttttaattccaccactgttatcttaattgaaatttacctgcgccgtagctgtctgatcaggtgtactctttggatcagcccatgtaacagtaggagtatttccatcaagcttaaagttagaacttgacattttttgtcttgaataatcagcacatgcattattataatacaagacaaaagcaaaaccacgatttctggttggaatttgaggatcctgaaattgagcagtacaattgaacaaacaaaattagttgtcatcacccatcaatctctgtaaattcatatgaaagcaaaacaaagcatagagagaagaagaataacaaaagagtttacctttattagttcaatgttttcaactcctggaccaacgtcctcaacaactttccgaaattcatcttctgtccagtgctttggaacattaccaataaacaatctgtgtttggtttcagacagcgaacatcttaatgttttaccctgcagagaagtttagcaaaattaataccaaagcaattggagcatattccagaatgtgtataaaaaaaacctgaaagtcttaaatagtaagaagcatcatgactaccttgaattctttactatgtaactcttcaatggcctgttgtgcaacttcttttgttttaaaagctacaaaggcatagcctttattctcaccagtctccctgtctttcatcaaccttacctgcaaaaaattaaaatcaaaacatcatcattagcagtaccaacagaaggaaaatactaaattcacaaggtcaagaaatcatattttacctcaacaatatcacctatattatcacataaatccctcaaatcttcctctgtgacttctctaggaagtccaccaatgaaaacttcagacccatgaggaggaagagcaagaagttctgcgcgcttctcttgctcttcttcatcaataggtgaaacaggcttatcttcaccttcttccacagattcagcagtaatgtggcttctttctgcatccggtgattgttctttatcactagctccattcatagaatcgtgtgcttcttcagcattctcttccacattttcctcatcttctccatcactaccatcttcatctaattgttcttcaacttcatcatccatctcttccatgtaattttcatcatcaaaatccacccgttcatcgacttctgctccttctgccatgactttttcaagtctcagcttttatcatccaatatcccacctagaactgctcctatgtcacctgcactatcacacacattaaaaaaaaaaaagcacagaaaccaataaagactcaacaaaatgaaatactagctgctctaggctctagctgataacagaaatacacttaagcttaggaagattgctctagtaacaaataagcgataaacaatgttcaggagaataaaacctcgaaaaatcacttaacaaacgacaaaagagaaaattcactagtttgccctattgcctcattttcatagaagagatagtacagtggtaagtggtacgtaccaagtgccactgcaaccacaccatttatcaactaaattttcttacctcaggttcatttcagtgagaaataaaagaaaatattaacaattccaatgccccaaattaatttaaaggacaaaattatagttcaatttatgagggtttacgtttaatagataccttaaagaaacaaatgaaactcgaaagcacaatacttcaaaaagaaataccgataagggttacaaccaaggaaagaacagcacaaaccatgaaaccccataaaccctattaggggaagagacccaaatgattaaagagggcaccaatcaatataaaacaacattctagagccaatcaataaatgcaacaaaacccataaaaaaatataatcaaaacaaacctaatagacatgaaaatttgaggattcgaacttaaaaatgaatcagaagtgaaacggaaagggaatacgaatacgaagtgtgagactttgttacataccaccagtggtgcaaattttgagggaggagatttgggtttcgcggttttgggtccttgagctatgattgggttggaggagaaagaaggtgaggagcggtgcggggctggggttggtgctggggctggagctggagctggagctgggctttgatgtatccgacgacgccaaatttggggttttttatttggtgcagagcccttaagaatgacccaaatggacaataacaaattaggtttaaacagtctatgatccaatcaaattcagccacgtaacctctatgccatttaatttcatcatttagttttttctcacttttatagcatcgaatttcattttcttgaaaagcgatttatagcattttcgcctttctattttgtaaagatatcactttgcttatttaaatatactctgtactgtacaagaagttaaaatgaagattataaacatctcctttctaatatttgcaaaacaaaacctaaatatgatttacttttagaatattcgatgagtaatttgtagaaattatattttatactcactttattttatttgttttaatttttaccttcatttctctattctttaagatatatcatcttttataaatgatgtctctattataccccttaaattaatgtaaattatgtgttacatttaagtggatagcaaggatattttaggcaactcactcatagaagtggatagattttaataaaat

SEQ ID NO: 184146 - DNA, 984 bp, Cannabis indica
ataacgaaatgggtccaaaatgctctgtttttggataatgttttacagttgagtaataccttggtagatgggtctttggattttcctccctttggattagcttttcttttccgggaattaagctcattggaaggtggtggtctcaaacaacccatttcgccatttgggttttgctctgaaactgttgactcatcttgagaatttgctgttgttcgttcctgtaataataatggtgaattttgtttttcaagtgccttaagggaaggactactcgaaaccctcgagagtttcccatgtcctattaatgggttgttgttgttgttgttgttgttattagatctaaactctgaattattgttcaaacccaattgggtcgttctgccattaaagcttctactcccaaagcacgaaaatctagctgctctttctgcaaaaccagggtcggcggacaattcagccaccgtcgaattcacagccatggattttcccatactgggcaatttttccaacttcaatttctgtggtgaattcattggtgtactgtaacacgacgtgttagtacttctatttccggcaatgtagggattcgccggcgccggagttgcagtcatgaaattctgggaatgcggtgagatctcgccggaatttcctatgttaccgagttttccgatcaattctctgataacaaagctgtcgtttgagatgttggaattggaagccacaggagatgagaccattgagcttagagctgagtcaaactgcataccttgttcgaccgttgacttttcccaagtggggttgttgttattgttgtaaaagccgtactccggggattgctccgatgaacaattgagctccatgggttgaatttcgagaggaccagacacagacacagtcgttgttgattgccagttattgggtatggtgagtccagcatttagaaaaaagtcattctccattgaatgaaaaatttaagcttttttt

SEQ ID NO: 184147 - DNA, 8470 bp, Cannabis indica
acatctaacggctaggtggtacttatagaaattctagaaatataacttatgtattattactgtcaaaaataaaatttaagtatttatctgcaaccaagaattaaacttaaatatttgcaccacaaattactctatataataattataataaaatctattacaggatcaatgtaaactagttgacttcattatcattatctttgaaatcttccaactttacattacataattgcaacaataataatcatgatcatgaccttaatttagtttgaccaacatggccaacatatgctgcagagtaaaatcatgtatcaactacagattagtccactgaaccatttatgaaccagtgtcactcttctttaaatattggtccaattatgttgtgtatccctaaaagggacatacatatatgataattacattatgcaactatctaaacaagtaagaaaaataaaaggttctaattgctcaactaatcatagtgattcagattccactcactaggatttactaagttcatgaatgaagaacaaagtactaaacttgatttaacaagattgactgaaaccttaggataaactatcacaaactttgctagttcaattctacaattgggggtactaatactgacaagcaactagattacaatcaattctcacaaagatcttttgggtaatttacagaagttattatacaaaggaagagaacaatagtatctatcaaaaagcaaagtgtatatgtgttgttcttctatgtgtaagtcaaactataagaggatatatattgattatactatacaatatggttgttgcatatagttcatatactgatatgcagtgctatgttttaagatacaagaaacttacaaaagatatctcttctgttaatcactctggttgtgttgcatctatggcttgtgtatcagcactagaaatagaaatctcatttatattggcttgacaattctctttccatggtgcaaccatttgacaattattcacaatagcattattaacctgagaggaagatccaacatgtgaatgaaaacatggcgaatcggtctcacattgtaggccgagtactccattagaaggctgcagctcaccacaatcaccttccttaaagaaactagtggtgttacataacttttgaaaggggaaagaacccaattcgctatcgatctttcctctaagatcaatcaaaatacttctcaaccgcatgacttcggcttcaagaactgtctgcctctgcaatttcttaactaattgttggtttaccattcgcaatttcttaacttcctcctctaaataagcagcatgagccttctttttctccctatactttcgaacagcttctcggttgcctgaagactttcttgatttcttggttgtgggatcatcatcttcttcagatgcaagaacttgagtgtgagtatggtaacaagtatgtgtgtgagctgagtcaggaccaggtggattacaagtgtgagtgtgagtacatgtcctggcattcttccacaaatcatcaatgaatgaatctacagacattggattatcatgaaaattggaagaagaattctcatttgccaaaacaggttgttcatcatcatcatcatcatccacctttgctttcatctctctctctctctctttaaattgatcagacaacacaaaatcagtacccaaatttagtcaaaactataatatttactcatattgaaatatagataaccaaccacacagacaaaaggggttctttgcataaaaaagaacaagcttttccattcagacatttcatctcatcgaatagattcaaagcaactttgaccatgtgaaaagaaaaggcactaaattgtccaatcaaaagctatttatacaaaaacccacttgagtttctggaccagtaagccattaaaagacataacaacacctaaccttgattctgaatctcaaaaattatgaaaaatgaaaaccagaggttcttcaagcaattaatccaataaaaacccaattaaggaaattatatttatacacaaatataataagtgcccactacaagattatggtattgaaatctaatttgagtgagatgctgcggaaaatttaagcaaagatgtaaacttttgtggagaataatattatttagcactatgtatcattgttgtttgacttatattattattacctgatgagttttctcttttgtagattctgtgaccacaaaggatattgaagtttgaagttgtgtgattatgccactttgaaggccattgaagaagcaagaagcatctctgattctcttatcagttttcctttttatctgtactgttcacaactttgggtttgaagaacttgtcaacaccagtacagtacggccattaataaccgttttagtttttcttcttttgcttaggaaaacgacatcagatcaagaaaacgactacatctcgagaaaacgacattatttccgtaaaacgacaatattttcgtaaaacgacgtcaggtcaagaaaacgacaatgttttgctgaaacgacatgaaaacgacaacatctcatgcaaaccacattatttcagtaagacaataatattttcataaaacgatatcagatcaagaaaacggcaatgttttacagaaacgacatgaaaacgacaacaactcatgaaaacgacattatttccgtaaaacgacaatattttcataaagtgacatcggattaagaaaacgacaacagctcatgcaaacgacattatttcggtaaaataataatttttcataaaacgacatcagatcaaaaaaacgacaatgtttttctgaaacgacattagctcataaaaacgacatcatttcactgaacgacaatattttgacgagacgacatgaaaacgacactatttggtgaagacaaccgatcgtgaaaacgacaatattttgttcaaacaacatgaaaacgataattttttgttcgaacgacatgaatacgacaataactcatagaaacgacaatattttgttgagacaacaataaaacgacaatagatcaagaaaatgacaatattttgctgaaatgccatgaaaatgacattatatactataaaaaataataatattttgctgaaacgccatgaaaattgacatctaaaagtaaaaaataacaatatttttctaaaacgacaaataaccatgcatgaaaacaacatttgaaagtaaacatgattatattagtccaataattataattcaattcaagtttaatgaaatcatccactttgtcacctttgggagctgtaaggattcaatctagagagagagagagcctagtatattgcaatgagagagttgttacagaacattatatacaatgagctaatcaagctctaactaactttacaaatggtaaagtagttgagttagttacaaactgaaaactaactaatgaacattagactcatccttgacaatcccttcaaaccgagtgtggatttaaaaacaacacacaacttggtacgaacttcaacaaatctcaagttggagatggattttgtaagacaatcagcaatctgagcatgaacagggacatcttgacttgtatcagattttacagcactttgtctcgaacaaaatataggtcaatttcgatgtgtttagtgcgagcatggagggtggggttgacagctagaagtactgtactttggttgtcacaccgtatagagggtactgatgtggatgaaacatggagctcacgaagaagagattgaagccatgttacttcagtaacaacacggaccaagcttcgaaactctgcttcagtgtatgatttgttgattgtagcttgttttttagacttccaagtcactagattgccaccaaaatagatgcaataccttgtcgtggagctcctattattaggatcggaggcctagtcaacatcacaaaacacatcaagggagaaatcagtggctggttttagcatgaggccatagtctaatgtccctgcaatatatcttagtatccttttgactgttgtccaatgtaaaaatggtaaatgttgcatgtattgacatactttgttgacacagaatgtaagttcaggttgtgtcacagtggcatattgtaaagctccaacaatagacctataaagagtgacacccttgacagggtcactgccatagatggaaagcttcaaactactgttcattagtgtattctgagtattaacattttgcatgtcttctttgcaaagcagttcttgaagatacttagtttgagaaagaaatattccttcaaacgcgtgtgtgacttgaaaccttaaaaagtagtcaacaagaccaagatcttttaacgaaaatgttgtactcaactctgtaataatctgatttacaagagtatcattactgcccattaccaagaagtcatcaacataaactagagtgtagatgcagttgttaagtgactcttatgaacatggattgatcagccttggagtactgaaagccatgctgtagcaacacattagatagcttcccagatcaagttctcggtgcttattttagaccatatataatttttgtaaatattcaatagcgtaaattcgaagaagcaaccagaatccacatggaaatactcttaacgcaactagaaactttgttggaaaatctagaaaaagcgagaaatcattccaaaagtactaaaatacccctcatctaaactataaatagactcaaaaacatttcaaaatagagcaattcaatcccaaaaaagataaattggaaaagtgttatcaaacacactcataaataatctaaatttaaatttttaaaacatggattgaatgaataatttttagtttatgtaatccaatcaaaccaatgaggatatcattcataatactcttcacaaactagctaagctagaagtaacacctacataattatatcaaaatcttgaatctaatgaacaaaaatatataactgttctgtgattttgaggtgaaactgataatataacatatcaaggttggtgaccaagaagtgatggcctgtagaacacatgagtttgagcaatctggatacgatctctcgggtcgttcatcgtttcgtctcttagtgtttgaagaatagcttgtgatgaatactccctaaatacgaaagaaccaaagtataagagtttcacccttgaaaaagaaacaaaatgcatcaaccatacctagctaagttagtagtaaataagtaccttttgataaggattttatagagcattttcagtataggacagagctcaaccggagcaacatgcttgttttcttcggggtgtaacacactcaacgatgaatggcttaacaactcgaaaaatgctttcacagcagagacaccctgcaagcaatttgagtttgacaggctcagtttagttataacaattcgaatatcattccataaaaatcagtttggtttgaagattctgttatgtacctgaatcataccctttcccttgatgctatcacccatttcgaggctcaactcttttttggctaacttttgtccgtaccatgcattacgacctttcaacaatgtcacgtatgtatcggcgagcaaaggccctgcaagtttctctggctcttctgccaaaagatgagtgatgaatatcatttcggatgtgcaatgtgcaaaatacaccgatttgctcgttgcactttcttttgttaaagcagctaccattcctgcacaaaaaaagataaattggaaaagataactgaaatcgggtagattgctatcatgggacataactcaaagaacagatcaagttgatcaatttaccaatcagattataaacatgtaaaaattagacaaacaaaacccaactctgaaaagtttcaattgatttgaaaagatataaaaactgagaagcacacaagaattcgatgctcttactgaaaaatgaaagctttttaaacgaaagcttaccagctccgattgcatagacatttttcaaaccgcccatcacttcatgagtaactagatcaccattgtcccacactataaaatggggttgtctcaaaaatgtagccaatggttttctccatttttcgcctccacatattcgagcattagcatactccttgttgtatatttctgaggcaatattaggacctccaagatagagaatgttctcaattggaactccagcttcaaagcacaacatcataagaactttaaagaaatcgaaaatataaacaaaaacaactgtttagacacataactaagttataatcaattcaaacaaatgtggatgtgttcttactagctcgattgatcatttgtgtaggagttataatccgtggctcaatctcaagttcagcctctacacctttagacagagaaataataaccggcattgctattctctctttccaatacttgctaatctcttcaaacacttcacgagtttctgtcgagggcaatccatttaccaaaatatcagcatcccacacagcttcctgcaagttagtaacaaccttcaaggggcaaagaggagtatcaatcatatttacacaaaaaccgtctttcaatatctcatcagcatagagcgttcgatcacctaatcttgcctcgacatacttcaaataagcacagcgtctgattagtctcctcaacacatcttctctcgagttgattatttcgaataaatgttcagctgtggctttatcgattgctcttcccggtcttctccaaattcttatcaaaaccttgtctcttaagtgaccataacaatcctgcaacatggcaataaacacactaccccaagcaccagcaccaacaccaactatcttcaaaggatcaccttcagctttccccaaaagccgacgaatctcatcgatcttgtcttcaattaaaccattcgaattatgtaccaatccatttgagtactcattatgaatcacaccatcaccatccccaaccatatcttattcaattcctcttttttcactaaaaaagagaaaaggtagaatctttttcaatggtatttcctcctcaaagcccctgatctaagcagcccacttctaactttttcacctaaaataagaaattaactataaaacatcaaaaagagctagaattaatgttggattttctacaaaaatcaaatatcctcaactccaactagactcttcaaagatcaacactattttcaattcctcctttttcaatggtcaaagcccctgatctatgcagcccacttcaaactttttcacctaaaataaaaaaaaaaaaaaaatcaacctaaaaaactcaaaaagagcaagaattgaagttgggttttccacaaaaaaatcaaaacccaaccaccatttgacaaaaacttaaacttctataacaccatttacataaaatttaacaacatgggtattatagtttctcattcaatcaccatttccaaatatagaattctatgaaaaatcattaaagttcaaatctttaagttgggtaatctacttccccacctaatcaaatcgaaatataattagaatgtctatcttacctttgatgggcggatacttcaatgtagtgacatgggttccaagctttgatcttttgggtcattaaagaattggttttttggcgtgtgtaaatgagcttcttcgttatggtcggtgggagcagccggcagggcctctgtctggcattgctgatgtcaccttttaccaattcttacttgacacttcaaaagtttccaattttaactcataaaacccaaatttcctgatttgattcgtataaattttagttaatgtcgtttttcgttttcattgtcgtttttatgaagtttgtcgtttatcttattttccttttttagttggtatgaaatgaaatgacttttcaagtcattttatttaggaaaattctttagtttacatgaattactattcctatggaatgagtttttcaatgacaataaacaaaccaatcacttgaatgatctttctttaggaatagcaattccattcctacactcattcatgtaaaccaaacactaccaagtttcttgttgtgttttttgaattgtgtcgttttgcgtgttttatgttgtattcttgattgtgtcgtttgctggtttgtctttttgcgtattttgttagaattgtaaaatgcatgggttctatctcaaaactaattaataatgagaggagtagcttatgtattttgtatattgttatctttctacacattagcagtataaaattctctaacattctcccttaagatggtagttgttttttgctcaccatcttaagcagctcttttatggttcattatcccttgaatcacaagtgactctttttaactttgactctactttttggattgtctttttgaattttttttatggttttacttttatttcgatcgacttttttatttttttggattagattgtcattagaggttttttgtttttgctctaataccatg

SEQ ID NO: 184148 - DNA, 2225 bp, Cannabis indica
ccttgcgaaggattctgctggagacaagaacgatgttgattctttggatttgggtgtcaacttggactctggtcttggaatcttggatgcattttttgcaagcttttcaatgattttagtcagcgaggtttgtttttgagctctttttatttttttctacttgatattgtactttagaaaatactatgaactacaggggtatttcacagcacttgctcctcacctaagattaatgtggtaatcaagtaaatctcttaacaagtacatatttttttaatgaaattacgaccaaatacctaacaaatttcactaagtgcttactattttactttttctgataggttctgctttgctagtgagttttcatactactatgcgtatattctttaatctgattaattttcaattggggactactagattggagatgagacattcattatagcagcacttatggcaatgcgccacccaaagtcaattgttttatctggggcactctctgccttgattgttatgactgtaagttatcttattatccttaccttgcttgtaacatttgtacggctatagtaaagattttacatataaatgtatgtatatctccctgctcttataattattttctttttatgccttgatgatgtactgccactccatttgcaaactgtcaaatgaaaagtgagattggaaactcgaaaggcgctttgtggttctttttcatctcttttcaatgttattaatatctttttcgttgtacatttcaggtactttcaacgggactgggtaggattgttccaaacttgatatcaagaaagcacacaaatagtgcagctacaggtatctacttacatttttcttggaaaggtcccaagcattttattgttgcttctttgattgcacaaatttcattcgttctttaggttgtcctggttcatgcttaggtcgactatccattttcattctatcatcttattaatctggacttttaccttatcttctttcatttgcagttctatatgcattttttggtttacggttactttatattgcttggagatcagattcaaaatcttcccagaaaaaagaaatggaagaggtgggtcttactctaatctatgttgcagctgttactaactcatttgatcttcttttgatttttttttttttgaaaataacctgtggtgttagtatattggacaaatatgtttttattttattgtgtgtttgtgggtgtaactattaagcttatttcactttgctaagttaatctttcctgaatgttaggtggaggagaaactcgaatctggtcaagggaaatcatcctatcgacggttcctttccagattctgtacaccaatatttttggaggtataatagttgtatggtactcattttacattttgtagattactttcattttggggtctgaatgatctacaaatgagaatacttgtgaatttagacctcaagtttttacattaccgagtcttatgctggccatcctagctgaaatttccctggttttgctattgcagtcatttatcctaacgtttcttgcggagtggggtgatcgtagccagatagcaacaattgcagtaagagaatagattaaaagcagtttcatataaaacatactcttctgatttcggttttaatgttggtcattttgatattgtagttggctacacacaaaaatgccatcggagtagctataggagcaacattaggacacaccatctgtacatcagttgcggtggttggcgggagcatgctggcctcgaaaatctcccaaggcacagttgctactgttggaggcttgctcttcctcggattttccttgtcctcgtatttctatcctcctctgtgagtgcgatattgtaggctaacctgattcttttgtagcatcaatgctctccacttgagtattttaccttttttctttcccttttccccctggtaatttttgttccccctccttgcaaatccttgatagaaaaacttggcagtaactggttattaccagcttttatatccaatccttgtaaaatctcagcaacatagataaagtctaatagctttcctaccataatggtgcattttatttgttttatttgatatagttccaaattgaaagaaaaagagatatattccttttttttttttactgctgttatatacaattatatttatttacttcatctcgagctagtgaaatgtggttgtgt

SEQ ID NO: 184149 - DNA, 1761 bp, Cannabis indica
aaaaaaaaaaaaaaacccccccaatgttctagacatacgaaaacgaattatcaaatacttcaagttaaagcctctgatcacagcacatgcagttttggttactctcgtcatcaatcatgatagtgtcgacattagttggtttgcatttatttttctacatatatcctcaccagcattgtaatgcattaaatctagtaatctacacacactttactgaagaaccaaaaataaaaattgaattcaatcagtcaatttcattccaatccgaaactccacatactaactaacatcaaactataaacgattatactaagcatatgccaaggaatatgaaaccttgaggagaatatgaatatctttatgtttacttataatgttaccacaaaaagaaacaaatctcaaataacaatagctaatgttgtgggaaccaaagcttctaacataaaaaagatataaacgattactctatggatgaagttaaacatttcaaatggagttggtgaccttgaattgaagaaaatatctttatgttattgtaaccataattagaaaatctgtaagaacacccccaacaacaataacaacaacaattagcataagttattgacctttttgggagttttcatcttgagactgaggttgagaaagatgagtggtgtagcttttgattctcaaggagatgagaaggcttgagagaattcctagaagagggaaaacgtaagaccaaatggaactagctttgttggaggaggcaacggctgcaccggcgaggctgccaatggatgtgttctgcaaaatcataggaacacatccaatcacagtaggcagcaaaaaatcaacaaagaaagatacattggtggctgccattgcatagtttataatgtaagacggcatcggtgagaatcgcgcaagcacaacaaatttccacccatctcgttccactcctctcgatagcacatggaagtacttgttcctctgcacccactccattgctgagctcgaattcctcaatactaatctgcacaaacaaaaccatttcattgaaacgatatttctctcattctcatcagtagtgtattaatagtacctattacgtacctgccgatccaaaaggaaagagaagccccgagcagcttggccgcgaagacaaagagaacggccgggaagaatccgaaaaggatagaagcggcggcctcgaagaagattgcatatggcaaacagagagcgattgtgagggtgtggacgagaacgtagagtgggattgcccaaatccctagttgctccgaccattccttcagcaacctcactcccgcttccttctcccacccgtattgcttactcaattctcttaagatcgccaacacacccactgctgccgcgattttccaccatttcgccatttttcatttgcagaagaacagtcttcgatcgcgatcgatcgaaaggatgaagaagaagaagcaagagacttcgacttttctattcactatgggcctagcccaactctgttttcatacggcccattcccggcccattttgttcaactcttgttttaggcgtgaagaccaagggtaatcaaccactacagactaatttaattattaaattaattattttttgggtacgaaatgcaattgtaagaagttgagggtccggagagaataataagaaagaaaataacaaaaaaacgttaaaagggagcagagactggagacttggagactcagagaaagagagagagagagagagagagagagaggt

SEQ ID NO: 184150 - DNA, 1918 bp, Cannabis indica
gtacttgtatatgtggatgatatcattgttagagggagtgctaggagtgtaattacacatttgatttctgcctttaactttgcttttgctctcaaggatttcgaaaaactcaactactttctaaggttccaattactcacaccaaagatgaatttactgtatcaaactaaatatattaaggatatactttgcaaatctaaaaagcagtttctaaatctactcctatactcctatgacaattggtcaaagattatcagcatatggcagtgatccagttgagagtgttctaatgtataggtcgattgttcgagcattgcagcatgttataatcactagacccaaaaaaaacttgagtgtaaacaaggaaattctatgcaaaatccttgcaagttctttggaattctgtgaaaagaattctgagatgctaataaggcttcacacctagataatagaatatcaacatcaggcttttctatcttcttcggttcaaacctagttggttcacaatccaaaacacaacatactatatgaagccgagtatagaagattggcaaatgtagtctcagagttgacttggttacatctttattttatgaattgaaggtgtctctttttaacattacaactgtttggtgtaataatctcagtaaaataatgcttatggctaaccccatcttccatgctaagaccagacttatacattgttaaagagaagttgcgcaaaaggaaaatgaagtgaaaaaagtgccaacacaacaagaccagattgctgaaacctaaaccaaagccacagtttgaagaatttagacacaaacttagaattgaagatgtttcacttctaggttttagaggggctgtcagtttggtagttttttgtataaaagcctctgtacaatttagaaaaatataagagatttttcactcaaacacttaacttctctttttctttcttcaagtatctttctttggttctaaattagtgagagctcattgagctgagttatactaatttaacaactaagttagacgaaaagtgctaaaatttcttgatttaaaaggttagagtagttgggtagtctgtatttagttcaatcattatcattctatttctaactactcaactagttcttttagtgcagcacatctatgaagttcagagcacaaagtaatgcttatttgtatttaacattaacacatataattcaccaaaaagaaacaaagacacatataacataaatgtcataaacaactcatttcaaaaaattgtaagaacagtgaaacaaacttaagtattttgaaaaaaagaaagttaaagaagctacaatataatgtaaagagagagaaagtctaaacttcaaagattaccatggtccttggagcaaactagagccgctagcaaaagttgagaaagaaggaaccaacaaaagcaagaaagtttcttcaacattgtacaccaaaacaactcacaacccaaatgcagtgagcagtaaaagggaaaaaaaggatctttgataaggaaaagggaaagaaaccaagagttaaggaaagggttttgttattttaatgtgattttcaagtgggaaaggaattggagaaaaatttccagggaaaaagagtgtatggaggaaaagtgggttagtagtgattacaagtgttgcagagtttaaggacaaaaaaatgggtggtgggtggtcccgacagccgttgtgagttgtctctttggaattcttttccttaaaaaatggagctgatttttttttcaaaaaaaaagaaaacaaaaatggattattggagctgattgatttcaacaccttggaaaaatggaatttttgtagcctttcccttttctcaattctcacacagaaatagcataaacgacaattagttgacctcgaaacgacacataattcaaacttaa

SEQ ID NO: 184151 - DNA, 768 bp, Cannabis indica
gctgtgttgaatgataatataatcttttttatgttttaagatttattttccatgttattttaccatgttcttttgttgtctcacactagtcaatcagatgtgttattgaagaacttgagttgaataatattcatagtttctacaattttgttaacagtagcttttggttttgtatttgattgttgaagttaattggtttgcattccagcttatatggactgcccaaatatttgtcaaatgcttttttttacctcacatcttgctgcaatcagccatatttactgctcccaccatcatcagtatcaccatatgccaccagtgccccatctatgtgatgttttggtacatatttatgtgtatatatctctagcctcattgcttttgttggtaatgatgatgatctccatcttcaggttgttgtggtaagcatctagatattgtagtgggagatttaacactatactcctttggagacaaactggttttaatgaaattcatgtttatctttatatgcttgtgtataagatagtcaatatttgatgttctttctcatcatttttcttaaaatatttttgtgattgttgttatttcatttaaatttgttgttatttttgtggttgcctgatgatgagaacctttttattgtattgatgtgtgcattgatttcattttagcctccatcttttctgctcccaccatctttggtacacaccgccatctctaaaaggtactttgtgtaaatatccctgattattattattattattt

SEQ ID NO: 184152 - DNA, 3146 bp, Cannabis indica
gatttttgagtatgttgttgttgttttttgtttggttttcaaagtgattctctcccactactttggctatcgaagaagatcgtatttgattttatcagggcttcttggtgcattctcatggaccttgatggctagtcttgttgacagcaagtatagtgctgctttttgcatacttcttgggtctctctccgttgccttctcagatgttgtgagtatcttctaatttatgacttctttcagtattgttcagatgttatagttttatggaagctttaaaaatgtatgattttttttttaatatttataaacaaaatgtgcttcgtaagaatatgggtttcataatcataagttatttgcactatatttcaatttcatgattctgcatattgttttttcctcccaaacatattattctatctatgttttgaattttcttgtactaatcttaataagttatggttaatctaagcttcacattcgcctgtttgatatgaggttccctgcaaatagaatcagctgtagtgcttatcgatttcagtttctataatcctgaactttagaactaatattttgagattgtcaatgtcataaagtatgttgtcatagcttgaattaacatgacctgaatatggcatgtttaaatatcgtggtaattatgtcgtgtcataggtttacctatttataaacgacacgagtacacgaatggtcagccctactttagagtttgtcaatcataaagtattttgtcatagcttgaatttgtctcactgcaagcattgacaagcgtcttagggaattttccatgttcaattccataatgcatttcagaaatttgataaagtttgtgtaggttgtagattccatggtagtagagagggctcgtggtgagtcacaaagtgtttcaggctctcttcagtccttatgttggggatcctcagcttttggtggaattgtgagttcatacttcagtggctcactggtcgatgcttatggtgtaaggtatatgttgggatttctcgtttcaactttctcatgctggttattgttgaacaggacaacttaaggtttccattgtaatatctcaggtttgtttttggtgtcacggcattactaccactgctaacatctgcagttgctgttcttgttactgagcaacgtgtggtaggtccagcaagggggcaaattcctactttggctagctcgagttttctaagtagcactaaacagaacattattgagttgtgggatgctgtcaagcagcccagtgtgtttctacccacaacatttcttttcctctggcaggcaacacctcagtcagactctgccatgttttacttcacgtatgtccatttcttacccctttaagtatttattgtcacctttaaatttacatttttttacttctttgatatcaatatttccttttagttctacacatgttagtgtgtatatatatatggattatttttgaatgggtaatacctattgatgggaatttttaaaaactaactataattatatgtcaatttataaaatattaatttttaaaaataagattttagtccaataaccgataataaaagaaaaattagagtttttgtgtttaatcttactatttaattaaaaaatctctctttttatgttatgtcaaaaatatgtttatattttatctgtctctcaccaatttaaactcaattttattttttctctcttgaccttatagaacaactttaaccatataatgcaaaaatgaaagattttttttttaattagatagcacaattaaacatagaaactcaaaattttctaataatacccattaagatatattttgtgtgtgtgtgtttctctagcatgtaccacaatgtgtgatatgaatttttttttccagcacgaacaagcttggttttactccagagtttctaggacgagtcaagcttgtcacttcagtggcatcactgcttggtgtaggactgtataatggttttttaaagaaagttccattaaagagattttcttgcaacaactatcattggttcagctcttgggatgactcaggtttgtgatgaatttctttctcagatatgctaagaccaaaattgaccatatcaatgatttagcaggagtttttattatcactttcttgtactgtaatatatttatgtatctatttatacactctttttgggctcaggttttccttgttactggtttaaaccgaaaatttggcataagtgatgagtggtttgcagctggtgattctttaattttaacagttcttggtcaggtaggcattcttcaaaagtattttagttacaattctagtgttaattttgctagacactctgcattacatttcccgtatgttacaaaacagttaactgaatgcatcactatttccaaaacatgtttgtttacgactgtttttattaaatgattatagctaaatactgataaatgattatttgcaggcttctttcatgccggtactagttttagcagctagattatgtccagagggaatggaagcaacactctttgcaactctaatgtccatatcaaatggagggagtgttcttgggggattgattggtgctggtctcactcagctctttggtgtcaccaaagacaagtttgataacttggcttttctgataatcctgtgcaatctcacctcacttttacctttaccatttctaggccttcttccagacgacaatccagattctgattcagacgaaagtaccgatattgagatgaaatcaaattgagtctctatgtcaaagtccttgttttccttcgtgtgtcatccttttgatgattgcccttttgaggccggagctatattattataaatttcaatgaaagagagaaagaaaaccctgtaaatattacaaggttagagacacagaatgagtcttttttttgccccctttacactgtactaacttataatattaatatcttttggtaaaatgtcattaattttttcttactcttaaattttcttgttttactcggctcttctgtctaatttatcattttcattgtttataatactattttagcagtgctagtgctgtcaaatgtggtcttgctttttgttaatatttatttagatgtatatttttatctttatatattaa

SEQ ID NO: 184153 - DNA, 2135 bp, Cannabis indica
tttttaggaacatgcaggagcaacctctcaggattttccaggaagcagaggaatttcttcagttctaccaacaaacttagccaagcactagcttaagcccaccaagccaagaattatctagttagaattattgggagccattaactctcgaggaaacctaacttggaaagttatgtgttttcacacaaaatctatggtatccacttttgataccaaaataaacactttgccctatccatcgaataatgtgaaggttggcatcgtgaaatctttaggctttggttcttctatgatccatgtagcaaatggagatcttgctacatttctcatagcctccttatatgggttgtctagctctgcgatcttgccttcattgattttggccatagcttcttccatcacttgttctttccattgtagcaagtcatatttggattgctcaaaatcaaaacatttagatcgaatcacaaatggtgataacttatgtgcattttgtcatgtgtagcatcacactctacctcgttttgtttatcgctatttatctgttgataatgattttgagatgattgctctatgccaacaattcaaaaattggtatggaagcagatccccctttttctgttaatagttaatcttatctctttaagcagttattatcattcggtaatgtcttgcataaatttttacaaacactgagtgacgtattgacgatgccaacaattttcatcttgatcatgcttacctcttacttcagtaatgcgcagttcttgttgaaagttttcctccacgaggcatcataattcctcattgtgtttgtcatgcgtagtcattttttggtttatctctctcagttctgctgctaaagtagcgataatcgatgatttgatttgacgtgtctccttcatttgtaaccatagttacgcattctttaatactttcttggatctcatcctagactgtaacctagtcctcatatttttcattctcgtgattcccacaggcatcgctggttgttggcactgaaaattagttcaacaacaaatttatgtttgcacttcgaattctttacactaggattatctcaatcgaaaagtacaactctgctttattacataattctttcaagattagaaattgttctctctctttgatcagtggttttgaactcgagtgtgtttttaaaaatgcaattcgacagagagttttgacgggactagtgtggtcaagaatctgccccctttttgaatgctggggtctcctatttataggagggaatagttgtcacgcaatccttttcctcttcttaaattattccacgtggattcgatcttcttatttcctcacaggctttctcttctgcttttttcattaagttcttgttatacccgaaattcggctgtacttcaaaaagtgacacgcgtcaatctcgtggaatctgattcaacaaatttaatggtaattatgttattaaatgcaaaatagaataacttattaaatatagaataaatagagtatgtccataactcgctggctgtatagtattaagcgagataaggatatacaaactatcaaatcatgtattgacgagaaaccaccttgcctcagaaggcgtaatcccaagggagccatggacaatggatagcgaggcatctacctcactgtatgtaaagaagtattgacgaggcgaatttgttattagaacacttagcgtataatatacattataataactaagtgtaataacttgaaggtcgtgattgtccattctgtaaggccttatggtcaaatagcagttcttaagtttgctcagtacattggtgttcatgccattgctggaagcttatgaataaaccaagtcacttgtatactaggcgagacgccccaacaagatacatttggcaacgtgttccaatccatgtcaacgttgaccgctataaagatagttaaagtcacagttgtgtaattatcttatattatctacacgtatttaaattgagcgtgattaaagtccataatttcggagaatattgtcacgggatttagatttaaatgtaattaactgcctactcatattactataaataggggcagattatacaataaaaggggatggaaaaaccttagaaagaaaaagg

SEQ ID NO: 184154 - DNA, 1533 bp, Cannabis indica
gaactaggagctctaaagagcagacagccacaacaaatagaacaaactcaccagctagcagccaatccatgtctaccatgtaattagaaaggacagcaaagagaatatccccctattcaaaagttgagcaaataaactttcattaaaacaattgaataaacaatcaaatgagctgttagtccattcctccatgaagtttacattacagcaaatgtgtaatttaagcctgtcgttccaccaaagctggtagggcacaaaccagggaaacccttaaaacctacgactttctacaatgatcaagttgtttgtcctttaaaagtaatagagtttgtacctgaatcacatcccttatagaaacacaagaggtatttgcccattggggcaatccttgtacgcttaaaagtcgaaatgtcagtggcaagttatccacagaaacatgaaattggcgtatggcttcctcattacaatctcttttagacaatgaactcccagtcactttgttgcttccttccaccttgctctttttttccatatcgagaatcttggcagtacagaaagatgtgagacacttattttcaattgaaattcaaaattttcatctaaaaagagaatgtacttattctattacttctggaaatcatgttcaataagagaaacaagttactgaagttgaaaaaaagaagctagccataactagcaaaaaccgacgattacctttgaattcttttcagaggcatcggtttcgcatgtttgtcttaaccttttacgactcagcgcatcactttccccagtctctctaccattatttgagccactaactggcatatttttgtcaccacccaatgtcacatacttgaaaaagtaatgccctggaatcaactctatcacatctccatcacaaatcgtcccattttctctagaataaagcttttttcgattactcccagaattaacaacaacaggattgtttccttcctaccataccaaccaaccaaccaataaaatcaaacaacagaaaaaactcaaatacagagagatatttttcttttcataaataaacatagcataaaatgtcagtaaattaccacgaccagactcgcagaaccattgggagaagcagtaagagtcagatgcttgcggctgagtctcttctccgagacggatatgctgttcctaccgatgaaattaagtccccgaaagatgggtatttggggtacttcagtgtcttcctcatacttttcgttaagaggaaccaaataactaatctgcaaagcaaatacatgcacatggaaaacagaatgtcgtaaaagaaagaaagaacctacatagaagagcaacgattgacggagcaggaggaaccggacctgaggctgtgccatgactgagttttacagctgcatgggcgctgagagcaaagaccaaaaaaatgcagtaccaagatttttgttacctgagtgatttgaagaaaatgcttttgtggaattcttcagttgaagccaattttctgcaatatatatacatatatgaagtaaa

SEQ ID NO: 184155 - DNA, 6671 bp, Cannabis indica
ttatttgctaattttttcttattaaattttgtgttttctgttttttaatgctccttattagtgcaagttataaagataataaattgactctctaatttttttttttattttagattatttattttgtggttgatttagtttgaagtaatttcttttaaaaataatttatctttcacatattttaacaaataattatacgtgtaatttatataacaatttacgataataataattataattcaactaaataatgtgatttaatattttaacaaattaagattataatttttagtatttttttatagtacattaacatattaaataactaataatttttttaatatattaaatattaattttatatttacaacataaataaaaaatttttaggcgcggtattgttacctagtgtataataattataaatgttagaagagtttcacttcaaatattttatttagtttttttaacaaaatttagaaaccaataaaatcaataaaattttatttcaaacatatgaagaaggggaggaattaaaaaacatttggccttctctccttcattttaggcctctctcacccattccatgctccctactctccactcgtcgccatgcctctagattccctcgataaatctccttccgccgccgccgcggacgatgcctgcctccaccaacgcaacctcctccgtcccgtcggagggatagaagagacgatagggattttgatcgtcctccttaccgccgcgattatggcgaccggagctcgcctccgcctccgccgttgagggaccgggacagggatagggactataagcggcgccggagccctagctctcctccgtaccgtgagcggcgatattctccccagtctttaagcggtccaggcgcgttagtcctcgcgggggttatggacctgatgataggttagagacattcatttatttttgtttggttcattgattttgaaattgatttattttgttaagaaactgtaattttgagaaataatattattcatgtgaattaagattttaagagtacgaaagatatgtcagaggtttgttatcgtcttagaattacaagtattgccaattcgtaagtaaaagatattaagtatcaaacacccatcgagccaccacctccaatacttgactctgttccataagcactctgctaaactatcctccaaatcattgaaaactcgatggttattttccatttacggaaaccaccatagccaaaaccaaggcgaaccaaactccttacggaacctggaccaaacctatattgctttagtgcaattcaggaggcgactgactcaaagactcatgggtcaaaaaaagattcgaattggattgagagaagtttatgaatagagtgaaaatgaaaaagaaatattgtaaatactctccaaaatcaacagctagctgaaaatcttaacaattggttgaattagaattcaacaatcttgaaaacgcaaactacacttagacacagttaattctctatgtaaagatcgttaagctcagaagtttccagatttgaagactcctatcgttttgtgccttccaaaagtctcaacatcataattcattttgagacctgctccattcacccaaatttctaatgaaacttgaatttcatgagtaggagccgccactgcttacaaagctctttgttgatgtcaaagaatgaatactcatactgtgagaattagacaaattttgcgacactggaaaacttaatgctaaggatactttttgtaatcacaaatgctccaaaaatctgttcttattcccttccttgcctttagcttttaaaagtttgaagaatcctcataatgccctgcaatgaactttcaaggatattttatgttacttgtccagcctctaaatcctacccattagacttcatgccacgtttacttttaatgattttagaccagagtgcttgttctcttattccaaagggaatcttgaacctatgtgcaaatttgatagatggttttagtaggatctttaaatgagtaatcatatgtgcattttcaatgattttggacaagtggccttagttcttatcgaattggactctctttcagttatattgtggatgatgctattttaagtgctttccatttgtttaaaatctatgaaacttaagacatgtttgatagttctattttacaacagctggatgtactggatagttttgataacacttacagctagaaggcaaagtttgggctcacaagctcttctctcttcttttcctttgcatctcatgctttagacttcttggtttaagtacttgcttttgcttgagtggtgacaattgccaaatctttctataagaggcaatatctgaaattgaggttttcctattttgttcgtatcattacatttttaaatgttggaattagatttcttttgttcccacccttatcatgtactttgatgcaatgctcttcttgtataatttgaatgttgagaatcttgattgatcttgttacgttcatgctacaaattattgggatgatgttttatttgttaatatgaaaagtatcttatggatgagttttttgactgaatatggactttcaaatctacactgttttgtgagttatttttttgttttctttttacggggttcaggtttggatatgataacaacggtggatatgagcgtggggtgggaggaagatcaggttatgctgatgagaagtctcatggtcgatttaatcgttcaatgggtggctatcatcatgggccgactggtatgttatactggtgtgtttatccacgagattttctgacttttaattagggcttagtggtgactgtgatgtagttttgcttatcaaggcaggaataagctttgtgaaatcacatttgcttctattttataataagtagttagccaacagacatgatattttggtatatagtgttcactaagttcagtattgtttgtcttttattcaacattgtgagatgcaaaagctctgattctatatacctacttgtaacttgttgtcacttgtcacctctctcatatacatacatagacagacatacatgcactagtttgtgtacatgcacctgtgctttgtcttgatctttcaaatttatgctatcatgaacataacaactggactgcgttgacattacattttctggcataccttctatttggcgtcaaatgtttctttcttattactgcttttacttctatgctatgaaattgatcaatatgcgcgtataatccttgggattatatgttgacagatgctggatttaatcgagggggttatgctgattcatcaaacagagggaatacacaaaggttagcttagctagtcttgtatttttgttcaaagttcaagtacactatggttaccttgatttaagaaggattcttgaaattgaaagcgttcaattcttttggaatatacttagttatatttattcttaattgaaatatcatagactaagttaattgttactctgccatgtatggaattaatgcctgaattctaatgtgaccctaatgtttatatcttggtggggaaattgcacgtttgtctaggcatgcaattgcttgatgaatttgaaaaaaaaaaattgctcatcttttgttgttatgccactagcatgtattcttatgtttttcttcttcttttttgaaagaaagtgtattgtatgcttaatatttgaaatggagtcaatattttcaggaggctgctcgatgtcctggaactttgtcgacattattattattgttattgttgttattattattaccatctctgcgtgctgtgtgttcactgggcatttttttttttttgctaagatgttcactgtcctatataaatgtcattacattacttgttcatagattgaaaatagaaatgttctattttgtcattacattggggtgaggaacgggagatatataaaggtcgtggtcatttggttatagccaatgactaaagctcagcaatgatgttcaattttcttattatttctgggctaccttacttaaatcatacaacacaaattttcagagaggggttgatgtcgtataaacagttcattcaggaacttgaagatgatgtattaccatctgaagctgagcgcaggtatgtccctttacttgaaatcttgatagaatggatgtttattttcactgtgaaatgatgtattcaaataatcatacagatatcaggaatatagatctgagtacatttccactcagaagcggactttctttactgctcataagggcgaggagtggtgcgtaatctatattttcattggttcacattgtttctttttgcattgagatggtgtacacgtgttctttttagttgccctttcattttccttttgttaattgttcttttacttatcttctaaactgacttgtgtgttgataaaggttgaaaaacaagtatcatcctactaatttagttggagtcatcgaaaggttagtctcaaacaaaaaagtgaaataattagtaaaaatctagctatcattactctttaagttgctccttttgttacttgtgtataaaacaggagaaatgaacatgcacggcaggtggcaaaggatcttttgcttgatttgcagagtggaacattggacttgtatgctctctcgcaaattctctctgtctccccctattttgtttagcatagactgtaatgtaatgatcacatttgttatataggaatcctggcgtaacggcctcatcatcaagcaaattaggacaagcaagcgaaccaaattctgacgatgaagcagcagacgctggtgggaaacgaaagcaacatggtaggggtagagctgatgacattgatttttcagctgctcccaaggcccacgcaatcagttctgaacctagacgaatagatgcagatattaatcaagcccttgctctcctacgtaagcttgatgatgaaaaaggcatcaaagaccatattttaaaaaatgttgactatgatagtgagaaacctcacggtggttcaggtcaaatagttattatacgtggtttaacatccgttaaaggactagaaggaactgagctactcgacacactaattacatatctctggcgtgttcatgggttagattattatggcatggttgaaagtaatgaaccaaaaggttttaggcatgtgagacctgatggcaagaatcatggagaaacaaatgaatccggggctgagtgggaaaagaaacttgactcattttgggaagaaaggttacaaggtcaggatttcttggaagtgatgtctgccaaggagaagatagaagcggctgcaaatgaagttttagatccatatgtaagaaaaataagggatgaaaagtatggatggaagtatggctgtggagctaagagctgtacaaaacttttccatgctgctgagtttgttcataaacatctgaagctgaaacatccagaggtcgtgatggagcttacttccaaaatgcgtgatgatctatattttcagaactacatgaagtaagtattattttttgcttctttgatcattacttttgtttttgtggaattcatttgtgatttagttgctaccttcatatatttgcagtgatccggatgctcctggtggaaaacctgtcatgcagcaaacttttcaggtaatttgtattcttttatgctatctgttctaagctgggaataaataaaggataataaatttatactctgaaattcatttttgaagctgataataacataatctctgcagctctttatttctcgtcataagttgaaaatgatttctgtctccagtgtcttactttatcccacagagtttcatgagaatcctcaacatcttcaaaaagccttctgctttgccctgaccaaatcatcttacaaacaaatggatatctatctcttgtgcttcaatacacacacatacatatatatatatatctgtattttctttttttgaacaatggcgatttcattactgcttgggttgtgctacaagtatttactaaagcattttgtcaaaaaaaagttatttccttaaacctaattacttactgagtactgaccctcgtttgtgtactttttaccattacagaaggacagacctcagaagcgtaggcttggtatagaaagccgattaaaagatgatcgtcacctgagaacggttgatggtgttaatgatggagagcggtttaataattctgagagttctccaagccaacagtcgaaagctggtggcgtagaaatggggaatcaagacgaatccatgtatgatgcatatgctggacaagggatgggtgctccttttgcctcagatatgccttctgtattgatgcctgtacctggtgctgggttggttaccatccatcaattttatttttttcaaatcttgttcatgttacatagtgaatggcaatgtctaatttttctttttaattattataggcctttgggaccctttgttcctgccccacctgaagttgcaatgcagatgctaagggaccagccttctgtgtatgatgccagtggtagacaaatgagatctggtgctcaaattggaggaccgacaccgattcttactgttcctcctttcaggcaggatcctcgacaaatgcgaaggtacgctttttgttaaataggaaaaaaaaa

SEQ ID NO: 184156 - DNA, 3131 bp, Cannabis indica
taagaaagtaagaagttgatcaacaataccaactaccactacctttcaagaattttaactcaaacctccacgtcccactacctataaaagcatgcatgtcatggtttagatttcaatacacaaacattctcccttcatctcaataagaagttttatcatcaatttctcaattcttctttgagtcatttgattgaaattaacatggcttatcgacgcattccaaacatcgtgttaccatttttggttctcactttttgtttctatatcaataccgtgatggttgccgaggcacgccatttgctagaaactactcctagttttccaaaggtgcctgagattccaaaacccgaactccccaaaatgcctgagttaccaaagcttgaaattcctaagattcctgaagtaccaaaacccgaagtcccaaagttgcccgaggtgcctcatgagctaccaaaacctgaaattcctaagattcctgaagtaccaaaacttgaagttcctaaaatgcccgaggtacctcatgagttaccaaaacctgaaattcctaaggttcctgaagtaccaaaacttgaagttcctaaagtgcccgaggtgcctcatgagctaccaaaacatgaaatttctaaggttcctgaagtaccaaaacccgaagttcctaaagtgcccgaggtgtttcatgagttgccaaaacctgaaactcctaagattcctgaagtaccaaaacccaaagttcctgaggtgcctcatgagcttccgaaacctgaaattcctaaggttcctgaagtaccgaaacctgaagttcctaaagtgccagaggtgccccatgagttgccaaaacccgaactccctaaagttcctgaagtccctaagttacatgaactgagtcatgatgatgcccctaaggtacctaaattgccaaaacttgatgctcctaaattgcctgaattgccaaaatttgaagctccaaaggttcctgaattgccaaaatttgaagttcctaagtttccagaattgccccatgaacttccaaaacttgaaattccaaaactacctgaaatcccacacgagcttccaaagcccacattgccaaccattccctccttcaatattccaacccagaccactaagccttgaacatttaatgaaatgtcaatttcataatttactagagatgatttatcagacatttatatacatacatctacatacacttttcgatgttggatttaaacatttcatgttttgtgttctgttataatttgttttgaagtatctttagctagctaagggagtgatcttcttatgatcattaccaatattgttgtatacgtatacgtgtgctagtactcttgtactaatcggttttattcgattatagtttgtatttaattttgtattatataaatataagaactttattttatttttgtcacactattaattatatattcctgtgaatttaatttaagtttctctccttaaaatttctagcataatataaggtgtttatggtggcttttataagcagtacatatatgaatatcatcgatatttatttaaagaaagatggttttttttttttttatggtgaatggtgagggagtcttcatctaaacaattgacaatattttgattgtccaatgtatgtaaatacgacgtagttcatcatggaatttgcactcgagagaataacatggtctttttatgaacaaagatgatgagctgaacaaaagtgactaaaactgaaaaatgatcaaaaagaattcacaaaatacaattttcctaatctaataaagcaagttttactttaagaagatttattagctcagtatgttttatttcataatggtacgaacgcatggacggacccacataaaggcgagagggggcagtcgtctctcctgaaaaaaaatgtatatatattttgattagttacaacatatatttgtaactaaatgtgataaatataaacataataatagttttgatatgttggttagattatcttacacatgttataaaggttaagggttcaaaattaatcctaattaataaaagcattttaggttgtactgaaaatttattattattattattattattattattattattattattattattattgtgaatttcggtcaaaagaaacccacaaaaatgataatgtaggaaattaatgcagtccgaaactgcccttacacccaacacccaacgttcaaaaactaggggtaaaaatgtctttaaccctttgtgcggataacaagggaatattcccatttcaaaaccagatattgctttttcaaaaccctactgccttttatggcagtatataagcctcccctttttgttgatgaaaaccctagcaacaaaaatcacttttccctcttcaaaacctagcagccgaaaacacttcagcctctctctccatcttgttttcttctagcttagaaaccctagcagttgcccctcatcttctcctcctccaagctttgtattgcagcagcctccttcttttctttcctcctttcttcttcaagctacagcagtagcttcaatggccgaccctactgttcttcttgttgcccttcaaatctgcaacacacatacaaaaccgagagagaaaatagtagcaacaaagatctaaaatgatctttgttggttatagaagagaaaagccgaaaaacacaacagaaaaataaagaagaacactaaagagttgatttcagagttccccttaaatcaagggtacatctccgtcaagcttccctcaaagacgcttgaatctccactatgaatgtcaaaaccggttacaagtttattgagattccatgctacaaatcagtaggtaatctcaagctttttctctctttcttcactttattttctttggtttatcttaaaatatctctcactaactctctctattttttctctcttgtttctgaggttgtttacaaaagaaaaaactgctgccttatatttctctacaggagccgaacacaccttgtgaaagtgggaaggttgaacctctatttatattgttgttgctggttgttgttgtgtttgtttcttagctgagaaatagttataatctgttgttgatatttttcttgtaaagctgaaagttt

SEQ ID NO: 184157 - DNA, 3368 bp, Cannabis indica
ggggtttgttccaaaaaaagtaacattcacactcatatgaaatcgtttgataacaggattaaagcacttgtaacctttttgattaggtaaacatccaatgaaaatacatttttcagcttttgattctaatttggacctactagacctttctggagtgtgaacataagcagtacaaccaaatattttcaaaagaaatatctgaattaattctacaccctaagaataattttttcaagcaatcaagagtagtatattgtaagactctagtaggcatcctattaattatataggaagcagtaagaacagcatctccccatattttggaatattcatgtaaaacatcatagctctagccacttcaaataagtgtatttatttcgttcatctaagctattttgttcaagtgtatcaggacaagaagattgctgaataattcctttttcctttaaaaatctgcctaatgctttattaaaatattatgttcccttgtcagatgtaaaaatctttaaaaaagttgagccacatcagatttttctttcattaaaaagattcaacaaagacgagtatcaaaccatttcttacctgaaacactggtgaccttggagggtccccgaaacatcgttgtggaaaaggtaaaaaaggttagagaaggacaataagattttttaacataagtgttttatggctctcggccaaaacacaactttcacattgaaaataaaagggtttaattttttaaataaaccagggaacaaatgtttcaaataggaaaaactagaatggaccaaccgatgatgccatatcattatttgatcaaaaatagaaaaataacagatactaagtccttaagcaattttattaacagaaagagtatcctcaaagtagtagagaccattaatcatcctaacactgctaatcgtctttcctaagcgttggtcctgaaaaatacaatgaaattcatagaaaacaacacaacaattagaatctttaaatagctaactaacaaataaaagattacaatgaagttgtggaacatggagaacagatttaagaattattccctcaacaaggccttttcccacaataggtgcgagagttccattggctatccatcctaacttttttattacctggacatgggatgtaggattcaaacactttagaagaatttttcatatggtcggaagctccggaatcaagtatccatggaataaaagttgaaaaggaatgaagagcatatttttcaatatcaatttgtgccacagatgcaacagataataccagatgattgcgaattggacttcagcagctcatgaagatgaaccatgtgctcttttgtaaagggaagagcttcagtagcattgcgcccatatttctcttgtagtttccagattgttggtttcccatgaatgtgctagcatgtctaacgtgtataacgaggcttgttgcaaaagccacaccaaacccgtggcttttcatcagatttattccaagtggatcggttgtagcctcctccaatagtagtagctaaagttgacccttcaacagctgctccagcaaccttctttcccaacatgacattccttcgactttcttctcttctaacctccgagaagacttcagaaataggagccaaaggtgggcggccaatgattcttcccatcgcctcatcaaactcaacattaagaccaaccaaaaacttgtaaatctgattgttctcgatggtcttttatgatgtttaccatctttaacagattcccattcatatgtggcaaaaagagcaagatcaaatccttttcaacacagtaaagtatttggtaacattgtcgtcaccttgttttatgtcaccaagtttgagattcaactcaaaaatttgagattgattctccaaatcagaatacatttgatgaacatgatctcataattccttagcagtaggataacacatgtaatttgaactaatctcctcctccatagaattaaccagccaagtcataaccctggaattttctgcatcccatgtagcataagccaagtcatccttcttaggacgagttcaatggggtggtatggtagggttgcttgtcaaaagtgggaccaagtgtgggtgaggtggaggagagagggagagagatttatagaaatattgtggcaaagtggtttctatttagctaagtagctctgccattttttttttttatttattttaatatttagaaaagatttgattggttaagagctgagggtgggtcctctaaaacaacactaaaaaattgcttccattaatgatgctcttaggagccttcttatcacccgtcaaataggccatattcccacgtcctcgcatgtacatttgaattgattgagaccaacgcaaaaaattatcaccattaagacgaatggtggtaatttgcactggatgggattcagaaacatgtttagaggattcagatatgttaaggttgatagatttcgttgatgggatagtagtggactcatgggagatatctgacatcgtgaagagagaaagagactagggtcggctctgataccaagtcaaaagtagggaaattttcttatattttattttattgtgaatgatacaatacatgcacatataaagttgccctaaaacaatacaataatcttctactttaatgtcaaatcaccctacttaataactttcctagaataaataaaattatcaaataaatcagctattttacaaatttacacaatcattctgaaattagaaaactttctaaaatagtttgatttccttccacaaaaaggtttagccatcaaccgtataggacttccaatcatacttaatcaataaaataaacactcaaatgaatagcataacacttttgaagaaagtttaccttcttttgcattcttctatttcgaattttcggactttcctttctggtatttgccctggcactaacaaccaatggcttcaaagtcaaatctgtagcaaatgtaactaattatagccaactaagtgtgcttggttaaggataaatatgaacataataactaatattaagccctcacttcaacgtcattgtttatttctattttccattatttgtgcgagtaatggtagagcgtgtagtgtttcacatacaagttaaccggaaactcatctacttatgaaaattgtgaaataagagtaactcacttttaccgtgcatatttgtagatggcaatgtgaagattccacaaagattgggtcttctaagctgcaatgtggaaagattaacaagatccatgccgtgttcttttccaaatttctaattgcccagaaacaatttatagctttgaatccttcctctgcaagtcattgagctcagaattttttt

SEQ ID NO: 184158 - DNA, 2791 bp, Cannabis indica
tagctaatagctatgtcatgcataatcagttgctccatccaagcaaaacatggaagcaaaaagcacaccaattatttatttgaaaatttcaattattattccaatcaaccagtggtaatcaagccgtgcttcatactttcatctaaacatggcatgagccagtaagaaaagcaaaacagaatacaacagactggatctgtattccatataaatctaaagagtaaattcccacagttatagagccaaaggcagtaatggtgtgtgtggtgcacataaatcccacacacacaggcactaaaagcaggtgagtagcagtgtctccagtgcaacaaaacacagttattctttacaaagactattgaacattgatcactgtgtacaaacactgcttcaaaaagttgccctgaatcaagttctcaagcagcataaaactttctcgtacagaaatccttgtttatagtttaaactttttgaataattccgctctaccatattctaccaaaatactcattgttctctctctctctctctctactttttcttcaatctctttttttttttttggtaagttggacaactactaactgttcaatcatagaggtgaatgataagaattcaccccttggtgacagatagcacactttattggaaatagtaatacaacaaaagctgcaaagtactaaacttgtctgcagtacgtaaggtaagacccacacaagggccacccaccaacagcaaaacaaagatgaatgccttacatattatttatttcacgtgctatttcagtgtcagcctctttaatctttacagtaagtgagaaaatgcaaatacagaaggacaataccacaacggttcaacatcacaattaaaacatactgttaacactttctattaataagaaagtcaaaactcaaaaccaatggtagaaaatgacgtaattgattaaagaatagaaatttgtgtaaatcacaaccacaactccaacatcacaaccaaatcataggcataagcatgtgagttcaattcaatcaaaacattttgggaggtgggtggggacttctattcaaaactagataaatcaattaccaaacaacaggaaatgagagagagagagagagagagagagagtgagagagtgagaattgagtacctgaaccgaatgcgcttgaggtcatttcctccctgaggcaatgaaacaaacgttatgaggacaccaggctccacttgagcaacccattccttaggctcgtcttcctccatgaacacaactgactcggttcgtccgctcacagaagccggtgtcccttctccactagaaagccctttcaaccttgattccatttctttaccccaaacccttggcgtagaatttgagctccctgctctcttgtacccacaatggaaccttgccgagtccgaagccgcatcagaatcagcacagtttcggttattcgatgacccagaacagggcttgcaattcttgtaagcccctgaagccttcaacgctatatctttaatctgaaaacaaacaaattcaatatcaagtagcttactttggataaaaaaaaaattcttagttcggattcaactacattttctcgggaaccaaacgagaccaggaaagttttaattttattttttacctgagcagtaagattcttgatggcatgctttgacctgggagtcccacccaccggatcttcttctcctttatgttgcagagatccattgttgagttgtttcgagcaagctatacacgtcaacatctatgattattcttcccttatgaaatttacacccagatttgtacggatcacagacttcgggagtatgaaaaagaaggaaaataacagaaccagaaaacgagcactccttcgataaatcgtataaattcacaacgacaacaaaaaaaaaaacacaaagcgtaatacagagaatgagaacaaacaaacaaaaaaaaaacgagccaggtgagaatgaaaactcttaacgcttatagtgaggacaaaagaaaaataataggagagagagagagagagagagagattgaagaagcgtctgaaagtgaccgttaagggcggaagagaggaaaatagtcaaggcttggatccaaatatgtagcttcaaaaacaaaaacccagctgacaaattcgtagtctggactctgaatcttcgttttcggttcaaagacctgatttgagtgagaaacacgcagatgggtgtctctctctctccttttgagtctttctcactctgttttcttgaagctaagaaaaggcattgagatttgggcagtagcagcagcgctagtaataactaacagcaataataataacaataaattatatatataaataatagtaggggagtaggaggaggcgcaggacagtagtattaggaaataggagttaggaggagaaaggtaacggtgggcgtggtggagtgagtgagtgagtgagtgagttgggttcgggtgcatgtggtttggagccttcggaggaggggtggcgctatatgcgctggacctctgttttttggtgtctcgtgcgccactcaactcaagactgggtctctctcactcgcactcgcacacagggatggtacaaattgagagacagagagagagaacatttattaatactattatactaattctaattaaatagagaaagatgtaaataggaagctagtgaacaatgacagctctaattgtaattattatataggaaaatgttttcattgctttaaaaagttgacaattgtaataaggaaagaatttaaaaaaaaaaaa

SEQ ID NO: 184159 - DNA, 3781 bp, Cannabis indica
attttaaaggattttttttttacattttcttatatttcgattgaatcaataaattaagatttaatttttcaaaaagaaaaatacatagaaaattgtagtataatttaatgaaatttaaaataattataaataaaataaaagatccaaccaaagccaaactatccaaattccaaagaatataataaatgaaaacactcacattaattagtttaatttttcttttgtatttttacaatattaccaaacacttcataactaacaatatccacaaagaatcattagcaactcacttgaaaaaaataattactacattgttatgtttaaacacaatttagatcatgaatttcccactagaaaaactcactctaaacttgatcaaaactaaacatacaatttgcacacacaaaatcactcggtcaaagtcaacgcttaatcggttaataaaccgcgccttttctaaatcatttgcaatagttcttgaacaatctcagaaattggaggcctaaattcgggttccctctgaaatcaaaagagcaaacataagtacctaaacccgaaaaacttgtcattctttgcaatgacactatttcgaggtcaattttcactgattactcaaatatgtaaaggcgagacaaatttatatttcggtacctgtatgcatgaggagattatatcggcgaatcttgacaaagatttcatagaaaaagatccattaagagaaggatcaaccatccttgacaatgcatcaatatcatgaagcttaggtaccgcccatctaactaggtattgttccccgcgaggccttgacctatcgaattttttaaaacaaatttcataagacgctcttgacaatattttaaggaaaatgtttcatccaagagtactttacctgtcataggattttcgccccgtgagtagttctaacaaaacaactccaaaaccgtaaacatcactctgacaagtgtaactacccgattcaaattctagcgcgctataaccgtacgaattatggcctccagacatctacaaagcaacacacatccaaaataaatacttaatattttgcctaagtttcattactaaaaggtcttgtgtttcttacttgactcaatgtgaaagatgaaagcaaaggagccaatccacaatccgagacaagggtttcgagcttttcattaagaagaagattaaccgatttgaaatttcgatgaactactggcggttggcaaaccccatgcaaataccttgacataaaaaccgaaaaaaatcataaaaaatgcatttcaaaatactaaaatttctcaaggtaacatttcatctcaacttactctaaggcttttgcagctccaagtgctatctgaattcgcctattccacgaaagctttttatggatttcgtcgtgaatctgcaatgcatcatgaagagtcccgtttaagcaatactcatacacaagcaactgctgaccgtgctcagcgcagtaaccaacgagctccacaatatttggatgttgaagtttggaaatatttgacaccaattcgaagaattcttcatcacttcgttgcttaatcgctatattattgttgtaatccaatttcttcactgccagaagctgaaaacaaaatagagtattagacatttgaatcagaatctcatatccaaaatgattggaagaaattatacctttccatcaggaagctcggccttatagacgctaccaagtattcccgttccaagaaaattctcctgggagaaactatttgtatactgctgaagtgatgcaatggtgaacaccctcattgaattcaagtgttgagaatgcaaaggacgttcgattgaggaaggtactcccgggatttgtccactgttctcaactgaaaaaggcggtggaggaggtggtgggagaaaaatatcatcttctgtgtctgtcatgtcaatctcactatccctcatatcctttgaacttcgaacacttcttttcgaattcatgaagcgttgttggtcatgatgttgcagcttcggtggtaaacttgttctttcttgtggccgaacaagagtctcatttgaagattcgtcgggtttaggcttctcacttgaactcttgtaggaatcaaagtattgttctttagcaattttatcccttcgttttgctttaacacatcttgataatgtaatgcatagtaataatgcaataactatcgaaacccctgcaatcgcaatccaaatgatcgccttcgcagttaagaacttcttagattgaccgggcattgttttgatgggagaagaaggtccaatgggacgtttccaaggtagttcttcagaagaagttggagattgtgctgatggtgatggagtaggtgcttccaacggcgataaaattattgttgtattgaatggatttccttcttttctgcaacaaacaagccaacataatgaatttagtcataccaaacaatacacaattcgaccaacactaaagctcaaatggtcaggcatgtggtttgttctcgtaaacactccttaaaacacaaatgagaaggaagttggttttacctgaaatttggaactgttaacaacttggggggaattggccctgagaatagattgttctctatgttcctgtttaaaataaatgcatatgagttgcctaaccaaattcacaaaacaattcttgttccttaaccgaaaagggtttattaacaaaagaacgaaaaacactatacaagtcttgaaggggaagatcttgtaagacatcaagagtaccaccaagccggttgttctgcaagtgcctgcattgaatttcataaattacaatgagttgaaacaaagaatatagcaaatacaagtagaaaatagtatgttatgttgttgtctaactcgaaactcacagtgttgaaagtgctaacatatttcccattgagggaggcaattgcccatctaagctgttagttgataaatccctgaaacatgggcatatcatcccattcaaaaccttagaacaatgtagtaggggaaaccgaaacaaccaatttaaacaatgcttacagaatcactaagctagtaagctgctgaaatacatctggtataggtccaacaagacgattgttatcaatcaacctatgaaaaaatagagtgttaagtactttaacagatatagcttgttaacaacatgctctttcggtttcgtttgagacttacaagtacaacagctgacttaaggttgagaaggcgattgggatgcttcctgtaaactgattacccgaaagagaactaaaaacaggaaagaaaaagcaccaaatttgattcagaatacattaattgaaagagattagtataagagtttctaaaaacaacataaaaagtactaacaaaaacttttctttagtaagtttacacatgaatggagtgaagtgaagttcgaaacatacaagtttcggacggttggaggcaaagcagaaggaataatccctccaatatgattgttactgaaatctctgcaccatagtcattacaagcaacaagaatcattactagaaactcagctttgaaaagaaaagaaaagaaaaaaatgatttcttttttctttaaatatcgatttttaacatttcaaaatgattcaagaagtaaacaaactccaagcttggacatattacaatcaacaatagacactaaaacattaaggaaatatgtatatgtattttaagaagagtaatttgcggcgtaaatacttaagtttaactcctaattacaaataagtgtcaagttagtatccccttgttattttttt

SEQ ID NO: 184160 - DNA, 2926 bp, Cannabis indica
tttttataatataatatacataagaatatataatatatatatatatatatataaaggatatgtatattctaaagaaaaaaatataataagtctattaataataattagttaaaaaaataataaaaaaaataatcctctatgcctactctaacaaaatatttgcacattccattttcttttaatttctattggcttattttctttacctatgctatgaggacaaaagaacatgttttacagtagattttccccatatatatatatatatacatagggacaattacaaagtacaaccccttttaatcattgctctacttggtggtaccttacacagtcaaatatgcaatttccccatgcatcgagcggtgaactctaaaaaaaatattaatataattttttctttaaaaaaaaaatcaaaaaattgggtggtaataatcttttcccatttcatcacttgattacaaaatgagaatcaagtcaacgaagtttccaaacttactgagcaacaaccaatcatattctgccacgtaataccaaaacaatgtgaaaaccataaagcaatgaaaggggtagtttggacaattcatgtttacggggaacaaaaagacaatttagtctgaaactattttgacactcgttagatttagtgaaaaaataactaaatttgttgtataaatatttaaattaattaaaaattgtcacgtaattatttatttatatttaataattaaatatttataaaaattttaaaattataatttaaatattattaacgttaaaaattaaatttatatattatttaaaacactaaattaaattagtatgtacatagtaaattgaacttttcttattatttagtatgtaagaaattataacttaaatatttacaaaattagtaatttaataattgttgaaggttaaatttcattaattccaaaccgacccttcctgtatagagccagggaacacccacatgaccctgttcttttctcaaccgtttcaagccctccaaaatagaaaacaattaaatacatttatatatattttttaaatttatttttatttttaataatatttcactacccattttttattttctttactctcttttcctcaatatatagagccttgagctgttcctcttcaatactcactctttgtctctctctctctctcactttttcaaagtctctctcttttttggtgggtttatcagaaaaattatatacataactgataaaccaaaccagcattgtaatttttcttcatttataactgaaaaagttcagttctttaatatggagaaaaaagctgttgtagctactctgtttgtagtgttgctctgttttccggtagctttttccggccatgactatggtcaagctctgagcaagagcattctcttctttgaagctcagagatctggttaccttcctcgtaaccaaagagtgaattggagatctaattctggtttacacgatggaaaagccagtggggtaagtataaaaatctaatctttacaaaattacagagtaaagaagtttcgaactttatgtaaaaatttgaagttttcaggtggatctggttggtgggtattacgacgccggtgacaatgtgaagtttggattaccaatggcgtttacagtgacgatgatgtcgtggagtataatcgagtacggtaaacaaatgggtgagaatggtgagcttggtcatgccatggatgctgttaagtggggtactgattacttcattaaagctcatcctcaaccttatgttctctatggagaggtaatttaattagtaattaagataataatttagtataatagtattatacacattacttcttttgtgattgtgagtcattatctttgtaaagtgaattaatgggtttattattaggtgggagatggtaatagtgaccactattgttggcaaagaccagaagatatgaccactgatagaagagcttacaaaattgacccgagtaatcccgggtcggatctcgccggagaaaccgccgccgcaatggccgccgcgtccatagtcttccgccgatctaatccagcttactctagcgagctcctccgtcacgctcaccaggtcatttacttttttacccttattatttatttattaaaaaggaaggtgcttttagtgtttggtgtgggaccactttataggtttcagttatggtatagtaccgtaactggcgcatattagctaggtaaactgagtacgctatcttccaccgaagtgagtaaacactgacagtgtcgtgtgctgtcaatgagtttagtcgttatggaaactttctttaatgcgcatatagcgtacgttagcttaatacttgtagttattaaggcagttgtgtgggccctacttttattaatgttgtcagatgggccgttgtcattgcaactgttatatcggcccatatttattcttttaccatacttagcacacagtaattgtgtaaaccttaaattaatagttttattccatacaattttttttaatatatttttagttacattttttaccatgaaataaccataaaatgtaatttttctttttttttcgataattatgataaaatctctttaattttatatattgaaattttctaaagtaaaacgacgtcgtcttactggggaccgttttgtgccgtgaatcacggccaagttgtgttagttgaccgtactaatacatgtgttaagtcacgtgagatccttgtcggtggttttgtaacggccattaaacaaaaaccaaagccaagccacaccacctcacgtttcatatccatccttttctgtatttttctttttcccaaaatacccttttggttttacttgaattaatcctaaaccaaaaaaaactaacattgtcgtttattgttttcctttcagttattcgattttgccga

SEQ ID NO: 184161 - DNA, 2687 bp, Cannabis indica
cgtcgtggttggttttcttttttttttgtttttttttttctttctttcggttagaaagagatgaagagagaagggggctgagatgggttgcgagttcgtcggagtgggttgcgagttcgtcggagtgggttgcgagttcgtcggagtgggttgcgagttgggctgtgtgctaaccgtggtggctgggttgttttgggtgttgggtttgttcggctgagagagacaaagagagaggaagagagaggaagagaaagggtttcaaatgagaggggtagtttaggaaaattggtaaagtggtcatatatgaccaattttattaactttacatttaggggaaaaattattagataatttaagcatattaattcaaatttcccttttcaattctattaatgcttttaacctaaaaaataaaaatttattactattatttattatttttttcaaacctttaatattctttttttttattattctattggaatcaataataatttttataaatagttggagttttttggtgttttataaaatatatactgaataatattatttacaaattacatttttttaggggcccaaatttttaattagaacagggcctccaaaatgtttaagacggccctccccagaggtagcacttaactcaccctaggggtaggcactcaacataccccatggggtactagtcacttaacccactcccaaggggtagtcactcaacccacttgggataatcatttaatatatccccgagatagtcactttacccaccttaggtagatgtattagctttacttcctctcgtatatagttcaaactaagggtccatccttctttttatggaattgtatcattgtgtcaagtgacttaacatattccttattaatttagtctcgaggtactctcgtgctacgtgtcatcatcctcactatgtcacccttgtcgaatttgggtaaacaatctcaaaaatacgagatttttgacttatgcataaatactaatagaaccatcttattatatgtcacaaacttaatgtattacaccttcacaaatgaactttgctgacccttcaagaatacgatctcccttcgatttgctttcctcccgaagtaacacttgaaccaccttccctgaaagcttgagtaaccttctcccaaaagttggcactttattcttgttgggaaaattaatgtgcaagtgtacacaatcgtcaaacaagtaataaagtgataaattgagtattatctctacaaaaaattagaaattattttataaatctaattaatattaaattagtttcaacaaaaataaaataaaactaaattaacaaaagttcatattaaaaataagttaaaattattaaattgatataaaaatgtaaaaaaataaaataaaattaaaacttatagaacacttttgttttatgttttcaaaattaaaaaataaaaatagttataaaatacatttaacacttttattttttaatttatcacaaaataaaagtaaagtttatgtttttaaaatttaataataataataataataaatttttataaactataaatttctcttgaattaaaacagaaagctattccactatgttttatcattagttccaaatttcaaaagatagatttgagtaataagattgaacttgtgttcatattttgtgcaagacaatgtttgttggcctctactttgtctttctccatatattgagcataactaagctatataaccttaaaaaaacatttgaaaattcatattattattattattaaaaaaaaaaaacaaagtaaagattatgttgtagcatattccattttcattacaaagataccaatacaagtccaaatttgtattaagctttttctacaactgggttttatttcatgttagcaaattaaatcatcatcatcataaacaattcaagtttatggatcccaatttattatggattcagctaagcattattttgacaatgatgatgatgatgatgatgactaaagcccatattcccacaactttggaaggcccatttgagcccattacacaacagtttgattcatcacttagaaggggtagtgatgatttgcccatgaatcatcccaggttgatgaaaaatgttacctcaaatttcccagaacagattgctattgcattgtcttcttctccaacttccatttgggtttcttgggtcactggtacactactattactacttctctattttgccttttatgtatttattaatatgtatatatatgtatataggtaatttggtgaagtgggttttgtttgaatttggtcaggggatgcacagattggtttgaatgtgacacccattgatccttcattggttgccagtgaagtatggtatggcaaaagaagtgaaaactattcaaatgtacagaaaggggtttctactgtttacagtcaattgtatccatttcaagggctactaaattatacctctgggattattcaccatgtcaaacttgaaggtacattcttgttcttgttttttaaaccagtgttttatagattttcagactctgaatgaacttaaatttaatcaatataaacgaaaagcattagttatatgtgttttaaattcagtttaaattacttatcacagaacaggtagtttattgatattgatacaagagtaatttgtggcgtaa

SEQ ID NO: 184162 - DNA, 7592 bp, Cannabis indica
tttttttctttttttttttgtagggaagatcaagaacaagttgaattttctgctcttgtgcagcttgagaatcctgatcttcaacaggatacggttagtctacttaagttgtttaatagggtgaagcaagttgtggcttcgttagcttgtcctaagagatttactctcaaagatctcatcaaaccagatgctgaacgcactgagtatttcgtcagtgctcttctcaatttctgtcttcacaagtaagttatttgtgtttttggagatgaccaatcctaatatttgattttgggtattattattatgtatttgacgttttattgctcatttgctatgttagagagacaaaaatggcactcttatcgccaatggtcaatgaactgacacttctagaggatcagcgtaaggattgggaggagaagatttctcaggtaattttatagatattgttggttcagcccacacttgactattagccacttgttcttgcaggtgtttctttaatcaaagtctgttagttgagttcttggtttggtagttttctattatgtcttttaggtggtgtttagttttaggtaatgaaatggaatgaaaaattaataatttttattccattcatttgtttggttagattttaaagtattggaatggtttttctatcaatttggcagaatgactattctattttattaaatggaagaaaagaccattctaatgcaagatgataaacaaattaatatatgcattttaaatttaattccatttttatttatattcctattttcattcttatgttttcaatttcattcttccaaccaaatgccaccttagtggctactcttataaagctagttagtctatataaaggctcctagctcatttgttcagatgaaaaagtttctgatccaagactgtattatgagataaccgtagacggagaaacagagagagccaagtgctagtgtgagatgaatatctaagctgtatagtcgagtctgtatagagaagttttcagggacctatgttaggttaccttggattgtaatattagacattgagcatcatagtggaagatctgaatccaaactttgggagttcagaagagaggaatgggctcttcaacaattgttggaggaagttctatttgaacctctacaaaattcttggtgttctttactttttttggttttgatttgtttatgctttgttcttggatttgctgcgctgttttgtgctttgctgtgtttatgtgtacagggagttgagattggggttggattgatttccaacagatgtaatgggctttcaatcgatgcttattcatgtttgctaactgcatttattttcagttaaatgcagagattgcaggctacaatgaagcaagagaatcagagttacctcttgtacaagatgtagatgcaaaggttaaagaattgcatcaaaccattggaagcctcaacagtagccaggcatcactgagaaacactttacgaaagctgaaagagaagactggtgaaatggatgagaaggttggatttcgtataatgatttaactcttttaagttttctctataggctagtacctctattatattcaactagactgtatatgtatgcctgtattggacgtcctaattaattagaactaatacttttatttatgtaagttcttcacttgactctctttgtgaactaatattttgttgaagggagaatacttttgaacaattagtagtatatgatgatctgggttgggtcatcttggattttcatgcataatgcactgtgattctaataatttataataattttgtttcaagtttattattatgcagattggttttggttatgtgagttagttttagttatgcttccttctttccatgtccagatatctagtgctgaatttgctcttgtacaaagtgcccaagaaaatgcaaatttacgttccaagattgtgcaatcaccagataaactgcaggtaacttttttcttcttccaaatttatgtacctgatttccaatgaacatattgtttggtgtggtccgacttagtattcttctgaacaattttctaattagaaaccatactagattgttgttattgtctagaaaaattacaaacaaaggagtctgtcaggaacacaccaagcaaagtattcgtccggagatgtattccaatccctaggactgaacatgaaatttaagtaatcatgcaataattaaccactaagagcatcgttagaaaatcaatttgaacaaatgatagacttttaagcagttagaaatgtaaaatgcagggtaagtattgataagcctaagacttatcaaatgtatcactgaaggaataaatgaaatacttagtcttttcatgtacatagattgagttgtcttagtgttttgattgttttagttctcttggtccaactgtaagcctaggtgacccaagtcttttaaaggccaatgcctataaatggagaggtaacaacctcatttaaaccagctgggaattatcgggagattactcttttggagagaccaaacctcttgaaagtttggaatatgaaagaaagtctctcaaagagcttgtctttgtaattcttgaagattcaataaagagtttctggtgggatttcaatatttgtgtctgaattatttgttatactatttataatctaagaaaagtctgtcatgtgtataagatggtaaggtcacaactcacaagtcattttaaaatgacacaacctcaatatttttagtataaggttatatgcttgtttgtctgcatccatacttatctttttctgttttaggttaatttatataaacgatcttaagatgttttttttttctctcttaaagagagctctggaggagaagaaatctgtacgggaggaagcaaaaaatactgaaaagttggctatgcaatcttttcaacagaagactgctgtagctgagatttatgccaaggtaacaaactttgttaacataaaaacatacatgcgtgagcaagatagatgttgtacaatataactcatagcctgaagagacgctggaaaattttgaagttaattgattgtatttctattgggtttctcaggtttctaagaaaatgacaaagcacttaactcaaatgcaggctatacaggaacaggttcgttattctcactttttttttacttttcacaaaaaagtttagtcagtttacatatattgctgtatttttctttgaggtgataagtttaagcttatgatttaaattttttacatggattttgagtaatgagagttgttcttcacaagtacaagtttccattgcccaaacaggtaaactctgcaaaatctgttgataaagagtacaagactttaaaaactaaactaagtgatgatgtagtattggacaagtcactagaagcaaaattgttggatcggcgtggaaaaggtgtggttagaattttatttgatttgatgtgttgtttgtaccttttcttttaatcagttggaatgaatgagaagactgttgttgggtaatgctcatagcctcatatagtaaaaagatgaagccttaagccttgttttctccttttcctcagtggagcagttggaggaatacaaaaagcaacttgaaaaagaaaatgaactgaaatgcgaggaagctagaaaacagcttaatcaagtaagacttgatgtggaatctaagaggcgtaatttggaagcacggcagaagactgttgaagctgtcgtagcagaggtgcttttttcataacatacctcaaacgagccctaaatcggtttgatgttgtgatgatctaatgcctttgttgcaatctgtaggtggatgatataacttcaagaacaacacaagtaaaagagtctggagcagctaaacagcaagagttactctcaaagtgtgaggagcttgccaatgaggtacaatccacacactgctttcgaaatacccttttggccttttaacctagtagtgttttttctcaagcatttttcattttctaatcattggcttcactctttcgcatgttggtggttgcagtttcatcagtacacgaattctataagcgatgcagtcacttcgatggatttcgaagcagtgaacgataatactcaaactgtaagtacttagcctatggaaacggtttggacgatttgccatggaacagtactatactgtaagtatatagtgtacggaaacggttaggacaagttttaggcaaattgaaatcttttatttagagtgaattcggtgattgttttatgattcactcctagattttcaggcattgaacgcttagctctttagtctttagtggctgaacatcttgttcaatctttcacaaaatgcattgtagctactttaatcatataattaatgataacaactattatgacttaaaaaaaacacttctgcattgatacaaagtctataatacatcatcattgtttgtttgtttcaccaattagtgagcaatccccaccacaaaatctcactaaaatttatgtcatttctttctcctcattacttggaaagagagttgagtttgttttacttggaaatttgcttgaggagaccagccacagaaccacaatgtgtggagttgttattacacttctcacaacatgattgcagcttttgaatgacactaacacacctgtcaatcaagtaaaaagtattagatgttgcacaattcaagatctttttgtaaaaatctaactcctacgagaaatgttaaaaggcatcagtagtgtctaataccacttagaaattttatatcacacttttgttataattaaatattgagttttacatatagaatattactaactaattattattattgttaaacactagtagtaccttataacaatgctctacttttgctctgctataaaaagttcaatttgtaatccaattattaaagacaaagaactttttactcgttttaagttttaaaatccaatgttttcacctagtatagcttggtatcatcatctaaagaatttgatgcaatattcccattcccattttggtattaagacacattaagaacaagttttgggtaacacaaaataagctcaacaagtcaatttataagtttcaatctcaccaagaaatgtaagcaaaactgaaatcaaattgaaatagcgtttcagattaaaattgattaaggaaccataatttatacaaatatgtgtatacatatttatgatttattagacttacttttgagaaagaaaattattcttagataaacaagcttgaatatcacaagcttccttcttgcacggctctttattctcttgcttcgccatttctctctctttctccagaattcgattctctctctcataccttcttcgtagccaaccctatttatacaatttcactacacaaaacgacagctaaatcaacgtcgtactccgccacgtggcatttttatttgatagtttaattcgaatcgggtcgggtcggggatccgaatatgggtttgtttataagaggtcctgattggtaatttcactgcttttgtttcttctctatcttttttctgttgctttcgaagtctttcagttttgatcaaaaatggaagcaattaaagtgtttggattagcttcggttgcgaaaatgaaacaagcttcgatgctttggattgaaggctttagagaagcttgttgtcttcatcgggttattgttttctacttcaggtctctcaattattgtcttttcttattactttttctgtttggttgacgagaaaattagagagaaaaataaaaataaaaatgaaagacttgctttttgataagactaaacaggtttgttttgaacttatgtggcaggtcaaggaagcttttgatacgcactggtcaatgttttcttctaaatgggtttattttcttgggaaggtacgaagaaactgtcaattgtttggattgaattagttaaagaatgtacattgttaatctactttagagcttgaaaccttaagaagattgtaaattgtttacatatgtttaatctatttacttgggtttggtttaagtgatgagtgaagtgattagagatgttcatcctttttcttttatgcagtatatttatcctaaattcagttatagtcccaactctacaatggatattacctgatgattgctcacagtttgattctcaagaactctgctcttttggtggtcttttgaaattttattccttcttacggtttggactcattaaactcttttatgtaagtatgcagttgaagatttatattcaaattcaatattttgcctagcagtgtagtcctattcaacaaataacattatacttttcttttccatctaaagatggaatagtttacttacaattttgtgaacacttaagtggcgtttgaaatggaatggaattgaatcaacttttctttcatttctttacttggttgcattttaaaagactggaatgacttttctactatttaagtggaatgactattccattctgaaacggaaacaagatgaaaaaaagttgatcatttttttaatgaagtttaaatttcattctatcccgattcctattcctactcataatgcaatcttatagtggttaactgatgtaagtgtttgctactttcagatcatatggttctacccattgtatgcactgagcattattctaagcgctctctggtatttattgctctacctttgttgcatcttttgtttttaacttggtcagccaagtttatttcttaatcttatttaagtcaatttatggtcttattatctcatatgaacaacaactcattccaccaaaactctgaagtgacaacaagcttgtgtttcattagtgtaacatacaactttctccccatatttaagatttcctttcttttcatgggtctaaaatatcaaattcaggtacaatgatattgctaagtatggttttgaagccgcgcaaaagtctggtcccgtgaaagtggatcccacgggaaaggagaaattaacctcacaaaatacaggtcatgtgcgacagcgtgatggcttgggagggtaagatttgatttgatttctttttccttttttacttcagatattttgattcattttgatctttgctattttatttatctttaggatcatgattgtaataggagaacagttgtattctatacttcttttgagcttcttcttcatagaggtaagatatatcaaatagtacagttttatttactttctctagttttgcattgttcaaatatatctaacattctagcctatgttatttctccatctcttctcaatttctgcaatattatgcgctattctcttttaccatatatattttttcttggctcaaacaaattatcatctgatatgcttatttgcaacataagaaaatgcaataagttcctgtatacagtgaggtcctcacatatgatgatatgatttttctatatgcaggtttctgtgacaggatttgtaccctacattgggacggcactgaattttcttcatgtttcttggatgtatgcctacttctgtttcgagtatgtgacaagttcttttccttttctctctctctct

SEQ ID NO: 184163 - DNA, 3036 bp, Cannabis indica
taatgcaagtcatttaatgcaagggagcatgttaactaaaattaataataaaatattaaaaataacacaatggtaaaataaatgcaaattttaaatcatgctatattgtgataaaatttggatcactttttggtatgtgtgacatctttgcatcacaatttggcacactattggagtagattttaacaaagtgagttatattttgcatcactcatttacactctaaggattcattgtgtaaatcaaatttaggatgatttctaacaattcattataatatgcagctgacacccaaacgagtcaccaagattctaaagaagggggaactgttcatcatagaataggagatcgtattaaagttccaaaaatatattgggaccttacccgcagagctgtgcttactatggaatggattgatggaattaagcttacagatgaaaatggcctgaagaacgcctgcttgaatagaagggttttaattgaccaggtattaggcaggaatacttcatctctttcttaatgattttgttagcacgagcattaagacatactaggcattgttactggctatgatgcatttactttaaattttcgttgttgtttatttattttctgttatctttataggggttgtattgctctttgagacaactgctcgaggtgggatttttccatgctgatccacatccgggaaatctggtagccactaaaagtggctcacttgcatattttgattttggaatgatgggtgatattccacgacattatcgtgtggggctgatccaagtggtaaaaactctgggacaattatgaaaaatggtcattttcctttcttttttatcccctttaaaaattacactaatagaattcattaaacatcaaaggatattcacgaaaatgtatctgtgaagaatcgatttaaatactgtttttcttgctttttcatccctttcatttttcccgctgcttgtgaactttgttgataagtttctatctcttttcagcttgtgcactttgttaatcgtgactcactgggtttagcaaatgacttcctttctttgggatttcttcctgagggagttgaaataaaatcggtttcagatgccttgcaagccacttttggtgatgggtctagacattctcaagatttccaggtctgcaaccaactacagcattttggaatcctcgtagtctttttttttataaaaaaaaattgtttgatgttcctaatgcttatggtaaactgtttcctgttattcttttccagggaatcatgaatcagttatacgatgttatgtatgaatttgaattttctcttcctcctgattacgctctcgtaataagagcattgggatcactagaaggcactgcaaaggttctggatcctgattttaaaatcattgagagtgcatatccttttgtgattggaaggcttctggcagacccgaatcctgatatgaggaaaattttgagggagcttttaattcgcaacaatggatcgataaggtggaaccgactagaacgcctagtaggtttctctcctctttctttattctagaatcctaacgaattgtatagtaatattcatcagacatttatatcttatttcagatagcagcaatatctgaacaagcttctgcatctgctgatgagccccctgatatggatgaaactacacgaactcgtctcggatggaaatcttttgacatgcattctgttgtttccgccactgaagatcttttactgttcattttatcgagaaagggtcagagagtgcgtgttttcctgttacgagatataattgaagctgctgatgcttttatggatgatgaaattgttggttgcatgctaaatgacacacttagagcaagaaatttcgaggaggtttgtttcccattcatgtttttctaacgtattgagctaccgcacaaccccgaaaaaataagccggaataatgttcacttgtgctgatttgattcttctcataatctttttcaggaacatgacatgttgatgagagtccttaatgggtttcagtctctccgacgagctatgaatttggccccggatatctggacagcgatgtttctccgattggcagttaaaagtgagcttcataactttggattagacttaatttcagccttaatgattcattttagtcacaaaattcctgaaactacttgggtctgtttgtcaagattactacatgagttgaccaaaaaagacagctcagttgaacaatgatataatcagataggtttagccttctaacaaaattttgccaccattttattttttctttttctttcactcattataattagattttgacacattattagctaaccaaataacaatctttataaagttgtcagacaatacttattctttgttaattatataataaaaaaatgtgctgacatacatgattcaattgtttttattttaggatatgtaaatttattttttaaattttaataggttggaattgaaattcttgttacaactttgaaaattaagaaaagaaaaaagtcttatttcagtataattatattgtccttgaactattcttttacaacttcataatattgaactttgtacgaatattattcatttaaaaatgtagaaatatgaacttcacaatcatatgtaacaaataataaattttaatcatatatattttttttagaaagactttctgtgtatatatataaatgtagatataggaatatatgtatagattgtgtggtgtggcatcaacatttatgggtttacagcattttggccacatggcaagttggctggcatattatatattcctgcaaattcccatagtaataggtaacgaagatgaaccagggaaaatataataaaggaaaaaaaaatatatatagtatctatatatatagagttggtggtctcatccaataatccaaacttttatcttcctctcactcacacaccctattgatcacttgtattgattacccttttctaagggtactacatataatatattatataatttttttg

SEQ ID NO: 184164 - DNA, 1148 bp, Cannabis indica
ttctttttctttttcttgttttttcacttttgcatgttttgattaaactaaaacatattttctatgcattgattaaaaagaataattagtaatgtcttttctccaacaataaaaggtttaaaatcagcgatatacatccctttacaaaattgaccaaatatagttaagaataaataaatagaacatagtacaaaacaagtaaaaataatgtagaaattgatagaaaatctattcatcaaggttggaaatataaaaaacttttttgaaagtcgaaggttgaaattgatttttaaactcatttagaaaagtgaagcccccaaaacaacagtaatctaataatttatgttgaattactcaagtgctctatcacaacaattaaaagacaatgtgaaatttgtcggtttccataaaatttagtaaaagtgtatagttcttttggtcttttttgctttgtgttaattaaagcgactaaacaaagattataatatattgcccaatattgaattaaaagaagaagaaaaataaataaaaatagaccacacataatatcaaatttttgtattagaaaaacagcaacccaacgcaagatcatgatacgggaatttgtctcattataattttataatttagatgatatttttatgcattctcaacctttaccgaaagtttgagaatgaaagctttaaccgaaagctatataatgaaaatgacatcctcaaaaatcattgcatatatccttcatacatataaacttacatgtagaataataagaataatgggattatttggttaacacctaaaaataacaaaaatttacattttaacagaacattatttttttaaataataaaaaataaattatcttatagaatcattttaaagttggtaaataaaatacattgcttatacatttcttttcttttttgcgaaaatataatataatattgcgacaacataaaaataatattgtttccccttgaaaaaatataagtccatacaaatattaaaaaaaaaaaaaaaaaaaaaaaaaaaaaaaaaatactataagattaacacaaaaaatgagaaaaagaatcaatagtaaattaaaatgaattaattttcttaaaaaatgaaaaacaaataaataagttgcttatatatatcat

SEQ ID NO: 184165 - DNA, 5776 bp, Cannabis indica
taacaagattacataactaattgctctgtacacttactctgtattttactctgtccttatatctacctatagctaagtaagttggacagttgttctgttatgttagttcctattttatcagataggttgttatgttagttgtagtagtcaaccgacttatgctgttgtatatatattattctactccttgtacatatttcaattcaattcaaataaacatttttactgtttttactctcttccgcaataatatcatcttggaaaaattacataaaatgctatttttggtaaaatatttatacttttaggttcaaatttattttttactattttataaaaacataaaaaataagatgaaaataacaccaaaatatcatcaaaataatatacaaataacaataaatcaataacaatatacattttctctaaataagatcttagaaatagttgtgaaaattatcctattatcggtttccgttttatttgtgtgtgtgtggtaatatcctacttctctttcttctccctcgttttcttaacttcaaaaatcagggactcaataatgtctatgttaagggtttctcatcttccgccattgtcgactccagctctcttcgcatccagactctctcgccatccaattttcacttccttttcaccttcaaaacttcgccaaatctcttcatttgcatctatccccagaacccttaaaccctcttcatcttcatcccaatcttctttcatcttcaaccgcgtcttggctatggcggcacgttcatgtttcagagccgcagcaggtgggtcggtcatttctatcttttatttattttattacaggtctcttgttttccctcactactgattgttattcatctgtaattatgtgtaatcgctatgatattgaatagtacagaggattctgtatacatctttctctatttttccaatgatcggcgtggactatgtttaacaaccattctcttcatctttcatctctatgaaaacattcaaaccaaaaatcaaagtgttgataaatacttagaagctataaaaacattcacttgttgctatcattaccttacaccaagcaacaagtgaatgttgctcataaggttaatcatattttgaaagctaattccatacaaatctacaagcttctagatggtgggaataagcatatttccaacataaagagtgctctaagtttcatcctccatctccttcaatttctaacagtatttgtttgactaatgagtaaatgataaagtttgcttgtaaagaaaataaatttacttagtggtttttgtgctctctaaaccatcgcctgtgaattggaaaatcaaaaatttaattttttttttcagcttcgtttagtgctgaaagtggctcgagtagtgaaagggaaatactggtgcagcatttacttgttaaagaaaatgatctcagtcttcttttggatcttcagcagagagttgtacgaggttagtttactgagagttaaaattggaaatataagcagatcaaaatcaaatattgtccagtagagattgaatggatgtcaagtccatagtcttgaaaacatcaaattttcgtttggttcatgaggctttaatttctagaacatattattatgtggatatgctattataatgctatatgttacttgtaggtgaggacctaagtgatcttgctgtcgaattctcattatgtccatcaaagaaagaagggggaatgcttgggtgggttagaaagggtcaaatggtatgctcattaaaatggtctttgcatgtgaaagtttacatgaaacataagtgacattctcatctaaactatgtatactacatagttttctttcctactttagaaggttatatgatagactgctaaaggataacaatagtctgaactctgaatgtgatttgcctttgtttttattagtttgatatttgatacttcttttgaagagtataaaatttcttctttccactgcaatactgaaatttaaacctatttttttttattgtcttctctgaatccaattcatgaacacatttagtaggaagttgttactttcagaagggaattgctttgtagtaggaaaaagttcaacaaagtgattgtgactgaagatggcgcattgtgacctccaaatttattttgtatattaaaacctggatggaaaattttatcttgtccaaacaatattgagcccttaaagctttattatatatttatattataattaattatttattttgaaaaaaaataagattgtgtgtgaatgtttattgaaatgcacacgcttggacaaacacacccactatccaatatctgtttttctgtttgattttgtttattgaaatgggtagcttttctttatttttaaaatgtaagaaatctcaaggatttttggtgagtaagaaaggatacttatgagtcaagataagcttggtataagggaaacttgggcaaggttttgtggtaattgaaatttatagggaaaactcaaaaatattatttcattaatttgagaataaaccttttgtttttgcaaggctactgaatcaaattatattcggtctttggtcttttggctgatacttggtaaagctcagtccttgcatgattttccctttcattaattatattctcgtaagtcctggtttctacaaacactaggaaatgatgatgtattgccattagatgttgctgtcaacagttatatttaagatagttaaatgggatttgtagagcacagaacactgatagtgaaatatctcaggtacctgagtttgaggaggctgcttttaatgctccattgaacaaggttgttaggtgtaaaacacagtttggatggcatttgttgcaagtcctttcagagaggtatgccgaaagcctatgcctaactggatatcctacttgaatacaatttcttacagtttcttcagtacttattcttttgtcaaaatgtttatgaagggaagaatcaatacttcaagaaattcctcctgaagagctccatgtcaaaatgcaagatccaagtttccttgaagatgcacaattgattgatgttcgtgaacctgaagaagtgtatgctcttacctttcgttcaaggatttttgatggctgggaattttctcattatatttttcatagtaatttaatttaaaataaatttctgtggtttatcagtcacatacttcagggtttttctttgttgtttaaaatttgtcatttgctttactgcttcggtcacttctatatggcagggctcaggcatctttgccaggttttcaggttcttccccttcaacaatttggaagctggggacctgagataactgctaaatttgatcctcaaaaggatacctatgttctggtaagttgatgtaatagaagtcttggttgcaacttcttgcccttaaaatgtttaaaaagaataatttattttgaattggtttggcgttatttattttgtattcaacttagtgctagattgattgacgtgtaccatgctttgtcaaattaatattacattcaatttgttgcgagattgatgtggcccatgcaaagagtgacattccaatagaatggattttccatcatttcggtagaatggctacttcattcaaaaacaaatagaatgaacattccaatgcacaattttttttactcattaaattttattccattcctatgctgattcctatattttgattactcctaaccaaacataccctaccctagatgttgagcaacatgctttaagcaatttttttttactaaaaagtgaggagctggtggtaaatccatggtaaatagattaattccttttcactatataattgtttttatttttattcacaatctttgttataagcttctgcttggatacggattaaaaatgtcagtatttttttcttctaaaagattaatcttgtgaatgttaactagataacatcttgcttccactgattatgtagcaagaactttgattgtctatattgagaaatgtaaatattattagtggtggcaaaaatttcttaaaaaggttttgggataataactaaggttgcgtttggttggaggtaatggaatgaaaaggaatggaaatgaatcaattttcattctattttttttgtttggttgcattttaaagtagtaaaatgtcattccaaatggaatgacttttccaccattttagtgaaatgactatttctttttgaaatagaagaaaagaccatttcaatgcacaatcagaaaagtttaataattttttttatgcattttacattttattcgattctatttctattcctattcctgttctcctttttgttcctatttttcaattggatgcctgctgacagccggaaatatcatgttagatactaatcaaaatgtgattttcttatgctaaaaattattgaataccaagagaaataaaaatgtgataaaggaaaaagatgtagtaaggtaagaagataaatatatctaatatgctttctgaagatggataagtctctgttttctattcagtttgcaactgtattttagttacttatcataaattatatttggatattaagaagagaagctatgaattctagctatatatgtactttcccaacattttctgataccattaccatatttatactggttaaaatattacctgcatattttgtgacatggtttttaaagagcacttatttatttgctgttactggagattttctgttaaaaatgtaatcacaccaaggacgtctagaaccagtgtatatttgctattaattttgtttttttttccttttctatagccttttcaacattaccgaaaccattcagaactagttaatttgctatattgattgggtgccaaactttgtattttgtacatgttcctatgcaatctatggactattggttagtttcattcataagataaatattgtaatctagttttgctcccttctctttaaagcaagggtaattgagaatcttgtttgaaaatgcagtgtcatcatggaatgcggtcattacaggtttccaagtggctgcagacacaggtagaatccttatgaatttcgagtgctatcttactagtttcagttgttatttacaagctaaaatttcttaattgagatcctaaactaaacttatatttaattagacttaatcgaagattttgtcctctaatctattgctcaatacacagggttttaggagattattcaatgtgtcaggaggaattcatgcatatgctctgaaagccgatcaaacaattcctacctattgatttgtttggtaagcaatatgatttcataagtagagtttgcttctatgtccaccctaaaaacttttctttcatcatttctctgttctttgtatgtattataagtagaatttgaattttattttatactgagataagtcacagttatgcaggcacttaacaaacattgagcgatgacaatctagaaataattaaggttagcaggcagtgcttgatgactctgtttaacattagtttagtttattcatatgtggatgatacttgagctttcaccacttttttcacatgtaagtgtgttttagaataacttatattgaattggaatatatatattacaagtattcagtaatgtttggtgttggaatatagtactttccctcataaaaggatagctcaatcaaattaatcttaaaatatataaaatctaataatgatacccatttactattgccacccaattgtataaacttctatttgctttact

SEQ ID NO: 184166 - DNA, 7172 bp, Cannabis indica
aaaaaaaaaaaaaagaagctatatatgattttaactattagctactagtaatgtttaatatttaatattattataatttaatatatatattgtgtataattattgttaaattaaaatataaccatttaaccactttatggtgatgcctcttagcatatacattttagatagaaaaccaacatatttggttgaattttttttaccataaattgtaatttttgcattctatgagttattaatctatatataagtactttaaaaacgtgtcattttataattagttagcgatactgtttaaaagttattacattaaattatataaaatcgatacttaattacactaatagtaatatttatgcataaagtgctaagcactacttaccttttagcatttctctttttataagtaggtaatttgtggactttaaataataataataatgaaagggatttgttggtccttgaaggttaaagtttactgtagtggtgaccatctttaaatggaaatcctctgataatccaattaaaaattgattgagatataagacccttataactaacacatggttactgaaattatcaaaaaaagagaaaaaatctgcaacacgtggcccctttaataataataataataataataataataataataataataataatgaaaggtagcattaaatttagaagttaggctaaattaatggataatatgaatatagacatatataaaggtatgggaacaaaattagaatagcaaaaccaaagaaagaaaatagaaaatgaattaatataaatattgcgtcttcatacacacacacacacaccaactccttctccttccaaataaaaccaatctaaattcccaaacattttccattcatttcttacattcacaatcatcaaaaaagagaaaatgggaattgggaaaacgacaccgtttgaagatcttatagaaaaagctggaggttgtgcggtggtggacggtggtttcgccacccaacttgaaaaacacggcgctgacattaatgatcctctttggagtgctctctgtctcatcaaagaccctcatctaatcaaaaaagtattaatcttcattcattctctctttaaagttttcatctttaatcattcattcaatgtatatatataaatatataggttcacaaggaatatcttgaagccggtgctgacattttggtcacttcttcataccaggtaacatctttaatggggatttaaacaataccccacaacatgtttgatgttggttatctttgattgagcttaaaggtgtgatttttattgtttttataggctacacttcctggatttgtttcgaggggactttctattgaagaaggggaatcattattgagaaggagtgtggaattggccttagaagctagagatagtttttgggattccatgaaaaataaacatggtggtcatgcttataacagagctttggttgcagcctccattggtagttatggagcttatcttgctgatggttctgaatataggtatcatcatcatcttatttaatatgttatttgttttattcaatgatgtaaaaaaaaaaaacatatgagctaatatatattggtactactaagtctttctctctagatcccgcagataagttcaattatagatcactaattttattgtcttttgattgttccaaatggatgataagctcattaactataaatcattaatggtaacaattaaaatattaatgtaggttcaaaataaaagtcttacacttttctctataacaagtattgactctgcatttttatattttcttactaatgttgttttcagtgggagttatggatcaaatgttggtttggataagctcaaagatttccatagaaaaagattgcagattcttgttgaggcaggccctgacttgctggcttttgagaccattcccaataagttagaggctcaggtttgtcttaatgatatatttatatatgtcaagtttagagttttgtgaaatctgattggtttgtttgaaaaccttttggtgtaggcttgtgtagaattgcttgaagaagaaaacatcaaaataccatcttggatttgctttagctctgttgatggagagaatgccccatcaggagagagttttaaggaatgtcttaatgttataaacaagtgtgataaagttaaggctgtgggaattaactgtgctcctcctcaatttattgaagatctcattttgaaactcaataaggtaaaaagagattaatttgtttagactaagtttttttgagtgatttggaatttacctttgaattttcttgttatctcagttaacagacaaagccattgttgtttacccgaatagtggtgaggtgtgggatggtagagataagaaatggctggtaagtttattgtaaagttttcatctttttaaaattagttgtgtttgttcatattaaaagattcgaacttggtttgtattaacagccttcgaagtgttttaacgacgataagttcgaatgttttgcaacgagatggcgtgattctggggctaaactaatcggaggatgttgtcggacgacaccttccaccgttcaagccatttcaaaggctttgaaagaaaagctctaatgattagtaattacaattatattaactcaaacctgtcatttaagacagctgaagaggaagattcaaagaggctgcttcattcttttccagattaccaaattaacaaaggattagaagaaacaaacaataactaatgatttgtttatctttatctatctatctatttatttatttgaatcatggagtgtactcttgtgttgcttatctgtattggaaactttatatatttttggcaagtttcatctaattaaactaatttccatgacaaaataattagttaaagagcctaatgagaacaattacatacacacaaaactcatgtcagaaattttttttcagagatttacaaattcttgccagattttgagcagaaatcccaatccattacacttactaacgactaataacagcgaagatacggtaagtagaaaactaatgaagaccgactaactgcttcatcgtcgaggtgggacttgctgatcataatatctcaaactgctggcatagcgatcaccagatgccaagcctgcatatcttctttcggggcttccattcaatgcgtcgtaaccccagctacctattagtagttaaatttttacaaaaggcggcttaaaatcaacatattttacttgtttcttaaggtagagtcctaaagattagagaaacataaagattacctagcccttgtgcttgtgctcttcgctctgagtattgcctttctgcattttgcttctcttcacgtaatttttctatttcacgagccatgaaaatgaggttcttttccattgcttggttctgttcaacctgttcttggtttattgatttctcatattcatgaaccctcctaggaattaagacacaagtattaacaatgtaattgtatagaaagtaaaaggaatatgatgagtggtttaacaatcaaaccttgcctcgaaaacatctttgcgaaccagatcaacatctgtttttagagaaactagttgctgattctcagcttgcagtcgattaacaacttttgtgaggccctggacttgagcagacatatcctgccgcatagaatttaattgctgaatttcagctcttaactggacaacctctgtctttataggctcagtcgctttgagatcagcttctagctttcgtactttttccattaaatctctagcccgtgcatccttctctgtgcgaagaggtagtacaacctgacccaatctacggatctcatcttttacagcagtcacatccctttgaaggagggtgttatcatcaattacaactcgattctcagaaataatcctcctcatatctctatgttgtagctcacgctcttcttctaaaccagtggggtgaataggcagcgacccttgtcctcggctcataataggccgacgatcatcatgaaattctctaaaactgtcagggtggtgaggaattcgagtcctccaagccatgatcaagaatttacaggaattctgaactgtcacataaatcccattagataaaaagcaatcacagtagcaggcagttcaagtaggagaaaatccgaaaatatgatacttaagacacaaaagtagcgtttggtttgaggtaatggaatggaaaggaaacaacttttattctattttaaagtattgaaatgtcattcttattctaactatgttttcattctttctaaccaaaagtcacttaatggaatgtttgttatgtgagtctgagttagagtcttagagaaagtagagtctagagtttgagagaatatgaaacctagtgtttgaaaggaattgacattaccactattttaatttaaaatgtaggatttaatttgaaacacaaacctcttgattattaaaatttaatttagtttcacattcttatcaagtctaaatctcatatcaaacgcgaccaaaaagaaaaaactagcttgacttgacatagcttaaaaatgtcaatttattgatcatcctaagaactttcaacagaaaataattcttgtatatgaatcttcataacctttccccccatttacaacttctcactactaaaacatctaagcaacaatctcaaaatttacatgcccaaattgataaaacctaaattaaagccaaaaaaaaatcctgaaatcctgaatgttgacacccaaaaaatattttaaagaaaacataaataaaatcttaaaaattccattcccaaaaatacagttcattttattattcttcactttcattatatttcgaaataaatacgacattagggtttcatactcacttattaactaacatcataactaataataaagctaaaatctttgttagatttgacgatcagtattaggagaaaacatcagtaagataggtttttgagtaaaaattgattgaaagcaatgatcgaggaaagagaaaggcgacgacttacagttcaaaacttgagaaagtccggtgactgactccgattttcctccacacctcagtttctttctgctattcgagaattcatcaaagtatgaagaagacttatttaagggcctgggcttgcttcttttcatgggcttaaaataagaaagaaagcccaaatcttagcaagggcttattacaaaaatgccaaaaagttgcgttgctgtttttacaacggaatgctgtttttgcgttgcttgttgttatggaaaataatgtgacttttttttacaataatataaagtgatattttttgttgtttcagaataattttgttttaacgttgatgctacgggaaattaacatgaaagtaattttttttttctgaaaaaaaaagtgaaaaatttgtaaggaaaaaaaaagaatatataaaaatgtaaataaaaaagtatgtaaaaataagaatgtgttttaggtttgttgtgtaaacttctcaaaaatacaaccatatctttagctagttttgctagaaaataagaaatgaactaagctaatgagacaagtgaatatttttttcctttttctttttgagaaattgcacattttatgagcttttatataataattaaaaatatgtatctttttcatgtttattttttggtttttaattttatttataaaataaattctttttttacaaagtcatatttttgcaaactttagccgtaaaaactattaatattaaaaattccttcttcttcatgggcttaaatgagaaagtgaggaaggtgacccaaatctgaaaaaacaaccacatttacttgggctttgttttgagcaatgagctaaacaaatgagagcatagtgaataattttgtgtttttttctttgagtaattacagcgtaaatacttaagtttaactttaatgtatcaataaatacttaaattcaacattaggttacagataaataattaaatttaatttttgacagtaataatattttaatcatatttctaaaactttcgtaagtatgatagtttatttcatatacgagatctctaattcaaatccaagatgtctcagttgcgctgaggaaaaaaataaaataaacatttgactccttcacatgtacgttccacttggctttgggggatataactcagttagtagagctccactctttcaattaagtctttgcaatcatggattaggtgtttaattgtccatacagtattgatagcatctaatacctaaatcggtagctaattttttttaattaacaagaaaaacaaccgaaacatgctatatctgggatccatgcgaaagaggatcaagtttgttcttacttttccaaatttttttgaataagtattaaaaaaaatgcaacatttctaccaataaaacaaaaatgacaagtgcctatccaaagtagaattttccaatccaataatttaaataatcaagaacttgtaaaaatgtagtgggtgtaagtgtaactatattatgtgctaactagtttacaaaatctttcaatgtcaagtaatgaaaatcaagctatatagctatgcaatcaattgaaacaagacaccaaatttaaaagagacaaaagatatataaagagagaaagatgagaccatttttgagtcattgtcaaagcaaaggaataatgtgaagcaatttcattttccttggtcaaaattcattcatccattccccaaattttctttgtgatcagatatacacatcagctcatactcatcacctcactatatatccacaacataattaaaaataaaaataaaataaaatcatcttcttgtatttctcttcacattatactaaatatatcttaagctaaaattgttcaaacttcaaaatatatatatgatattcattatcctcaagtcattgaaaaatatgacaaatgtaactaaacatgagaataattgtacatgtatgtatgactaagaattatgtaataggaaccatagaacatattataattaattaattatatatatggataaatatcacacagtttacttgtagacttgtagtattattacattatttctgaattgttgaccttttatgtggttcgaaaaaactattctcttttatatatttacatttaggggttttttcattagtg

SEQ ID NO: 184167 - DNA, 2547 bp, Cannabis indica
aaatctatagctaatctcactactctgcagagtcttgatgtgagtcagaatttcttcattggtagttttcctgttggtcttgggagagcagctgggcttacttatttgaatgcttcaagcaatgatttcacaggattgattcctgaggatcttgggaatgctactttgttggaaagtttggatctaagagggagttctttagtgggtgattcctaaatctttcaagaacttgaaaaagttgaagtttcttggtctttctgggaataatctcactggtttaatcccacctgagttgggagagctttcttcattggagagtatcattctcgggtataatgaattcgaaggcggtataccagctgagtttgggaatcttacaagtctaaggtatcttgatttgtcagtcggtaatcttggtaatgagattccaactgagattgggagactgaagagtttggagactgttttcttgtacaaaaacagttttgaagggagaattccacccgaaattggcagcattgtttcactcaagttgttagatctttctgataacatgttatcagggaaaatcccagatgaaataacagaattgaagaatctgcagcttctgaatctgatgtgcaacagtttaacaggttcagtccctagtggagttggtagcttgcctaaattggagattcttgagctatggaacaattcactttcggggcctttgccaaatgatcttggaaagaactcaccattgcaatggttggatatatcttccaactcattctctggtgagattccaacaaccttgtgtcacaagggaaatctcaccaagcttatccttttcaacaatgccttttcgggtccaatcccagttggcttatcaacatgttcatcgcttgttcgggtcagaatgcagaacaatctgatatcagggacaatcccaattggatttggcaaacttgagaagcttgaaaggttagagttagctaataatagtatcactggtttaattccaaatgacatatgttcttctttatctctttctttcattgatttctctagaaaccgccttcattcaactcttccttccaccattttttccattcctagtcttcaaaacttcttagtatccaaaaacaacttagaaggagaaataccaggtcagtttcaagactgtccttcaatttctgtgcttgacctttcatcaaatcatttctctggaatcattccatcaagcattgcttcatgtgagaaactagtcaatctaaatctaaggaacaaccaattgagtggagagataccaaaaccattatcaatgatgtcaatgttagccattctagatctatctaacaactctctaactggtggaatacctgaaaactttggtatctcaccagcattggagaatctcaatgtttcatacaacagattagagggttctgttcctgcaaatggtgtactaagaacgataaacccgaatgatcttgtgggcaatgctggtttatgtggtggtgttctcccaccatgttctcaaaattcagcatttcaatcaagacaccatagttggcatattaagcatgttattgcaggttggatcattggaataacatctgttttagccattggaatagcccttttcggggctctaactctttacaaaagatggtactcaaatgggatttgctttggtgaaagttttcaaatggctaatggtgaatggccatggagattaatggctttccaaagacttggttttacaagctcagacattctagcttgtgtcaaggaatcaaatgtgattggagttggagcaaccgggacagtttataaagctgaaatcgcgcgttcaagcacagttgttgctgttaagaagctatggagatcaggagttgacattgaaacaggaaacagcaatgacttagttggagaagtcaatctcttggggagactaaggcatagaaacattgtaaggttgttgggatttctgcataatgattctgatattatgattttgtatgagtttatgcctaatggaaacctggagatgctttgcatgacaagcaaggaggaaggttgcttgttgattgggtttcgcggtacaacattgctgttggtgtagcacaaggacttgcttatctccaccatgattgtcacccgccggtcattcaccgagatgtcaagtgcaacaacattctactcgatgctaatctcgatgcaagaatcgctgatttcgggttggctcgtatgatgttgaggaaaaatgaaacagtttcaatggtggctggatcctatggctacatggcccctggtgagtttcttcgcttcaaggaatttttacacaaaatacttaaaatcgcactttttttttttacagaaaacaacattattttcacattgcaaaaacataatataatgtagcagcaacgtgaaaacaacatcaacagtgtgtattttggtaaaaaaatctgttagaaaaaattgtaaatcagtatttttgattttttttttcatttttaagtgtttatgaaaataccccatgttttaattgttcttcca

SEQ ID NO: 184168 - DNA, 2755 bp, Cannabis indica
gattcatcaaccatagttgttctttgaatatttatgcaaaaaaatcttgtatggtcacgaggatgagagcattcctcacataatgttttttgctgctgagaaaattcaacattttgaatagttaacctatgattaccattatgttattgatcaagttcatgatgcaaatggtaatacaaagaagaagaagagttgcctttgtggctctcgtcaatgcactggtagattttattgagcagactaataaaagtttggactaaaactaataaaagaaggttgcatttaatcaataatcttaaatcgtctactttcagttccaaggaaaaggatcatcagtatagtttgagaaaataatatgaagaaaaagaagaaaagaagtcaactgcatggattatctttaggaaaaaaaaattgttgtcctcaattccctattcccaccctgtgccactaataatttcaagtcatttcatcaaagtagttaacaaattcattaactcttttttaacgttaacatccatccattaacaattattcaattctctctccaactaaataattccattctatctctccaataaaaataacaataaattaataaccaaaatattattctctctccaactgtttaactttatatttttttttaacaaattttgtattcttaatttaacattaatatcaattattagccttttatatttctttttaaactgacattttttttttctattcctttcctcaaataaaaaaaaaagccaagtctacttatataattatatattgaataaattaaaattatatacttattaaattatttacgtttccagaatatagttatttctttattaatttttttaataaaacaattaaatttcacaactaatttattgtataatgacaccattaattattattctctctcctacctcaaaaaaaaaaattaattattctctctccaattatattaatagtcatttcatctatatataaaatatctcaaatgcctattcattaactaatttgatgaaatgaatagtatgcaagcttctatcagacaaaacaataaaaagtatacaagcgtattaagtgtatcatttcatagcactaccaatttacatatgagctgttattagatactaatagtgtctaacactttctaaacatatccgcctcacgattagcaagcgatacttcataaaattattacattaaactatataaaactcgatacttagttgaaccaataacgatattaacatataaaaaagtactaaacactacagtgcgctttaacattcctctttgcatattgtctcgcatataacaaaatagatgctcaatctaaataaaacaaacactaattttacaagttgaactagacaaccttcattaccaataaattaatagctcagaaaaaaaaatagatttaaaaagaaaaaaagattagttgctaacactatactccaattttttatgtagtcataaatataaatacaaattgcagaagaaaatcttacaataccagaggaaaagaataataaagaaaagatcaaaaatacttgtaaagaaccacatatgacagacttcaggatatattagggttagcactttttagtccagcaaacagctacaagcccctattcctcaattagttcagatcagaatcacagcaccattttataacagaacctgcaacatagaccacctactttaccgtttcgacaacattttttttcccttttttttcttttgttctaaatttaataccaaaaactggaaaagaaaaaaaaaacttttctgttttagttcagtgttgaatttacaaaacagcaatgttcagaaatcaagttctttgtctgacccgccgaccattggtatcacccccatctgatagttgtgcccacacacttcgggtcttccctccaccactgctgcattcctcatcacatcctgcaattgtcttcagaagttctgactgcagagttgggcaatgttctttaaggtgctcgaatccgtctgttcgcataacagctgaaatattcaattgaagatgagaacacaaaatacatgagtagattgaccctgtaatttgccttccatgggaaggaagataaatccagaaaatacaataaactcctccactatgcatgtagttacaattattttacaagaagaatgcatgcaggaaaataggatccacaattaactagttctgttttacattttaccccatacttaaaaaacaaacaaattaatgggacattcaatcacaaatactactaaagttaaagatttgaactacagcaagatgtggtaggattataacatagcagaaatttgacatcaagtcaaagtaatttatttataacacaagcatagtgaacttacaacacaagccactgttctcccctttccatttctcttttgtgcttggcaaaacacccaaagtagaaagaggatatataaatacataaaccagtattttgcaacttgatgcaactaaccttaaccattaagctaaacaaatttcaaagaataccaaattcaaagcaggaaaaagaaaatggataataagaaacctaagctttggaaccccaatgttcaagtctgatcagatgataaattattcaacagatagcaagctaagttcaaacgaaaaaagtaaaactagcctatctgccggaacattcctccttgaaattattaaccaaataaccttgatccactcccccacctgtattttattaataataaa

SEQ ID NO: 184169 - DNA, 2991 bp, Cannabis indica
gcttcatgtgatgatgccacagttggaaatatgatcattcgatgcataaactccgaaaaattggacagtgtgtgggcccgatgtattgaaaaatgtcactcaaacacactgagacaactactgcatggtcatggaaggcttgtttctatctctgaaatcgaaggtaagttccattgacctttagtctttaatttatcaagtgtgaaaatcaaattatgagattgaccttacattattcagaagtaaatggatttgtagccgttttccttgatttagaggttttcactgtccataggttccgtacttatttaagtgatttaggtttgttatgattgagtgttttatgggattgtgatggcattgtcagatttggaatactagtggcctcttttcattccagtttctcttttggtttctgtagtgtggtttgccataatacagaatcatgaacttgcttttttttacgcacttatatacctttgttataagatattcacaaacaagattgcagcatcatcaagaaattgtatgccttgtcagcttctatgattgttttgaaacgtccatattttacagaagttcccatatgtctggcatttgtcaagataaatgtaattagtttgaaatctttatgcagtatctgtctacattcgtaattctggaaattggcctggcactttcagtttctgtttcttttattagattttctcagttgcttcttagcttttgggatacatatatacacatattctctattccatcttttagcttatctaggctaaattcatgtaatatgtgattaatggagaacttgtgtttccccaaacctgaaagatcccaataacttgctcttacttaaaatgtgtttgctattctcaaatgtgagaatgctcaagtacttctggcaaggttgataaactaaaaaaagcctgatggagggtgtttttgggtttttctgagaatgaaagcctcataatttagtactcttgaaatatgttttctgttctcaaattcggcaatcctacaatggctcagatggtaattctgttaagttgaaaggttacttattaacctgtgaatcaaaaattagtaatttgaatatgaagtcactctaggctcaacagtcaactttattgagaaccatctccctatctcaaactaatatggtttcatgtgtcaggtgttctggttgcttatgttgcatttgctgatgaaaacatcaaagttagagctgaaagatttttgagcagtataacaaattcaatagaaatggttctgaggtgcaacatagaagttagaattatccatttgcaaggtgtagaggttgctttaaatgctgcaagtccatcggtaagttacagagaaaggaaggaagctgatgctaatgaaacctaccattctacatctgggtcttcagaaatactggccgaaggtgatgcacaaacaagtgacaagggtgagccaagacaggagattccaatacaaagaatagagtcaattatccgtgatcaaagattagaaactgcctggctacaggctgcagaaaaaggcacccctggatcattgagtcgtttgaaacctgagaagaatcagattcttcctcaagaaggcagcgaagatcaaacagagttggctaattcaatcggattgtccacacgtcaatgggaggatgagctgaaccatgaactcaaagctttgaaggttaacaatggaaaggtccttcaaaaggagcagtcaggtagaagggtggatcgttgtcctatgtccccaagtttattgcacgataagagcatcttgggcaattccatgaaagagaacctgtgagtcttaatttgatttgtgttgtgtgacttttaatttttgtataatttacacttcaaattgatctttttttttttccattttttcctacttttcaaattgattaaatgattaggcactatcagttggttatgccttacaaaaaaatagttttattaaactttggtaaccacttagctggccagtagttactaattatatacaatattagcccttttagaattgcttttcacattgaacttacatacaggtttacaggcatttattgatattatagctttagaattgaaggttttttttgttatgaatggtcataatgttcttactatcttttctgggtacttgtggatggaaaattatagttcaacagaatgttatatctagatctttatgttttgtctaacaaatttccattcatgaattctcttcaggggttatgaatcagggtctggaaaagaggctgcagcagatttttctgttggaataatcaaaaaccccagagtaagggaagggtaagatcatctcttctatatcgctagttacctatttgtgttgtagttgtttttgaaataagtcttaaacgtctcacttatttgtcgctctgaacaggttagaggagcccccattcggccaccccacaaaagtggagggttttcattgtttggtgagtgtggaaagccaaagaaaatagagagcagattcaaaagataaagagaggaataccaatttggaagggtttgggtgatacagtttctttcttatttttcttttatttattgcatattcttctgtatttagtttacatttgagccatttttcaggggatttgggagaaggaaattgtaaattgggtggtgggtagggctgcacttcaatcataatcatgtctttagctccttccatttttcatgggataaataaaaaaggaaaaggtagtgtttgttagacctgattctaattatattattatggattaaccatcagtttctatttttaaaatgattttcagaagcaccaaaattaaagttggttcttgaaaattttgtttcttctagaatgatggtttttaaaaaaaaaatatatatgattattataaaaaccacatctttgttttctttaatcttaaaaacaatgtaaagctctaccttagcctcatgtatctcccgtttt

SEQ ID NO: 184170 - DNA, 2403 bp, Cannabis indica
aaactcaatgtgtgtctacagtattccaacaccattttccttcgttcaacttccctttaatctcagttctagcaatacgaatcaagaacaaacttgcaagaaaaactgaaagaattagcattaggaaaacattgttccatcctttggtggaaatatacccagctaaaagtggtccaagagctgccccaacagaaccagttccatctatgattgcagtcacagtagctaatgcacgagagtttcctcctatcatggtctgagtaccaagatcagctgcaacagctgttgttatgagtgcatacgggccatttacaagcaacccggaaaggaacatcaaacatatgttggcaatcatagaaacgcctccataaacccggtagaaaacaagggctggaattgatagtaacaagaatactattgaagtaagggcacgagcttcaattacatcagagattaaacctgccaaaattcctccacagactccacctatatcgaatattgtagagagaattcctgcggttttgtgtgacgaatgtacacctgcaatggctgccatgacaaaccaaggaacaaaattaaaagtggctttgatcagtgatcacttaacaattcatacagtatttcatttcactacataagtaatgtgttcatgaagtttcgcatgcctaacattgctagttaagagaaacagttatgattaatacctgtgtgtcttatgtagaagggcaaccagtatagaaaagtgtaagccaccagcttggagaagaagagacagaaggcgaacggtgccacgcctggtagcttccatgcctctaagaaaccaattgcagctaaagaatcagtattctcagcttgaagagtatctgaattctcagtaacaagagaatcagaattctcagtttgatgaagaagcccagctttctctgactccactttctctacagaattctccacattgccttcttctacactcatctcaatctccttaccaagaggctcaaatcccaaatcatcaggactcacaacaagaaacataaacactaaaaccccaactaaaatcaccaacattccaggcaccaagaaagaccaaccccatccaaattccaagaccccagatgctacaacagatccaataatattccccacagacgtgtgtgaattccaaacccccatgatcaaacctctcttagattttccaaaccagtttcccacaactgccaccacacaaggccacccaattgactggataatcccacaaacaatttgaacactaacatagaaccaaagaacatggatactaaaccaatagcctagaccaaatattatcgtcattataccactgcccatcattccaaacactagaaataacctcaaatcgatccgatcaccgacatgaccggcgaaatacataccgatcgaataagacaaaagaaatgctagatcgagttcgcctaatcgctgagttccttctggaccatcaaaaggagcccaaccggtatcgatcgagctcgaatttgattcagccaagttcacagtggagtcagttgtggatgaatttgagttgatgttgggtccaaggacgctcttgacaatgctaggaggttttctagaggcatgaaatgaagcataggcaataaaagttaagattagtactgagatttggtgaaaagttagagttttgtttgggggttttagttttggaaagagatttagacctggagctaaaatttgagtattgggtggcattttgatctagaccttataattcactacaacattgtacacagcctatacttttgatacagaaatattaatgattatacaacgttatatgattcaaacagttttacaaaaccctaaccctagaaaattgcagaggatgtgaacaagtggggagaagaagaagaagaagaagctggtggatctaagttagttggtacttgagtttgttttgggttttcttttttttttttttttttttttttgttgttgaataaagacttgggttgttttgagttgaagtaattggattcatattccaatttttattttactttattaatagaaaaaaaaaaattgggagtttagagcaaattagttttgaaacatctgcagtttcaaaagtcaaaaaatccaggtatgaatatgattttcttaaaaaataaatatatgaaaatcaaccattaattctatctaaaaaaaaaaaaaaataataataataataaaatcaaccattattatcatttatccacacttgcacttgcatttgcatttgatacattacttttcttagtcaataaaatacaacttcttctgttttttagaactttatccaacacaaaatcgaatttttactgtttatattggtttagggtttttaaaatgagaagaaaaaactgttat

SEQ ID NO: 184171 - DNA, 1556 bp, Cannabis indica
tttttttaaaaaaaaacatggaaaatagaatgttaacgtgttttgtctaaatttttaatatataaaattcctcattctcatcttcttattgtttatttgaggtcttgcttcaacaaataatttggtaatggtctctataaatattttttatttatttatgtgtttttaagtaaactaaaaatatttattttgttggcagactatgagaacagaaatctgagttcaaaggtagacaaactcttaatgttaaaaaaaatcaaataacttttaacttttatagagatatgtgactgtttaattaattatgaattcgatcttttcgtatatagtaagcatatattagtttatatttaaattgtccaactctcatatttcatatatctttttactaagtgagtggacatgattttataatggttgagttgctaaggttttatattgaataagtttagttatggagaaaaattgacatattgctctcttatttatatcgttccatccaagccggaagcataaaacacatcaatgttctttctcaatgatgttgacacaatcgccaataattttatatatataattggattataaattttaaactattctctctactgtttgttttgttggtatgttattttaatttttttgtattaatgtattattatatatatgaaacattttttttcctataatcattgtaatttttagaatataattcttggtaagtgaatctttcaatgaagatttcattctcattcgtattcacaataccagtaccattcttgttgtttaactttgtcagtaatttttcttttttattaatatatcttaaaggttaacatattttattggcaacccttctctaaattttttaggttttaatctacaatagaataattaaagcatatataaaaagtatcacatatatattgatactaaattgtggtatgagtacaaaatgtaaaattatcttgtcgttttgacatggtgtaaacggtttggttcaaaagtttagttttgtttgcttcctgtgtgtgtttttttggtgctttgagattaatgagtaatagacagccacagattcagaatttaacagagaattacgccagtttttcgattgaagatgatgatgaggaaggcttgttgtttgaggcaagggaggatgggcttgcagaaatcgacgatagatggttgttagtggggaggttcctaacaaatcgatccattgattttcaagctatgcaaaacaaaatagcgtcgctatggcagccggggcgtggtttgtatgtgaaggagttagatccaaacctcttcctttttcaattttatcatgaggtggacatagagagagttatcgatggtagtccatggacgttcgatcgggcgcctttgattatggagcgggtaacacacggagttaatcctagatcaatacctttgaatactctggaactctgggttcaattacataatttgtcaattggttttatgtctgaaaaagtcattagagggttggtaattatattggaacgttcatcaaatcggatccaaacaatttc

SEQ ID NO: 184172 - DNA, 3369 bp, Cannabis indica
caaagcaagcccaaccacgtttccgaagagcccagaaacagaaaaaccgtacaccattgaaacgacgtgaaagtgaatgacacatcggacaccagttgaaaattcgtaacttgcaaccttgcatggggattggaccaataagataacgttatctaccaagcaagaaaggagaatccgccacgtaggacagggataacaaaaaacaaacaaagtcattgaaaatccgaagacttcccacctctcgttttagccacactccaaatcgattgttgcctaccctctctctcatatcaaaactcccaaccccccctctctcctttctctaaaccacactactgcgattctccccattcaaaattctcaatcagatatcaaaaggagaaaagaaaaataaccactaaaatggctgcaacttcggcagtttctatggctatgccattgacaaacgcagtaggccagaagaagtttccaagctccgaggcattcctcaagccactcccgttgaggccctctaaggccatggctgtgggaccaagatcgagcggaaagctcgaagtcaaggcttctctgaaggagaaggcagtgactggtttgaccgcggggttgatgacagcctcgatggtgatccctcaggtggcagaggcagccgattctggagtttctccttcgctcaagaacttcttgcttagcattgcagctggtggtgttgtagtgacggccatcattggagctgtgatcggtgtatccaacttcgatccagttaaacggggctgagcttgagggagaggagacactttcttcaccttttagtttgttattgagagaattatgcaaaaaattcttaatttttcgtttgaaatgtaatctgtttgtgtaatgtaatagtgtctctttctttctgtgtttcttttgtgcaatattgtcactctagtttccagcttttttatcattcaaggtgagaaactgtgaattctgaaattcttgattttgcgaatgatgagatttagaactaacatcaaggattattatgaaatttgaaaacgatgacttcagctgttagattatagtaaagggcaatatgaatagtttctaatattaaatgcttaatctgaaagacaattaatggtattgttgaatcaatgttagcaagattcgctacaactaaatttacaaaaagcacataaaaatattaatctgcagagaatgctctgttccttagaatggaaaatcagctctccggaatttaaactattattttaactactcattcttggtagcattaattacctcaagggctttaatattgactcaagcatgaatttgctctctgtagcgtagttcaccttatcagccttcattacagtgattttcaccctttgctcatcaccgtaaatctcctctttaatcttgagcctaaaaagatatttgttaaaaaccctctgcctaactatggaatcgaatcttgcatcatcctgttcttcaaacttcaacatgtacaactcctttgccgagcagcccaaaatctcttccccggactcctgaaatgctgtcacccatgtcaatcctgtatgatcttgaatttgggcttgaagaaggtacctgtagtcgcattcttcaaattcttgattacatctgtcacactgccatctgtttcctgaccttgtcacctttttactacactgcctatctccgatcatcaacgggcatgctgtgtagcagaaagtatcggctttcataaatgttattgtagcattgacagtgacccaatctggtttatctgatcttcctagaccttcatctttaatttgagatatagttttccgaatctcattcttaggcattccaggcaccatgtctttagaaatggactgcgatacagcatccttgccccctcgatcaaaccagtctctcaagctatgagcctcagggaaatctggatttatgaagagttgagtggaagatattgtacctattgatttcccactaaaatcgttaaccttcccagctttcaccgctaaaactggacaaattccagaatcaaacatatcctgaagcttctgaccttctctgttacagaaatccccccatagggttatctcaacgctcctgcctgaccagtcctttaaattcaaaattcttctctgagtttccattccattctttctcatgataggaactgaaggattcaccgatatgacaataccaataacatcaagaatagtattactatcagcactttcaatgtcactaataggcctaaaagaaaactgctgtgttggtatagaaccatcttcatcagggcaaagatcgacagttgaagttgcctctagaaatatctcccattcatttttaagatggttaaagttcttttgagcaggttttaagctaccctttgaaatcatatagactttaccaacctctataacatcataaaagcggtcaacaacagcattgaaacaggtgacacgtatttcccctccatcagagtcgagaaggtcaaaggagaacacttttccatctccccgggcattattataccgacgaaggtcccctttcgctgtcacccttgccttgatagcccacctaccttggtaaggattcaatgcagcaataggaatgatccgagcaggtgcttcattcttaagaatagtgccatgacttttgtaattagaaggtggttggtaaggaggttgaacagcaggccggaaatcctgcacattggctacaggagggggttggtaacgattattggaaaccctagctggctgctgtaaattgatattcggctgaatcttctgagctgttgaatccggttcgagaaaatgttttgggttcccaattatatcacattccggtataatagtttccatactcaaaattacaactagcctgcatggataagaagccttaacgatcttaaatattgaaacaaccacaatgatgaaaataacagtgaaatacagttcaatcaggaaatcttgttcttaaggttcacaacaaatttaagctgattatcttttaatggataataggctgttactccaagctcagattgttccatacaaagtcgaggttaacttccacaattttttttgaaaaaaaattataaaaaataaatagtacccctccaattgagggcttccggaatatcatcaaattgtacacacttcctctaatgaagggcttccataatatcgtatttgtacctcagccaactgaataagactccaaaaaatcctgatactattactacatatctagcttctactaagcaacaattcaaccaattacgcaatactttaagaaaaatatacacatatttcagaaataacattatcctaacctgcatacccactaaacgacacgaag

SEQ ID NO: 184173 - DNA, 2446 bp, Cannabis indica
tttaaatacagtttccatgtatctagccttttgtggattaatctacataagctaacgtatgactctgttctaattgaccaaaggagtatttcccatcccaatcaatgaatcaaactgtcaggtctgtgagggacaagctcaataaggtaatgaaccattaacaactatgtttattttatggagtttcactaatggtgtttgatgtaattcatgtaataaaatattttgtttttgttgtagattcaatccagtggtgaccctttacaacatgggtctatctccaagaaaccccgtctggacaatagaagaagaatttgaaagaataaaaaggtatacaattaagtctagaattttgtgaactctatatcacatcagttttgttagtatttacctcacccttaactagtgatcatattcagtaaaatgtgcaaatttttgttttcaatgcttgattgtgaatggaattcttgaatcggtgataacaaagtgacaattttgctttacacatttaaaactcctcttactcattacttacggttttctggtgtgtttgaaattggttgtatgcagtaagacttaatcattgccaatagcttaaggcttgtttgtcctttgttacatcctagtatgcattacacgattgtacttacaaaccagaactgtgttttctcaatgcaagcgtaagtaaaagagtgcatgatgaactataggcgataatttacatagaaggaagactaattacaataccaatcaaattaaaagttgtgttttatgattacactttcttccttctttaaattatatcaaaaagctatataaggaccgacaattgccaccaaaaggatcggtgatgtcctcatgctctagtctagtatcattttagaaatctactagttctataagtgggatgaatgatgaacctatcctttgctttcttttcttgattgctatctaaggagtttgctagtagctctagaaggccatcaaccttcggaggaaggcccgcctggagaagtaatattttaacctcatagcagttgctgaagtttgatccttagatggccaatagaagagtcatagtattagtaggttcatccctggctatcatgtcatcttaggctccttatctgtttcacatactctagaagagtcgtgtatgtattgagacttctctctgcatcaaggtccgaaaagaccactatctttttcggttattactttcccttttgagaaatactatgagaattgagaagctatgaatgaactagactttccttctgttctgtgtgatattattctggagttaactgttctattgctacttgtttttctgttactgtgaattcttaggtggaggattggttcataacatgttactgtaaattttgttacttgtttttctcttatttgctcaagtgatttccgtaaacagtatttgaaaaacattgatacaaagtttagaaattttaaccaacacactaggttcactaccgaatcatagaaaacaactaccacaagagtctaaattggtactgaacacaaaacaggagaacttgaaatgaaaaaaaagacaacaaagctggaagaaaacataacgcactgttggcgagactaaaacaaagtccacaggcaaccatagagtgtcaagcagactaaactggaaactattgccacccttgtttgttgtttactcttgtctcggagcactcatattaaaaccaccatttaatctttttattttcttattctcaaacacttctcatagtcataacaaataaaaacactaccttacataaggtccaagagatgacattgaataaaacaacagacacaatgatcaaagttaaaccatgaaattgcgacttttttgttcactcagtcgagttcgtgaacctctccctgattcttttcatatagattaagagtctgtcgtaatcaggaaggctctccttgataattggaagttgtttgaaatcttgaacccacgtatggagccgaggcaatgtttttgggtccaagagtttgagtcctacaagttgttctatacattcaaaccaatgaggtaaccatccatgtgctatgtccaccatgtttatggtctctcccccaaagaacttggtatttccaaggcttaattcctcttccaagattttaagtgcttctgctacttttgtttcgttttctcccttctctccactacttgtaagtaccgaaacagcattttcaccctgccatttaacgaatgaaatcaaatgaaaagtaaataaataaaaccttacccataaattataatgatggcattgggtttccctttttctccgtagcactactgacaagagttgtgcttgtgaaatggattaaaggggaaaattcaatatagcatagaacagatagatatttgtgatgggtattttaacatgaaatcctaattaatttccttaaatct

SEQ ID NO: 184174 - DNA, 4842 bp, Cannabis indica
ttatcattaaataaaatataacctcaaatacatttcctaatcatataatactgcgggaagagcgaatgcaattcctagtcctaacataaatataaaagtagatagctatatatataacatttgagtgtagggtgtgtcacgcctctttatttaataaaataaaataaaattagtctgaaaagaaaagagtcacaaagggtgaagaggcatattctctctctttttcaagctccgacttttcttttattaaaattttattattattatttaaaaactatctttttcctcaataaaaatccacactccacgcccataatccttctctcaacgcgagctttctctttctagaatctcgattttccgtcgtcgttttacagagccgccgacgtcgtttagtaccaacagaaccgaagatgcattctagtcacttgcttctcgaggagcctattaggatggcttcgatcctcgaaccatctaaagctgtaagtttttttttttttggatctgagattgattttaatggtttttgttagtctatgaatcttttaaggaaaagtttattgattagggattttgattttttgatttttttggtgatcgtagacttttttccctgcaatgacgaaaattgtgggtacactcggtcctaaatctcgatcggttgaagttatttctggctgccttaaagctggaatgtctggtatgaagtttttaacctatttgatttctatgttctttttttttatttttctctaattgaagagtgaaaactgcttttgtgaagctccttagtctgtttggttaaaggatttgaggttttttggtgggtggtggattatatatggctgtttgtataattacgtatttggatgtgttgcatgacagttgctcgatttgatttctcgtggggcgaccctgaataccaccaagagactctggagaacttaaaggcttctgtcaagcttaccaagaagctctgcgctgtatgtaatttctgggttttcgttgctagtgctcattaaaaatagatgctattgtatatgttagaattttatgtttaagaggaatatgaacataataaatatgatggggcctccctgagttttaaaaaatatatattcctgattcatgtgcttgacaatgacacggatgtattttggggtttatgtttctttttcaggttatgttggatactgtgggggctgagttgcaggtggtgaacaaaagcgaaaaagccatctctcttgaggcagatgctttggttgttctgacacctgatcaggaccaagaagcctcctcagcggtgttgcccatcaattttgatggactttcaaaggttttgctttattctttttgactatgtgtgtttcatatttaaaaaatgcatgaaaagaaaggaaaaaaaatccattcccttgtaattttggaatggtaaaatgatcttatagcactaatgatagattattagttcttttcctgatcgattagtttctagtcattggtaccagtttaggttttactcattaggttttttacctgtgtccagtaagagatgaatttactggcttccgtaactaatacatatatgattctaagacttgcaaatgatgaaaacttgaagtaaagcaatctttcacatgttattaagtaagatgatttttgttataaaattctaatatttgtatggcttctgcagtcagtgaagaaaggagatacaatttttctaggccagtatcttttcactggaagtgaaactacttctgtatggttggaggtaagatttaagcaaccaatgaaattaaattattttatactgtgctcttctactgagttccattgctctacttgatatgatgaatattctgtgtaacctgggaggaacagattagtcatgtgaaagataaggttttcttttgacttgtttaggttgaagaggtgaaggggtgtgatgttgtttgtatagtaaagaactctgcaactttggctggtgcattgtttaccttgcatgcttctcaagttcacatagatatgcctaccctctctgttaaagataaggaggtaaatatttttttcgtacacactttaaagattaatatgtttcttgtttttacttttgtctctttcactagctttctcttaatctctttcttaattttctcctgatttccttttcattggtttgaatgtaattacaggtcataagtacttggggactaaaaaaaagattgacttcctctctttgtcgtatacccgccatgcagaagacgttcgccaagtaagcaattgatctaatgaattatgctcttcgacaattagtatgcttgtttgaatgattttcttaacatactcgtgctttgtgctgtcatttaggcccgggaattcctttctaagttgggtgacctccaccagactcaaatttttgctaaaattgaaaacattgaggtggggtgacatagtttatttcaaactcttcttcctcctgctctatgaatatttaattttcacttgagctaagcaagttgtctttttaattttaggggttaacccactttgatgagattctacaagaggctgatggaattatcctttctcgtggaaatttgggaattgatcttccaccagagaaggtcagttcattaaaacaattagtcactcacttaggttttttataacattttgtcaaggagttgcatgcatggtattctttgcttttctttgtaatttaagagatgcatataaaacccatcatgttttattcatattttgttttgtctcaactctcaatttttaaataagtagttggtataacttttctttggtgacaaagttttaaagtgctggtgaaacgagtttcaatgtgctcaatacgtgcaagtgaatgatgcttgttcttagcactggattcaaattaaatttaccttgatattggaagttttttctaatgaaattctattttgcaggtctttttgtttcaaaaggctgccctttacaagtgtaatatggctggaaagcctgcagtggttacacgtgttgttgacagtatgaccgacaatttgagacctactcgtgcagaagcaactgatgttgcaaatgctgttttggatggtttgtttctttcttccattccatctacagaatatacatttttcacatcttctgatctttttacttggctggtgcaggaagtgatgctattcttctgggtgctgagactctacggggtttataccctgttgagaccatctctactgttggcaaaatctgtgccgaggtgaattattgttttttcgttttttttttttttaatttcattgagtaatttgctggcttccttgctgataatgggccagctctacccactcgtttgcatttattctcatttttttattcttatgtaagtttagtaacttctcaaggtttttatcgttttcccttgtttgattttgtgtaggcggaaaaggttttcaaccaggacttgtacttcaagagaacaactaaatatgttggagaaccaatgacacatttggaatctattgcttcatctgcagtacgtagccctcaatttatatatatctaatatcataccgttcagtttagttgtgtttgttgaaccgttaaattcctccacatcgcaccccagtcgcaacttctatatgctattttaattcaaaatacatgctctttattctttaggtacgggcagcaatcaaggtgaaagcttcagtaattatttgctttacatcgtcaggaagggctgcaaggtaattgagtattacatgctcttcattttcaataatgcaagctggattctgcctgcaatagttcatttttattcatttctatgttgcttttattgttgaatgatatctgtaacacttaaaagaaattacatgtatatgcagattgatagccaagtacaggccgacaatgccagttctctcagttgttgtcccccgtcttaagacaaatcagctgaagtggagctttagtggagcctttgaggttagctcttgaatccttttcttttcttaaagtcagctggtttagaaaattaatgtattttcatatactgcttgtttcaatcaagtcaattactggtttaatggccagattcccttggaattttctgaagtaccggatgacaaaagtattctcatatttcagtatttttagtcttggacaatttttttttggatctaaatcttggacaaatttttaattgcattagtatcatctatgaatttaccactaggtaggtatttaagtaaaagggggcaacaataaaaactaagttaccaccgtgcatcttttgttccggaagaagattttacttgtttgctttagccttttaattcatttgttctaaaatcaagcaagatatttatgtatccttgttaatatgcaggcaaggcagtctcttatagtcagaggtcttttccccatgcttgctgacccaagtcatcctgtaagtcttttatcattattattataaacccagtctccttgtttaggtatctctatgttaccagtattgaatgatatgattttcttgctcatgatttctgttttccatgtttgatttcaggctgagtcaacaagtgcaacaaacgagtcagttttgaaggttgccctcgcacatggaaagacagccggagtcataaagtcacatgaccgagttgttgtttgccagaaagttggcgatgcctcagttgtcaagattattgagcttgaagattagaagagattcttgctccttttttgtttttttattgttcttccccacctaatttttggaatgcctgtgtggtatagtgtccccaggttttggcgaaacccagcgct

SEQ ID NO: 184175 - DNA, 3809 bp, Cannabis indica
tcctgctaagtccttcaagctggattttgtagaaagcttaatctgcaatgagaaacagatttcttgaatcaggtaaccatggagttgcagagtattgtattgctagttcagtacattcacacagaaaaaattagacgtttaattaagtgaattaccgggttcgatttatcaccagctcggtaaaacaagagtgttggatagtcatctacctgcattgaagaattatagttcaaactttgcataaaaatgaattattctttagaatacttaaattattcatggtggcccttacctggagttttggatgttcatttgcagaggcatcaaatctggcaaagatcaaatccgaacctttgaagtgcttagccaacttctcaacttgcttggttgtagtctcacaattagagcaccatggtgtaaaaacctgttgcataacagttaataatataaaggttttctacatttgtgaaagaagtgtttaaggggaactgaggagcatcagtatgaatgaagcaagggaacttgaaagtcagtaaggatggtgaaagacccgaataataacatacctccagaagaacattcttgggaccattcaaaaccaaatcatcaaatgttttcccaacaacgctcagaatagttgcatttcctgaaaattttcagtagttgcataaacacttgttcaaaagtcatttttcttgtatacactttaggcttccagtccaaaacatcaatacaacaaaaaatttcatcatcatggtatcgtcagagagagagagagaggctcacattatcaggaataggctgtgatttgaagtatggagcaagagtaccatgcagaagcccagagcagaaatcctataaaagcacaataccatattagccatctaggtaagatatttcttcatgatgaaaatgtcaaatggacaagaattattacttcaatgttgcttggtgacagatctgagtcaagaagaaacttagagctgaatgtgctatcgaaagcaatcaactgtaatcacagagaatataatatcatcaatttagagctcagtaataagaaactagagtaaaaaaaaatcaaaataaaaagcctaaatatttggaaaactaacaatggtgttctttgattcttcaagcccatacatagtcaaaaagggcttagcaagattttcatcagtgatgtcgatataaataaacaatatctgcacataaagaacgtattagggagaaattcacagtacacaaagtttccaattggtttcaaagcttcagcattcaatatcatcatagaataccttcgacttgaactttcttgcaacatcttgaagaggctgacgaattttatcgaactcatcatcctcagcaaaagcaataacctgaataacaatggaatatatttattacatttgaaataggctccacaatcagtagctataaacaaatattgctttgccagtacttttgccaatcaatcaacagaaccatgcaaattgtttaggaacctgaagtttgataggactggagtaaacactagcagaattgatctcagtcagtttggtaactaaaggaaacttgttgtagctcaaaaactgaagcagcttctcagcctcaaaggtggtctcttctgcagtcacaaattcatcatatcagtaaagtgtctaatttcgtcaccataagacattgaaaatgagtgcaattcttatgaaatgtaagacattgaaaatcattgcacttctatgaaatgtaaagacattgaaaatcagtgcaagtaatatggaatgtactaactcaccataagcagtatatctttctggctcacttttaacaataccaacgaacttatcggtagctttaatttgcgggaacaggacattggcaacttcaatgttgctcacttcaaaaaattgtaactcattgtcagctgctgctgccttgaagaattcttcataatcatgtccctaaaacaaaaattgaattttatataattaaccaactacatcattcaaactttttagttatcaaaccagaatgcaatatagatacataaaacaaacgacatacaatataataaaaggcaaatggagtggacaaaactctaaaatgaaagctccccctcctccataataatgtgagttcttcactccattactaaagaaaacatagtgaaaacaacacatttttttcttctttctttctaaattgaggagcctaaatatgaactcaaacttgggtgaccaatgaatcttaagcaaaaaacatcacacacctcaaaattttcaaaaaatccaataacaaacgtatggtatttcttgacaacttcttctgcttctgtcactgagtttattcttataactggaacaccaatctttttctttgtccatataactatgtcttccctgcatcaagttcccatataaaaacgtacacaattagccaaaacaacaaacaaaatcaccagatattcatagcttctctagctatgacaatcatcgttatgaataattccaccattaacaacacattctaattacaagttaacaaagttaagaacagcttacgcagaaaatccaccagtataagattgagaggtcccattgataaatagaagaagagtaggaaaccctttgatttcaagaagagaagcggcttttgggtaccgatcggcatcaagcttggtcatcaaaagggggctttccaattccttaagcaaattagcagcctcagcaaactgaggcataagctctgcacttctgggacaccaaggagcataacccagaaccataacgaactcattgttatcaatgacccgtttggtattatctccattaagctcaagaacaatcctttgagccttggataccacctctgcctccgaggacctcacactactagaactactactactactcccactaatccctccttgttgttcctcttgctctacttcgtcatccaatgctaacaattcttcaataccctctgaatcttcttcgtccccattttcagtggtgatgggatcagaagccaatatggaagtgaaaagagccaataacaagagaagggtgaggcttaaatagatgaatctggaagtgggttttgtcttaaacatggtgataagcattcactcttcgagaattggcagaatttgcggatcttatgagatctgtgttaatggcagaaacaaaaagatgggtttttgtgaggactttctcgtggggtttttatagtgttatgaaagaatttaatgtacagaatcagaaagtagtgtgtaaaattgaagattatttagaaaagcaaaattgttaattacagtcaaaatttgacaaaacaaggttgtttttaattttttgtttctttaatgaaaatgacaaaatgagatttggattgccttgattgatggcattattaaaaaaaaatagttaaattaattttaaatataaataaataattaaatttaatttttaatgataataatatttaaattatatttttaaaactaattaataatttattattaaatatcaagttattatttaggtacaatactttcggaaaaaaaacgacaaatatcttcttggtttaaataaaacgacacaaatatataatatgtacaaaacgacattaaactaataaatgaaaatgcataatgaacatagttttacaaacgacagctccgcaaaatagttttccatgactattttggtacaaacttcatgtcgtttttatcatgtaaagaacaactttatgtgctaagttttatttgctacatgaaaagaacaacttgatgtcgttttttacatgactatttt

SEQ ID NO: 184176 - DNA, 1850 bp, Cannabis indica
ttgttttttcttttcttttttaaatattgttatatataaattgatgtttattagaataagaaatgttccattttcaagatttagaagttgcaattatattctaaattcttatgcttttaggttgtcaaacatgaaaacaaagggggttagttttttatgccatagcagctattttgctttttcatcgaatgagatacgttttcattctttttgtttaaatttgggcatgattgtgacattttctaatatggagttaataaaggagaatagtacatctctgtagttgattttttgatctcaaatacagctcaaaacagaagcacgaatccactttttattatgtcatttgtttatacgcatgaatgatacacacacacactctaagggaataatttttaaccatgaaatttgatggttaaaaacacatcgttttattacattgttacgattcaaaagaattgaattgtgaaatgtgattttcattatgtatagaacagaaaacaagcaatgtttatcacttgagctaattaattagccaactctgaatcattcttttattaacaaactagctaacaaaaatcagaaaacacattgagattgtctttgagcaaaggaaaatgagacttggaaatcgatttagttaggcaatcaactaattgagcaatagctggaacatgttgaacttggtatctgtttattgataactttgtcctagacaaagtaaaggtttatttcaatatgtttagtctgtgcatggaggacagggttagcagcaagcattattgggctgagattatcacaccaaatcaagggagcttgagttgatgtcatgtgaagctcttaaagtaaagattgaattttataggtaatagctaaactccgaagctcaacttctgtggaggacttgaatattgtagtttgtttcttagattgccatgccacaagaatatctctaaaaaagatagtaacatgttgtagaccatcgatcaacaagatctgaggcctaatctgcattacaatatgttgtgaggttgaagtttggtgccttagtaatctgcaggccatatcaagagtaccagccaaatatttcaggattcgtttgacaacaacctaatgtgcttggtgtgggttatccatgaactaacacactttgtgaacactgaaggcaatgtcaagtcttgtaaccatatcatattgaagtgcaccaacaattgaaatgtacaaagaagggtattcaacaggatcactaccaaagttggatactcaaagaccactagttattggagtgttgttggttttagcaccttgaagctgagtcttgcagagaagatcttgaagatatttctactaacaaagaaacaaaaaaacagaagtatgaatcacttgaatccccaagaagtaattaatagggcctatatcttttaaaggaaaagcagcactgagattgcttatgagatctgaaactaattgagcattaatgccaacaactatgatgtcatcatcataaacaagaagataggtgcaactatgtagagtggcctgaacaaatagaaaatgatctatttttagtgaagtaaagacaaggttaagaagcagtagacagtttttcaaactaggccctagctgcttgttttaggccatataagaatttttttagtttgcaaactttagtacgatggccaaacaaaacttggtggttgagtcatgtaaatttcctcttgaagatcaccgtttaaaaaagtattatcaacatctagttgtcttacgctccaccccttttttgacagttatacttaaaaccattcggatggtgaaaggtttgactacaaggttgaatgtctcaatgtagt

SEQ ID NO: 184177 - DNA, 3010 bp, Cannabis indica
aaaaaaaaaacaaaataaataaagtgaagcgggcagagtctcagaaaggaggcccatagatctgggtgggctcttaccattatttgaggcccattcaaatgtctgaataattcactccataacaatgtgtgctctgctctctatctaatatctattcttaaagctttgaagaaaatttaaataataataataataataataaagaaaagaaatgaagataaaaatggtgaaaaataatatggcagataaaagagtttgggtcttctgctttttccttcccaaaaatggcaaaccacactctcctcctccacttgttttcttctttactccattattgacctctcttgcttcctctctttcttcttctttcacgtaagttttttttttcttgctcttcatcactttcttttttatatattattcttcatgtttgtttgtttctcttgaaaaaaaattcctgggattgttcttttaacggaaaatgtattgttacttatgagtatcacttagctttctggggtgtttgtttgtgttgagctttacggtagtccatggaatgaactcttgtactaaaatgagggtctggaatttctgttttgttggttaggaaatgaaggaagatagtgaaaaagggttttgagttttgtgatttcttttctattttttgtttgtagaacgttttaagcttctgtgttctgttttcctctgcacgtaaataaaaaattgggtgaatttttttatctaaaattttgttaacttttattccatttttgtaatcactgacttttttttttgtcctaagtagtctgcaatctacatttgtgtttttcttggtaatcatttactagaaatcttctactaatttcttgcttgtagtagtaactacttgtggtgtgtgtgtgtatatatataactcatagatacttttataggtattaactctttgtaattgaatacaatgttcaggttaagagtaatgttgttgtttgattttgatattcaaccctcaaatttgtaatgatggaaagtttggatggacctgagttagctgttataagaaagagaaggagtaacgcatcacgaaggcctcgggttgattcacattcacttctagaaaacttcaatcttttgacattgtcagcagaggtttatagcaatggagacaatattatagatcaagatattggggataatagagtagctgtttctgatggattgggaagagaaaacaagctgaagaagttgaaactcaaagtgggtggtgttactcatacaatccataccaagtccacagctgacttctcctatggtgatagcaccattttcagaaactcttcttgctctgtgactgccttcacgactcaggagaagccgcttcctcaggtaacacgctcaaatattttaaatcaggcaattactggcaggtctcgttccacacaaaagctttattttagaatgtaactggtcaaattatcaaggcctagtgattttatttttgcagaagcacttaccttttctggtctatggtttatttttctgaaagttcactctaggatatattaatcagtttctcacattcgtggattgtgcattgattttaattgtgtgtggacgaggatagcaaatgatagtttttggtatgaatagctatataaatattactaatgatgcaggatgacaaaaatggaaatcattcctgttcttcagataaaaagagaggttttggagttagatggaaggatatgtcaaaaaatgattttagctcgcaaaaagggcatgcttcaaggggaattcctgctcaccatgaacctattcgtaagagcaatcgggttcctaagagacgagccttggatgctagattggatgaggatgatgatgatgaagatgaagaaattcgttaccttgagaagctcagggcctctaaaaactctggtggcaatgaaaatgggaaggattacagaagccacaaagaacacgtggttttgaagcttccaaaaagtcgtttgatggtagatgggttgtataatgatgctgttggagattatgttttgccaaagctgggaagtagaaagaagtcaagaccggagaaagaattcgaggatatagactacatggccgaagaagaagtgatatccgatgaggaacctggatctgctgcgaagaagttaaaaaaggagtctcctagtccttatgtgcaagaatggaaggaatcaatcccaactacacgaactagggccatgcagcaaggccaagagaatttaaatgggttgtcagcgagttctattgacgtttcaaattacttagtttcctccaaatctagaagtaagtgtttcttttcctctttaatgattttttctgtgtgtgtatacgccccctggtacatatgcatgtgtagtatctaattatctctttatcaccctattttttggctgattacaggaaaaaaggataagccctctgaactggaacaacaattaaagaaggctgaggctgcacagaaacgtagaatgcagtcagagaaagcggctcgggaggctgaggtttgcataccatgctgcattattatggttaacatctcttttcatgaggtttcttgtcttatgaaggattttatacttttaggctgaggcaataaaaaagatacttggccaagattctggaagaaggaaaagggaagagaaaatgaagaaacatagagacgagtggttacaggtgattgcaaatataaggaacattcttcttttgtgaaaccttgttatgatacattgttgactatgagtctgtgtctgttgcttcctgcagggaaaagctgccaatgcccttatacttccatcaaatactgttagatgggtcagtaatccgagtggatccatcgttacattctccaatgatattggcttaccaagtttatttaatccagttcagtgcaggtaaacaaggttttacttttcaactgacaacaagtagttctagctttatgttagaactagtttaaataaaacctgttatg

SEQ ID NO: 184178 - DNA, 3321 bp, Cannabis indica
gagacagatgcattgcgtgtttcatcagctctaaattgtccatctaggaatttatctagttttaatgatttaattatggatgttagttatcttttatcctttttctcaggagtaattgtttctcatgttaagagaaatgctaaccaagctgctcatggtttagctaagtatgctcttgagttggatgaagatgtctgttggatgggtgaaatcccaaatcctattttctctgttgttgtaaacgatatgcagttttaataacagtgaaatttctcaaaaaaaaaattatatgaagcactattttctctaaaaattttacattttttttttctttttttacatttttacaatattttacaaaaacaattaaactatataaaaaaagtaacaaaaaaaaataatatccaaacaacatcaaaataacagcaaaaaataacatacaaataataaaaaaatcaacaataaaataacaagagtataatataaaaatatatcaaaagaccgtattttctgtaaataaaatcataaaaattgtaaaaatatttaaaattcttattttttttaaaaaaaaaaaaaattatcccatgaagtaatttaagtgttggataactttatcccatccctcaaatttttaaaaatggcccaaacatggtatggactaaatccaatcccacctagatctccaatgcaccaaacaaggccttatggtatagcaatcatcctcttcaggattaattaacctatacaattgaccagtttcaaatgatcccaagtaaagaaaatagtcctttactatttacaaacataatatatgattcacatctcttttcatgttttctttttatacaaaaaatctgttctttatatgtacataatcaacagatatgtttatatagttaactaaatccttacttaaacaagatgtgaaaactgtaatctgaaacaagctttgcagccaacccaatcatgtccattgacaaagaattatggctagagagggacagcaacagcaccaccacacaacaatggcaaatctaaacggcgggaaacaaccaccccattgtccatccaaggaacaaaccggcaccagcaaggcctaaccccaatgcaaatgcaacaatagacttgtgaatatcatgctttggtttgccttgccttttctttccagccttgtgctgatgatgatccttatgtgattgtctactaccacctttgcagggtgccttttctggtgggaaaagatcgacgattggttggtttttgttcttaagctgaaggcagatgttctctagctgcagcagttggagccattgcttgtaagcaaacagttgagacgcttgtctgaaaagtagcgtgatgatgtgttccttctcggtatatgcttgctttgcagcttgctcggcttccctagctcgtttctgagaaaggcatagtgcttttaagagctgagctttggttttgtcattttcggtatcatcttcagcatcatgcctgttgatgctggtagtactaagatcatatgaacaaggacaatttgtaagtgaaattgaactttctaaaaactaaaacatggccaactagttgcatttttttatgaatttttatgcacaaaaggtaaggcaacagaactgtatatggtagtaatgaaaaaatagtaacaagtaccaataatctacacagcattacctgagagtttcatgaggcgaaaagcctgaatttgtgcttcctgaagaatactcttgactggagaatcttgattcagtcatccccgttggatctaaaggcgaagaaagagcatcatcatagtcagaattctgtgagcaagctgatggtttctgttgcttcctataattcttagcacggggtcgtggaagatcacaattctcgatgtgctcaagggacttctgagcaaccaaggaagccaaatcatctttaccggtactacgccaccatggctcattcttatcaacaccatcccagtgagattcataatcagaaggcagtttcttgggatcttgagaaaccaaattgttcaaagaatccaaactcatataatgttcatccaagtaccataaatctctcacatcctttcctgcagctgtttttcggggactaacagcctttagttcctggattttagtatccaaaccattttcattacaagtgacatacaccttcctgagttgatccatagaacaattattattcttagcaataaatccttccttgttttgtttcttttcacaaacatcattattcaaaatttcaagctgagcctccaatgaaattctctcctcactaacaaaattcttgtgatgaacaaagttaggttcctgattcaaccaccaccttcttctaccagataacacatcataatttgcaaaagggtgcagatgatcttttgcagcattatcaggggaataatcgaactctgacttcgaggaacacgacgacgacgtgcaggaagaatacttttccctcacatcgtcgtggaagtagcaacggcgagcactacgtttccatgtagttcttgcttctgctgctgccattaattacttcaacaataggcttgtgataaattctgcagttacaatataacacagcagaaaataaggtatgaatccttaaccccttttttggttaaaaaggaatcaaatctataaaaagtaagcaatattaaacaaccatgaagaatcatcatattaatatacctctattatagcatcataattatgggataagcatttggggagcccctatgattattatcatccaaaaatgacctgattccataatcaagtaaaagtaaggcaacaaaaactaaaattacacaaatcaattcatatgggtccttgataagtaccacatttttacaatcacaaacagctttctgtgaagaagtgtttgtcatgttgttataaagtacaagagaacaacagaacaatccaaagaaactcatgaagcaaaattcttaatgacccacaatcataatcaacaatcaataatctaaattacccatgagaaaacatttgctgatccagagtcttaactcataaaagggtcaagattttacatacccaattaggttctgaaagtaagggtttccaaaacacagaaggaatctgatcctaaattaagactttataaagaaaataaacaaatcccagttcaactaatttccccaaaacagaaaacagttagttaaaatcaatgacaaagaagcacaatccataaaattatgtaatcaaaaatagaattccaaaacgaaagaaaaaccacttgaaacacatgatatattcgaaacaataaacataagaagaa

SEQ ID NO: 184179 - DNA, 1660 bp, Cannabis indica
tatttgtatattatttttgtgttgtttaattattttactttaatgtaattttcttattttttttgtgttaatgttatagaacaccttagtctataaaattattataaaaagaatatttaaaacctaaagtataatttttttaaaaaaacaagtagatcttgtttaaattttcctttttaagtacatttttgtggtatttggtatatatctatacaagaagctatagtagcatttttatataagaagcaatatacatatatcatacatatagatttatattgtctccattaggtcaattcaaacatattaataataaactaatttattatatttgagatcacaagccttttgaaaacaaaaggctatagctgatcatcaaaacaacgtcaaagtttgttagaatttgaattagatttagatctcacgttcacaatgagtttaattaataacgaacacatacataaattaacttaatttgaattccttcgactaaaaaagcacatatattctttgtactcttgtctagtgttttcactcgaagaattagtatatatattgaacagataatgtgaacggaatttgtcagatatttcttgtattattaatcccaaaaatccatacacataaacaatttaaataaattaataagagtactatagagataattagagagaaaagaatagcacatgataccatcacatgctgtcactgacatcatcataactggccacgactaaccctcttttcaatgttcccaacattcaaacatcacgtgtttatattccccaatacccttctaactcgtttaagctaccattttcgagtcattaccatctcaaatttacattaatacccctacattctctgccctaattcttcatcaaactcatacaatagatgagggcattaaagtaattaagcaagccggaataattgtaaagtggtaaactagctgaaaccagtgatttgtggatcaatcatcgaaactttataaaaaaaaaaagaaacaataaaaagaaaaacttaataataaataaaaataaattaaattaaaaataaaaagtcgttggggagatgttacttaaagcctactaaaccattggaatattagaataaagaaaaggaattttaaaaacaaaaaaaaaaggtaagagaaagaaaaaaaattaccctcgtgaaaaacaatgcttcacaccttttctttcgccacaagaaaatataatatgcctccaaaatggtccatttattgatatatattttctatagaatatgacttatacatgaatatgaggctataatatagtatatatattagctagaaaatctttatattattatgtattatatagtttattatttttttttatggaagtattattatatatagttaagtgtgcgagtagttcactaaaaattactccaaaacaagaggttatagctggctctctatgtagctagttcaaaaacatttagtaggatcatatatagtattattaaaatgataaaatgaagatattctaaggccgcatgactttgcaattctcccataagtataatagccaggcactactatattattctaaatgccttcttgtatatatatataaaattatatatttatatattgatttaatatgtcattttattatgtattatgtca

SEQ ID NO: 184180 - DNA, 3190 bp, Cannabis indica
taagcgtagttatatattagatagatattagatctaatgttcattacacaaaatattctccggtaaagagttgatcggaatagatccgtatatttggtggataaaagtctatttagccacattatgggctgcaaagttacaagacctacgaatattcgaaaaattacaacatatgaaataaggagaagacttagtacaaaatgagacatagttctctagagcgcaatgggacaccttcccattaagagcattgatagctagcctcgagtcactctccacaataatatacttatattgtagctccatcgcaatagacaccgccaagcagcaggccgcagcttctccacaaagagcatctgagaaatccaaccggaacgtgtgaatacgaatcacccttcccagatgattccttgcaactacaactgtgcatatactctccaagcccacacgaacatcacagttaaacttgatccaatccagaggtggtggagtccagcaatccctcaacagcggcgaaggactaggcaaaagagtagtatgtaactctgcaaaagaagaacaaatgatgtcaatacatttcaaaacatcaggagggctattgttgtgaaccacatcattacgcatccgccaaatattgtcaacaacaatagaagcatagagaaagacatcctcagccctgacacccctattgttaaggctccgaatgaacttcacccaatcccaaactcgaataccagtctcacacaccgggaaaatttcccaaggtgacgaacgccacaagtgcatcgccacttcacatgttagaaatagatgttccatagtttcctcccccaatccacataaaggacatctagtatcctcaatcagaaatcttcttccaatcactgcttgaaccgaaagagcttgagagaggatgcaccaccagagaaccttatgacgctccataatgttactattccaaagtttattccaaagagttggagcgacgtcacagtgaggcgttctatccaaagtttgggccagataagctgatttacaagagaatcgcccgtcactctccaaagtccacaaccaactatccttgccaataccaggagggattccattcttgagaatagcagaaacagtctcatggtcgaaaagactttttagcttgtgaatatcccacccactcctagtgacaagagatcagcaacacaattgttatcctttaatacttttttggtgcttctataacgcaccaaaaaattatttcatatgtttggcttctaaaaaattttttactctattttatttcttcatcgtgtaagttttaaataatttattttacttgcgcaattaaaataaaaaaaaattgtgtaatataatatttgtttggatgtatcttcacttaattttcatctatccactctacttcgagagtgcttgctcttttctcaagcactgagactaatctcctttgtttgatattcttagaattcattcacatgattaaattttgtatctttttctgatactcatgatgcctcctatttttaaaagactttggttgcacccgaatactatttaaatatattttcgacgtgttaatttttttttaattattaaaattttacaaaatttcttaaataattacaacataaatttaaataattacaacataaataattataaaaaaaattaaactaaaaattttacgagatgttgaaaataataggggtgtacaacaaaattttacactactaagtgcacctcaaaaatagtgttacggtgtggtttgatacatagaggtggcaatttaaataatgacaaacaagtttgacacaaatacgacttgagattttatagatttgacactcatgttttatcaattttttgtgttacgggtcgtgtctgtattagctaactgaaataaatttactccacacaactcaatgacactaaaaacaaaaatttagctaacaacccgcttatacaatacacgacaagagattttacgagttcgacattatacgaaatttattcgaatcatgtttgtgtccatattttataaatctttcatgtaatgggcttattgtcttgtttataacaaagctatatgaggtaaattcaagacatttggaatggccaagaaacaatatctttgtttctaatcaaatacaaaataattacacaaaatatttccataaattccaaacaaactttgaagaagagtacaatcttttaccaaatttcatacaataacttaaatcaaccatagagcaacccaaacccaccattgatgcaactacaaaaagccaaagctttcttcttcttgctttaacaaattccaatgaagaagaagatgatgatcttatataattaatcacaacataacaacaatgttgaattctttttagacctaaatcgggtttcgggttttcgattaatcgatggtttcgatcgggcttttgtggcgattcgaaggaatttcggaatcaaagttggtcggctacgagttgttgaatcggtagaaactgagttgactcggatgaaaaagcttctgatcttgaggagaagagagagtcggtggatcttccagttgggttcgattttctttgctttgaatttgaaattgaagttctttgcttttgctcgaacttcaattctccatgatcgttgagaattttcctctgtttgcatttttctctgaagattttcagtggtaaaggaagtagccgttgaagaagatgaagttaccgttatttttcgaattttaaacccgaaaaatgcgattcgggtaacggaatggatcgggcttgggtacgggctggaaagcctttgatgcttttgggctgggcttgtttacaaagcccatatctcagagattgtcgttttcggcctttttggtgatgagtatataaatggaatatttacatatttggttacttttatattaggattatttcaaaaatacacaaaaataaaaaaaataacaaaaatatgacggatgtataaaattttaaatatttgtatggttttcaggattttatttatagaaaatatggtcttttgatattttcatattatttttatgctgtactttgttgttgttgttttattgttattttttattatttgtatagttttttttacatgtttggttactttttatattaggattatttaaaatatataaaaataacaaaaa

SEQ ID NO: 184181 - DNA, 547 bp, Cannabis indica
tgaagtattatattgtattgttgtggtcaaatacgtactatttgaaacaatcaaagaggtccaatgacagttccacccctcatttgaccacgtggcacgactttattagctaagaaaaggacgtgtcaaatttcgtgggtaattatcgagaaagagtcataattaattaattaggtgtgaaccataaggctgtggtgggtccaatgctttgtcagtacacatctatctgattctgcatgcatgccacgtggacggtgacagtaggcgctcacacgtgggacatgacagaataccgcgtagcttattaaatttataagtgaaaaataaatgaatttttaataaaaattataataatattactttcattaatttatccatgcagagaagaataaaataaacattttaaaaaataacataaataaaatttagtatggtctcgattctcgaaggcagccttttcttttcttgtcaaaagagaagagaccacaaagttgaaagcgtaaaataaaataaacacatattatgaggacaaaaaaaaaaaaaaaaa

SEQ ID NO: 184182 - DNA, 3835 bp, Cannabis indica
actttatttggattacacccggttcattactggtcgggtttgagtttcattaattcaaaactcgaaaaaattaaaatacacttgaaacctgaatataaattttttatatattttttgaaaacctaaacttaaaacagaaaaaaaaaaaatcttaattgtaaataatgatatatcatttttattttcttcttcttttatttttttttcttttcatttatttataaaaaatgtataaaaaggatatatttcaaaaaaaaaaaaaaaaaaaaaaattaagcccaaccagaacccggtcaaaacccactcagacccgcttcaacccaaactcgacccacacgtacttgaaacccgaaaatccgatcacacaaatgagtaggctcgagttactaattctatacactagaacttgaaaatttaaaacccaataaaacccactcgatatacacccttagacaaaacacatacacaaaaagttgttttctttctaataaatttcttctgtttttgtgttttttttttatagtaaaaaatttattatgagaaaattaaagaaaaatttaaaaatatagaaaaattaagtaagataatcaagaatctttatagtaattagagcgataattaattactataaaattgtaactaggtaccttatgatttttttttatatatatatttttaatttttttttcaaattttctcataaaataatatttttgagaaaaaattatatttttacaaatttatacttcaaaaaccataaaaaaaaaattcctcaaataaaccaatatatttttgaggtttttaaaaaatactaaattttagacaaaaatttacaattttactgctatatgaatttttttataaaaatattattttttttataaaataaccgtaaaacaataaaatataataactaaaaacaactgtggaataattaaaaaataacactaaaacaataataaaaacttaacacattaaattgtataaaaaatacatactattttttaagaaaatatatatactattttaaaaaaaatttccacccacaataaaaaagaaaaaaattaaaaattttgtaaaaaccgctatatttttccaattactaaaatcccagcttaaaactacgtgaaagttttatgtaaaaataaattcttaaatatacacccaactataactatttaattttttttttgttcttcttcttattattattttaacggaaaaaaaaaaaaaaccatttagataaggtcagaaaaaatatcgttttgggttcttctcttcttttcgtcggatttaatttgggttggaactgaacccccaaaaccccactctcctcagttcagctcagctcattccttcctcaccttctccaatggcaagtccggccatatcaacacctctcgatgttcacctaaccaaacattctgactcaaccagaaccatcttcttcacctcaccaaagctcacccatttattccccagaagaagaaaatcactctcttcctccatttcttgcacctcaaactcaaaatcccattctgaaaaatccaagtctctttccgaccaactcaagcctttaacagccaccactttatcagaagacaaccaccaacaacaaacccatcacttatctaagcctaagtcaacttgggtcaaccctgctagacccagacgttctgtaatttcgttagagagacaaagaaagtcttctcactctcacaatcctcagttgagagaactgagacagtttgcccagaagcttaataactctgaagatgactctgaagctgctttcatggctgcccttgaggaaatcccacaagcaccgacaagagagaatgctcttttgatactcaatagcttgaggccatggcagaaaacccttttgttcttcaattgggttaagacccagaattcttttccaatggaaactatattctacaatgtgactatgaagtctttaaggtttgggagacagtttgagcttattgaagaacttgctaatgagatgattagtaatgagattgtgcttgataacattacttattcaactattatcacttgtgctaaaaggtgtagactttttgataaagctgtggtttggtttgagagaatgtacaccactggtgtgatgcctgatgaggttacttactctgctattcttgatgtttatgctcaattaggtaaagttgaagaagtacttggattatatgaaagaggtagagctagtggttggaaaccagatgctattacttattcagttttggggaaaatgtttggtgaagctggtgattttgatgggattaggtatgtgttgcaagagatgaaatctgctggtgttcagcctaatgttgttgtgtacaatactttgttggaagctttgggaaaagctgggaagcctggtttggcaaggaacttgtttgaagagcttatcgaatcgggtttgactccgaatgagaaaactttaactgcccttgttaagatttatggtaaggctaggtgggcaagagatgcaatggagttatgggataaaatgaggtctaattcttggcctatggacttgattctctataacactttgttgaacatgtgtgctgatttgggattggaggaggaagctgaaaagctatttggggagatgaatcagtctacgaattctctcccagatagttggagttacactgcaatgcttaacatttatggtagtggagggaatgttgaaaaggctatggaactgtttgatgaaatgtctgagagaggtgttcagcttaatgtgatgggcaccacttgtttgattcaatgcttggggaagactaaaagagttgatgatgttgttaaagtctttaatgttgctgttgggaagggagttaggcctgatgacagactctgtggttgtttgctttctgttatgtccttatgtgagaatgttgatgatgaaaataaggttctaggttgcttgatacaagccaacccgaaaatggttaatcttgttaagttactacaagaagataagccgagtttcgaagctgtgaaagaagagtttcgtggtgtgattggcaagacttcaatcgaatcgagaagacccttctgcaattgcttgattgacatatgtcgaaatggaaatcgccatgagagagctcatgagttgctctatctgggaacactttatggtttgtatccaggtcttcacaacaagactgctaatgaatggagcttggatgttaggtctttatcagttggtgcagcccaaactgcactagaggaatggatgggaactctttcgaggatttcagcgaaaagaggagttaccggagttgttttcggctcaaactggtgctggaaatcacaagtatgctcaaggaatggcaaattcttttgcttcccatgtgaagaaactttcagttccttttaagcaatgtgaagacaaagctggttgttttgtggcaacaagagaagatttaatgtcttgggtacaatcaaaggttcagtctattgtaactgcctaaatatgagaaaccaaaaacattgcattttagtatgtttatagtttgtaattcctttaaattttgttacatgagaaagtattttggttttatttattgcacttcagtttcacagatacttgaattttatatatttttccacaacacaatttgaagggtctaccaaaaaaaagaaagaactaataataataataataatttcaagggaaaaagtctgaaaaaaatttgttagccttgccggtgaaaccgggtgtgtctataacagggaagcccgaaggctgttcccgtccctgtcaggggagatgccaaccgtctctcctttctacgaacac

SEQ ID NO: 184183 - DNA, 2621 bp, Cannabis indica
tatattttttattattattatttcccaaaaacacccgcatcatggtcatcatcatcttccttccgggtgcaagggaaaaagctccagagttctatctccctcctcctcctcgttattaccataacataatctactataatcttctaccaaacattcgaatccccagcttctacactttctcttgtacggactagtacagccttcttgctctctctctactacgtactctccctgcacagatcaagagcttaattaattaagcattccattaaacaatgatctattggctattttgacacgtaatataactactcaaatgaaataaatgtttataaaacgcgatacatgtgctataaacatatatattacatagtcacgtaaatacgtagctataattaattataaatgatgtattaccccaagtcttgtttctaaagctacggtaacggagtgtagagtagtggtggatgtgttggtgttggtagttgtaatggtgggagttcgtggactatggctgaggccaagactgttacgcttttgcttctgtctctccctagccttgtggttctggaaccagtaaaagacgtttttgccctcgatcttcccgaacttaccaagctgcgccgtgatttgttcgatttgttgggcgttcggagtccgcattcctcctctatacagcgtctccagtattcctatctgctcttgcgttggattccaccgtgtcccaccagggtgtgtttcaacctgtattatatgcaccccaccaattattattatcattaatatctttgttggtgtcaactattttcattttcagataatatttatgtatacagcaccaagtacattgcaatgtacgtaacgtaaaacaaataatatacctgagatgaatctttcttgtggtgatcaagagaagatccaagctttctaggaccactttctggtctaatgaagctcttgagatcgaagggagcaatggagtttggagaagtagtggtggtagaggaactaatattactactgtctgggctattgggttgaagttttggagccagagggcgtaagcgtttgcagcctagggttagagatggttcgtgcgcttcccagagtccacgtgcgaactgatgaaccttcatgcttcctcccatggtggaggactaaatcatgtggaaggcctgattatatagaagagagaccattcatgtcatgaataaagaaaaaaaaaacaaaaaaaggtcactaaagtgggaaatgaggtggtgcttgggataaccaagaccaaatgatgaggtgaggttgacttggggtttctccatatatattttttaattttcttgttttctttaaaaataataataaaagtaatctgacaaaaaaaaaattaataaagcaaacataaataaataaataaataaacaatgagaaagaaagagagaaagtgaaaaaaataaaataaaatgataatgaatagatctttatggctagctattaggaggattgatgattattgtgtgtatatgcatgtatgatgatatatggatcgtacgtgtgggttttcatttgtgtgtatgtgcgtgtgggttggcccgtcaaatcgggtcgttttttcttgctttcatgataaggtgtacatgcttttcggtggcctctctgttttctctctcaagcttttttttgttataaagcaaaagagagggaatgagagagatccctccaatcccaaaactcgaacatggcaaacccttctctctctctctatacttttcaagatacggataatatcatatatggttgttgatgaatgccgtcgtctttttctttggtataaatggaatgtttgaaaattactaaacacaaaataaagatgaaaattctctctgaaagccgtataggaacacctttcttttatttttatttgcccaaaactgtagctccaatttcccaaacagtaaagtatatattatatgaagaactatatgtattattttaatttacttttttattgtaaggaagaactatatcttattaaaccaccgaaccccactttatttcttttttgttatttcaacctgatcaatttctctatctatatctgtctattctataatctagcaattataactaaatatatatagtttatatggctgtccccattacgtatttcactacgtatagtgtttgagtaaactaaactgggcatatcacagtgctcatataattgcaatcaccaattgtatgggatagatttaggataaacacgtgtgacggggcacgtgcttcattcaacgatagtcactgaagaattatcacaaacacctgcggtgcattgaagcctcattatggcaataaggctaaattccatacatgatcattcttgaggggccaatgcccaacgcccctacactcgactcatgcaccctttttataattttcttctctttttgttctcaacctcttatatttaatttatatgtgttaatactactgttcactaccaaaaaaaattatttctagtcacaacaatagtcgtggctaaaaaataaaatagttgtgactaattacaaattataattcttgtgttgtgactaaaaagttaggggctaaaggtattagttacaaaa

SEQ ID NO: 184184 - DNA, 1217 bp, Cannabis indica
aaaaaaattctaaggcattataaacacatcatatcacttacactcacccttatttgttcttgtttctccaatcataaaaaccattaattttggcttattattgcataccaattaagttaaatgatcattaaacgtgtcacttgtaagattatatttatatgctaattattgtcactttcctagctagtactctttaaaataatagcattaattaacaacttaacaacaatttcactaattgaaacttaaacaaatagcattaacaacaaacaccctctttttatttaaataaataaaagaaattattgtattaaaataacatgtactttctcctttttcctttatagtgtatagttttttttggtaactttttctccatatgaaatatacccatttattgggaaacacattgctccatgtgagaggctaagaaaagctataattgaacctataatataaggttttatgtgttactttattttattttatttacttattataaccgaccttgattgatttcatggttttaaatatcattaggtgccattaaccaaagattaaaatactaatattgagaaaaaaatggtaacactagtggtggcctatttatataatactccatctatgtttatttttatagacaaatacaattaacctaaaggtctagatttaaatacgaaaattagacactagattaatataaactttacaaagatttctcccacttaacaaaattaaaataaaatttcatagtcttgattgataattaattagtgtgggaatgtgattcatgagatctaataatgatgtcaagtttttttttcaactactattgctttactaaattaattaaccctaattttattattattgttgtctttaattaacaagtttatatgtttgtaaaggcataaaggaggggttaagaaataaaataagaactaaaatattacaacaaaatcaataaatgaaaatttatagtggagttcaagtggaagcaaagatttgaaattctccctcattgaagttgccaatgtttgttttttgacaatattaattctttatgatttgaagataattatttaaggaggaatcataatcttggtatgtagtcaacttcattagtccattgttgtccaaaccatatgccctaaacatgggccaaattaaagtacctaaacaagcaaaaaaatgtaatctttacttttttttttttt

SEQ ID NO: 184185 - DNA, 2822 bp, Cannabis indica
aattggtagaatgattgaaaaaggaagtaaacatactagattttcaaaaagagcgtaaaaattaaagacattaaattaaaagaggtatgtagtataattttaaattttgaaatatatttgtattatatgtgttaacttttaaaatgactattttttgttacataaaatattagttatatatatatatatttaaaaatttatataaatatttgtaaatttgattagatcggttatttttacatgtcaatcaacatccaatctgcacaagtgagaattttagattttccaatccaatctaatctgcagaagtgcggatatccgtacttaacaaattatattggattaaatcgtgcaaatcaaattagattgattattttatgacacccgtaaagctgattaacagtggcatgttaatggtccctttgagagatgaggcggattagctgccccaggtcacactagccttctttcttcgtagccttacggtgaatgtaaattacaatagagcacagcagtgcaaactcatcaaaagcaatattagagcaagccctgttattttctttaatcaatagcttagatctttaattaatagatgttttcaatacattagtcgccacaatgtacaatcaagttcacttaaaaacgtagatatttttttttcttttggcacaacacctagaacagtcccaagtaccaatagaagatgcaaaatacaacattcttcattatttttctttcagagaaatacattctcctttctaccctattttatctcccttacatttctgatttttccttttctctttcctttataccccccaaaaaaatccctattcatgttctttattgaaattagtccttaaaaccaaatcaccaagaaactaattctataatcaatgatatctacaagtataactctcgagtaatcctaagcacaccatgttataatgtcatattggcctcaaatgatggtaattttcaagcaggtcatcttctgatagcatatctttcacgtcttgtggagtccagagtacctccactgcctataaaagtagcaaaatatgtcaaaggaacggatcaaaaactacaaatggaaggcgacatacagatcatacattttagaaacttaccatcgtgtcagcaagagagacgaacctcagagattccagggatgattccaagttcttagaggttttaatggaaggaaggttcttcacacctcgaatggaaagaagaactgtaacctacaaatgatttgatagattcaaaggaatgagaagtgaaaatggagtataatgtttgaaagttttacactcttaaggccaaacaaatgaaaaaatatcatgctggtgaccaactacatttgcaccatacatgagtctgggactggagctcagtgagctccaccatatgtgatgttggtcaccacgccccagaagtcattggcagtgttcagcgataaaaatggtatgtgtacaaaaaagggttatccataaatgttaataagcttgacttaaacacagaaataatgtagatggagattccaagaaagaagatcataccactatgtagttcttttcaagtttgttccccttcagtgtggaggttcttttttgctcgccgttgaaattgacaagtgactctattccaaccttctttcgctcttccaaggaatgttcgttaaagctcttttcgttttctgtaacactcttatttttatctacctgcaaaatatattgaagttagaatcaaaactacaaacaaatttgaaagttaaaatcctgctattatatctccaacaaaagacattctgtcagtaaatatgttttttcttttgttgtcaacacatcaataattcaaagtccattttgtctaaattgaaaagagtaggatatatagactaacatatgtaaaaccagatatccagtaatcacggtgttggagcagaactgacacggtttctgcacccatgaaaacaacatgtaaccatgaaattgtcaaaaaaatgtctagtgattaggtattaggcagcaattctatcagaatccatgaaaatattccagatatagaccttgcagaacttggtgaaaacctttaacatccgatgtatcagcagtttctgcaattcgattaagatctccaagaagcactgtagcctttccagataacccaacctgtaacaaagaaacatgatatattcaagtaagtaaatgtctttaaactctctttgatccttccaagtgatagagtgtaaatataagggattaaaatcttcccttttaaaaataaaaacccaaaatcactatagctcgttcactaaaagaacacactagaatctaccattattcttgcacataatggaacccagattcaaatataaaattttccaatcaaatgtagcctagcgaaatatcattttcaacctatacccttattttcatgcatcattgtaagaatgagaccataatctgaaatcagtatagcctaaaaaggtatataaataaaatttctccctttttggcagtgcaattatataagctaacattgtacaatgcgagttcatgttaaaacttaataatgggtttgtgtatggagagacatgaatccaaatcaactattacctgaaccattagaacacttgcttcataccagggttcagtcaaatagagaaatcccccaattgctaatattacagtacccaagaatattaaaagaccgctataagaacccttcttttcattctcggtctcttcctctgacacagtggaactcgagggatcaaaatgacgggtcgtttcagtcgaaacatccggcgagtaatg

SEQ ID NO: 184186 - DNA, 5508 bp, Cannabis indica
aaagttggcaggatgtattttattttctttgttctcaaataggagaaacagttatgttgacggatgaaatcttctctaatctgattgtcaaactacatcaacttgtgcaaaataattctgcaataactttacaaacaggactactcaactgctttctatataattaggaatgagtgtttagtgtttattatagatctccccatctctctaatggacctatgttttctttcctattatggttgtacagtttagaatcaattaaatgagtaaattttctcttccaattcaatctttctcaactttcaccgtttttaattagcctcctcaagaatctatacctgtttcaatgaagcttcatattcggattcccagccacggcgagccttctctaaagaagaagcttttctgtatttgcttctcaactctgccaaagacatttccctgcacaataaaatctgaagggggtcaaagagagtacacactgaaaacgtctcatatggtgtcagtcattttcagcttcataccgtactgactctccaacagcaggacgaactatcttgtacatccctgtagaactgaaacataattgataggggaattattttaactgaaaaaatccagcaggatactcccacgaacaatggaattaacgcatcttgactcatgttatccataacgagaaataaaatatagtaaagagtatagtaacaaataaaaaaaataataaaaaaaagtgtagacggtaaggacctctatttaggatctataaataggcattaaataatttatacaagtggagattcctgaaattgcaaatctagacttagaaacatagaaatgtaaggactatcgaaataatcgataatacttgagggttggacataagaaatatcattggcaatttggcagaagaatgaagtcaaaacatagaaaagtatataaaatttaagatgtgtacctttcaaatgccaaaatgaagtgacgtttgcccatccattctcgtttcgactcatagaaactatcatggcttgagccaagcccatccttttgtttttcttcgagcaaggtacttgcagactattaaagttaataattgaaaaattataggtcgtaaattaatgtaaacatgttattcagaaagtcaaacccaaatatacaaatacctcccacgtgatccctcgatccaaagtaaatgtaaagagcacagtagacgccttagagatttggtcaacatggacagtctgctaagcaattataagtcattaataaagcaagcaactgaatttcagatgtaggaagtttagttacaagttacaactccccttcggatgtattacaaagttttcagagatgtccttttcttcagttttcttttctcattttacataaacaataacttacaagagagaacaaatagttgtgaataaaaaaaacagcaacggcattaaatgaaacaatacagagactaaatattagaagaagatattttcaaataaataaatgagacaattcctgaaagtgttgcgggtggaaatacaaatagaaaagaaaaagacaatatctgaggttcaagtccccctttggaacccacatagcaattgcaacagtttcttaatcctcaaatattgtaaggttaggtgggggagcctaatttcaaataagaacttatgatcaaagagaaacattggtgggtggcccttccttgagcgtgtgtttgtgtgtgtctacaattaggatatcattatgataacactttcctttctctcatttacaataccatataagcacataaattgtggtaatccagcagtaacctctgaaatcgctgtgcattttcactttttcgtttagaaaattactcatttcaaacaaatgtataaaagggggaaataatcacactttattgtgatagtcttacttacaaaaaatatatagataagggtataatagaaagacaacgaaaagttgacctttggttttccttgtagttccacaatgttagctttcatatcaacaatccctgagtcaagacttccctcaattcgagcattttgaacaagaagatccaaaatgcttacaaagagctcaaacagcctgtataatggtttaagcataattagcacaattcccactgcagtaaaagaattgctcaaatcatgttacacacctattttgaatctcaggtgccagtcctaatatacgattgagaaaacgaccaacatcatgcatgtcagattcaactatacggcctccatacttcccattagctgtaacaccagtacgtatgagataacttacagaattcatattaaatatgttatgaattcaggaaaaattatatagcctgtagaagttaacaaaggaaatttgcacttcaattataaaaataaatacctacagtaccgtccctaactattccaactgccataagagcagcttgtgcctttacaatgaagtcttgaattgcatccttattttcagatgaacacccaggcggcacaactggcaaattttcctagaaacaaaacttacttaaattagctgaagaaactaccagctttgtatttacatattatctgcaagaagtctcaacataaacctgtcccatgattcctttatacatcatcaccagggccttctttccaaaagcactatcataattgtaggcactcaaagatggtcctgccctgcaatgcatttaaccacccagtgcgaaagagtagagcagagatttcacatgttaaaacgactttacatgtctaattcataaagctcaacaacaaaactgaaatacaggaaacaaatgagctaacctgcggtctccttgtgttaaggctccaagagattgtaatctcttggcaacaatagatgcaaaccggcgctctcccccaaggttagtaaaaagtagcctataaggtagcaaaggaaacaaaacatgagttcaaggaactaatttgccaacttaattttttttttaacgattaagaaacttcaccatttacatatttgtctcaacctgcactactttcttcaaattttagtgaaagcaatgatgaaaaaataaccttccaaacaaattggacaataaggtaactgattctaaaagatcactaagagccaactaaactaaatcataatcgatacttccagactgctttttgtcagattcacaaagggaatttgttttagatcagtctgcttagtttcaaatcataaatacgtatctagcataattatcctgtacccacctgtattgaggggctgatgcttgatttgatcgatgagttcttccaaactgttggattgcacggtcagcactccatggaagctctaatgtcaaatgcactcttcttttctgttatgcaaataataagcccagacaataagcaaagacaaatggtgtgaagaactacatatcttaacaccacatatacattgccaattcctgaatatttggccaaacagaggtccaagcatttaaaatacctgattcaggactcttctatctgcttgcagtgaaacacctgctgacccagcctcagatattacagcaacaaacttcttaccatccataaaaagcttcttctcatgcatgttcaccatttccatggaaacatcttttctaaagaaaaggaaccaaaaataaaagaacattactgctttaaccattttaaataaagtcataatacagaaaaacacttatcctataactcacgtgtttcgtgcctgataagttacacctttcccattagaggccctcacaagcatgccacgcctaccagtcatttctgccacgttatcaggacccccaagctgccatgtaaaacaagtgatcaaactaggatagtaatcaatataaaaacacaaatactactcatgatttgagcagaacaaactagagatcagagaagtcagtcaatagtatgctctgttaatgcacacatttaatacattctgtggatttttagatagtgtctggtacttaggcctgctcctctaagtacttcgtattcatattttctgtttaatattattcatcttctgaatcaaaacatcagtgcttgtattattaatatgaaaattgattacaagaggattttgtatgggagtgcaagatatcttatcattgccaccaatttactagcagcaaaagagagaagaaaatatttattcttttttttttaataagatttcattaatcaaccagcaaatacaaaaccagcaaggcaaaaaaagccagcccactcacaccagcctacaaacaatcactgtaataaaaagcttatcaacttcctaacatccaaaatattcttaaaaccaagtaaatttgaaaagttttctgttatagagaataaacttttttaattacacaataagtaactgaaattcctcacaaacttttttgaattgatggacaagatacaaatcacaagctttcgagaggcttgttctctcctattccaatctttcgagaggattggggctctcgacagtgagtctcaactcttaacaattttctccactccctctctatctcctatccttttatactttagaataattgccacatcagcaactaactcagccaactaatacaaaacagcctaataacaaataaaagattgacaactgtacaagtaataaactagaattttataagcctaaacaaacttatcagaaccttttcctttgataaacaaattggagctggggcttatcaaaatttaaacaaggactccaatctaagaacacagttaggtaaaaatttggtagtgtaagaaagcagcactgagagtattcccagtgagcttcaaaagtaaagctattcaaagtagacgagtcagcaacaataactgacaagcaattacaaaacagacatctaaggatgcaatcttttatagtacaaattttctttctttttcaggataagaatccagatgaagtataattataattataaattgacattcatattacaactaaagtgttttgtaaaaaaatcaataccataaaagagaaagtatcaacaagcatgatttaaaggtaagagcttgtgcaaaagaaacacacaaacaacataagctactaggtttttcaaaggatggctacaattgcaaaagaaaccaactttttaaatcaaatgaagaggaatgaaattaatatgcactaattgtaatcttgtcacaaagtgggatcaaacaattcaaagttctgcagttgaaaaccctgtcacattagtgtacaatgctatgttttatcttcccaagcgctctgatgtctgatatactatacatttcacaacactaatctaacaaactaatctgaaatatgagcacaatttcttcaatctgcagttagtacataaggtcatgagcatctagaaaattcagaaaaggaacaacgttagttaatttttcacaagataaaagtccctatatgattagtgataaattaaattcaatgctatgctgtcttaaagaaattatcaataagagagagagagagaga

SEQ ID NO: 184187 - DNA, 3241 bp, Cannabis indica
tggagtatctagtggtcagtaaaccatatcaacactgtataaaaaaaacacttgaaaaaagacaatccaaaaatgtatatacagtcaaaagagcttttctatttctttttcatttgttagtaaaaaacaagaagtaactgcagcctagttcatttgattatccaaaagcacacacgggcaactcataccagtcatgacatattcaggagctgcataaccataggtgcccattacccgggtcgagacatgagtttcatcaccctgaggtccagctttagcaagaccaaaatcagagagcttggctgtataatcctgcaaattaaaaggcaatgtggataaaaaaaagaagtcagtatcattctaccaccaagagtaatcaatatgaacttgtaccatcattataagctttagaacatcacttactgaatccaataatatattagaggttttaaagtctcgataaataactggcctttctgcattgtgaaggaaagcaagcccctttgcagctcccaaagcaatggccattcttgttccccacaaaaatggaatagatgcttctacaagataattaaaacgtgaggtcaataatttacgggaatgtagaaaacttacgtagctggataccaagcagaataccatctctttaacaaaaatgaaaacgaggagaagaggcccactgaaaactaagaagataattaccaagcaacaagcaaaaatgctatatttcataaggtaataaattttaaacgataagttcccataaacacgagagctcctaatgaccattgctaatgttaatttcaacagttaaaattgcaaacactagtcaaaaggatatcaataaagttacttgcaaacaagttaatacaggaaaatgaaagtggactccctataaattggatacattgagctaagagcctagaacatgtcagtgggaggggtaggcttaaagattgaaccaataattgggtcaaatatcataaaaatgccgttcggttaatattatctcacaatgctgatatgcatgcatcgaaaaagaaaaggaaatgattgtgcatgtcttgtaaaagaattatcattagacattataaaaagtcaagatagagatgctcatactcctaaaaaggtgattctcaaggcttccgcgaaacatgaactcatatacaagtaacctatgatcgtcctcgcaacaatatccaatcaacttaaccagattaggatgtctaagctgtcccagaaagttcacttcagtctgaaagtacgaaattgaagaaaagtaacaagttagagatttagatacaaaaataaataaataataaaaaatgcccatgactcagtatgggaaggagcatacaagccactctcgatgaccctgaagaccctccttattaagtactttgacagcgactgggagcgatttgaggccaaccctgacattttcgtcaatgtatcctttatagacagttccaaagcctccctcaccgaggatgtaatcggagcggaagctctttgtgatggtctcaagctcgaagagggtaaaggagatgacatgggtgtaaagcatggcgttctttctcgaatcctcaaagtttcgtggcgttgagggatcgctcagatctgatatggaacgatgatgattttgcttcttctcaccatttttaacaggcaaagacgatatcaagttcagctgttggactgcgcaattgacccacccaaaaaaaatacattcattgaacaaagaacagaaaaaccctaatgtgaattattaccatattaatttcaatttccaaagatgaatcatgcatgcgcaaaacaaaaaaaaaaatagttacattgctcttacatttatttttcaattgggatttcagtgcgggtatagaaaaaaaaaatgtcctaaaaaaaactaaaaataaaaagagtaaaatttcccgggaaaatgaagaagaaaaccgaaaaagaaatgaaatgaagagtactagagcaatgtagaaagattagatctgagaaatgggagaaaggattagaaaagaagaccttgagcattggttaccactgcagattcctctctagtaccacagttgcccattttggttgtcttctttttccttgttgatggtttgattcttgtgaatgagatggtaatggagggagtgagttgatgtcgatgggcgagagttggtggcggtaacagtgaaggagtaggagcctgaaagttgagcagtaaatgaagaagagagaatgagagtgaattgaggcagtagcgacggttgaaggtggagttgtgactgtgtgggtgagagtgttgggcttactgatatggcataggcacagagtttcattctttctcttttcccctttttcttcttctttactttatttaaatttttttagaaacttttttttatcatcttacatttatttatatatatttatatggttgaatttctctctagttaaaaaaaaaaacattattacataaccaattcattattttcctagttaataaaaaatactcattatttttctaataatgtacatgtaccaattcataattacccttttttatatatgttgtcatcctttcaaaaatatatatagtttatattttcagaaattttatttattttattaagtaaatgcaataataatgcaccagcatattgattggttcattgattggagattttctttccataatctaaatatgctgttttctttcgtgataagaaactgcttagattaataattaagtaaaacatttggggataaaaatacattttgttacagtcttagaatttagatatttgaccgttaattgtcacgtcactaaccacgtattactctataattggtcaaattatttaatttttattttttatttataaatcaatttaaaatattaaaaaataaataaaaaaatttaaaatcaaaataaaataataaatatttaaaattcatattttaattaaattaaaataaaataaatcattaattaaagccaaaaaactaaaactctaactaaatgctaaaaatttgtgaaatgtcatcctcttcttccagctaaaaaatgattcaagtaaattctaccaaaactattccaatgtatccttacttttatttatacctttgaaaaaaatttacgaaacccatattcgtacactgattaatgcatttattagagtaacaatatttcatcatcgacaccttcctcattgttcagttgcagcaaaagaaaaaa

SEQ ID NO: 184188 - DNA, 3121 bp, Cannabis indica
aaaaattataggaaacaaaaaaaagagtacaaaagactactaaaatttgaaacaaaatctaatcaaaaaaataaaattgaaacaacgcggaagggacagccacgtgccagttaataaatcataatacaatcctgtgtcggtgtctgctgtagctgctgattaaatacacgtgtcctttcctcactcttctattttcttgtatatttctttcccaatatatagcttgaataaaaaataaactcagccctttagtttaaacccaaacaaacgccaccaacgaactccttttcttcccctctctctatcgaacaactacatagtcaccacaaccctaaaatccacctccattttatccggtcacaatcaccggaaaaagttcccaaccatccacttctttctctctatctgatgctttcccactcgggccttcccactcctgaaactctctccagcaataaaaagcacaataaacccccggaattgttatcgcttaaatctaactcactcaactcggttctcctaccttctaaccatcccagaacatgcctcctcctcgcaattctctctctccaggtaattcttctcctcactcttcgttcccttccctttcctcgccaccactttgcccctccgttcgacgccgctgcttcggtcccaatcgccattgagaaaacggaccaatgctgttctggtcgggtcttcgtctacgacttgcctggggctttgaacagggagattcttgccggttgcgataacttgaatccatggagctcgaggtgcgatgctttgtcgaaccaagggtttggccaacgagccaccgcgttatctgggctcgtgccggagaatctggtcccggcgtggtactggactgatcagtttgtttcggaagtagttttccataatcggatcatgaaccataaatgtcgggtcatggagcccgaatcggctacggcgttttacataccgttttacgttggtctcgcggtggggaaatatctttggtccaataccagcactgccaaggaccgtgatcaccattgcgaggtgatgctgaagtggctccatcatcagccgtattatcaacgatccaacggctgggatcatttcatgacgatgggtcggatcacgtgggatttcaggcggtccaaggataaagactggggctcgagctgcatttacttgccagggatgcgtaacatcacccggcttttgattgagcgaaacccgtgggactatttcgacatcggtgtgccttaccccactggattccaccccagatcagactccgacgtcgtcgaatggcagagcttcgtccggaaccgtaacaggaacactcttttctcctttgccggggcgacaagaggcgcaatcaggaacgattttcgagggctgttgctgagtcactgcaggaacgagtcggacgcgtgccgagtcgtgaactgcgccggttcgcgttgctcgaacggcacgtctgcgattctcgaagggtttcttgactcggatttttgccttcagccgaggggtgatagcttcacccgcaggtcaattttcgactgcatggtggccggttcaatccccgtttttttctggaaacgaaccgcttattttcagtacgagtggtttttaccaagcgaacccgggagttactcggtttacattgaccgtaatgcggtaaaaaatggtacagcttcggtaagacaagtcctcgaaaagtacagtaaagaggaggtcagtaaaatgagggaaaaagtcattgaattcatccccaaatttttatatgccgaaccccaagagggtttggagaccgtaaaagatgcttttgatattgccattgacggtgtcttcagaaggtttaaggagcaagaggagtggggattcaagtggtaatgaagcaaaaaccaaccatgggtaaaattctatgcagtaaatttaatttcccaacattcattttgtgtcagaaaatttgggtagaagttttatggacattcagttactggttgttacggttcggaaagaccagaagggaaactaaatgtggaattcattatttttttttatattatttttgcttgtacacaattactgaaaattcttagttgctacttcatattcttttggtgaagatatagaagggttttatgtaattacgttttggagttaataagtgatgggtacaagatatctatctactaccgacgaaggaagttggaccacttgttgctgtggtccatagaagttgcttattggattggaattggacccaataataatgtccaattatgtgaagagatgggcgtaattgctatgatatatggtgtatgatcaagactttttattagtaataatgtaaagaattatgacgaagggggatgaatttaatggatgatttcccctactatatgtattaccaattcaatgcctttttgggcatgtgaaatttcctatacaagagagtttagcttattatcatcattgcaattctattttagcttatcatggctggttttatttggggtttttttgaacaattgttgtcagaagaaaagaacagctttcttttttctccaccagttaattaatgaataaattgagcctatgtgaaatgtttcttttaggcttaaattttcaagtgtgtgtttccagaccagatatattatagtttgtttagtaggaaaattccagtaaatgtctggactgaaagcataatgattcgcatatggcctactagtttgtctttttattgtgtaaattatactcgttatatatatttctttttaactttccatcattgtggaatttcccactttgttatttaagtttgtcttattgtttaattaaaaagtgcaaagtttaagacacgccgcctgtctttttgaccgatttgggttagttggtgtggtgttttttttttttttttggagaaaatttaagacacaccgcctctgtcttttgttgatcgatgtgggttaactggtctggtgtgcacctcaattgtttttagaaaaaaataatttatatagaaaaaattataatttcattacgatatgtaatcaaagcagtagtattattcagtgtggtgtatttttaagatttatgtactgaaaaatttgtaatttttttt

SEQ ID NO: 184189 - DNA, 1472 bp, Cannabis indica
tatgttaatcttgtcgaaccatatcgccaacacttaacccatttgacaaatccaatacttccaacttatggatgtggacagaatcgtcaccatttttcttagcttatttccttccaataatcgtctcatttggcatcacactactaagggctgctatacggttaactcatatgctttcaccttgatgagaatttggtagagaaacgagagtcaagtggatcaaactctcattacacttggtggaaaactttttggagcttgaacttaccgtcaaaggttaaaatttttgcatggcgggtgatgcaaaatgctctccatgttgctactggtttgtgccgtagggaagtgattgattctgcagcttgcgctttgtgtaataatgcgtgggaatcgattggtcatgccttgtttaattgcaccaaagcaaggaaggtttggagagaaactaagtaccattgatcatacacatatccacaatatgtacaatggtgattacttaatccatttatcctcacaacattataagcaagattttgaattaattatttgcaccatgtgggctatatggcacgataaaaatagggtcattcatgggcatgtgtcaaagcctagtcatgttattgctacgtttgctagctgacatcttgaacaatataatcgggctagaacaaaaaaccagcagtactatgcaaattgcagcaatcaaaccaggactgcctctacacctgtagccattaagaaagaatcaataaaagctgaaagccctgataattaaccaataacctaataatggaatgttgggaatatttgtaactgttcaaataatatccaaatcacccattaaagttcataaatgcccaatttatgattgtgaacaatgaaaattttatgatggtcattcatgttcaaataggagtaaaaactctatataaatgggaggatgcccatccttaattagacatttaggttgagcatatgagacttgataaatccttaaaagtatttttagagtttccctaatatggcatttggttagaaggaatgaaatggaatggaaaagaaagaaaaacattttttttccattcatttgtttggttgtattttaaagtattgaaatgtcattccaatggaatgaattttccatcattttagtggaatgactaatctattttgaaatagaaggaaataccatttcaatgcaagataagaaaaaatttaacaatttcttttaatcaaatctttttatgcattttaaatttgattccattccattcctattattattccaattctcattagttttattcctatgttatcatttattccaaccaaagaccacctaagtgtcaatgtgaggaagaaaatggctcttaggacaaaggtccatgaccttatttaagcctttgagaattcttcttctcttccttgggttcaaatatagttgtttacccagaaactgactctggtgacgt

SEQ ID NO: 184190 - DNA, 3383 bp, Cannabis indica
agttctactgcaatataatttatacatataaaaaaaaattaagcaaacaaacatatatatatatcctaactttctggtgttaatactcagcttcactaagtggataaattattttcagcctcttgtgtttaattgcataatttggtatccttacctatgtccacaaagtaacttgatctttttcttcaactaattgttaaatccagctggacgcgtaagaagatggcacatcaacaaaaatgctctccgtacagtgtgcgagaatgtgtccgtaccctatgatttgttaagtgtccttcactggtgatcctctgtgagtgatccagggtttttcttattcccttgagtgttctttacattcttattgctactgtttttgctgctctgtgtttgtgtctttgctgaatatggcatctgaaaaaggaaaagaaattatggagactgtggaatgtatctctagagagactctcatgctgtccctcgaaaagtcgggcgatgactcagaagttgctcctgagttcattgacaaaacggtggttggccgaatgatctctaaccgacgtgtgttcaagggtttgttgcgatctactctggcgcaaaaatggaggattgcgactggttggaacatctcggaagtggctacggggacgtacactctgaggtttcagaagaagggagaagcagagtttgtagtggagcgaagcccttggccggtctgtggaggacatctcgttctgaagccaatggaggcggatggtaggtgggggtcggtgaacttggatctggttcctgtttgggttagggtgtatgatgtccctcccagatttttcactcggaaaaatgccacagccatcgcgaataggattggagacgtggtgagcatcgacaggatctggcgaaatggattccctgcagaggagtatattcggtttagggttactttaaatgtgaggaagcctcttctggtgggtcttcatcttcccatggaagagggggtgtgtttatggtgctatttcaaatatgagaatcttcccctggtttgctacaagtgtggagtagttggtcatgaggagatgtactgcagacggaataggagactgatttcggatgactttaatcatacagtccctatgtatggcccatggatgaggtttggagctcgggtgaaacactgttttgaaaggattcaggcggaggaggcagcgagagaatttgaggaggacaatcgagaggctgttgcggccctgagggatgaggacactgctcaaaacccgatgctgacgaaggctttcgagccggggttactgaatatagagattcatcgggaatcacttgagcagagttctgcttcagtggagataggtgttgacggcagggtatcggtggaaacggtggtgccgtcgtcgggtacgatggtggaagagcaaggggcctcatgggaaggtgaggccatgcaacatggtaggacgttgggggaggtacgaatagtacaatcagtagtggaggcatttttcctgacattgcggggcccacagaatcccaggttggacacctggcgatggttttcaaaagtatgttggcgcctaattgctctgatgtgaagaaagggccaaggagaagtaatagggctttggggaaaaatggtctattgggccttaatctctctaatgggcctagcttggaaggaaaggggcctgggccctcagttgggaagaaaaggagattggaccagtgtgagggggacgtgtgcaatcggggagttgaaaagcatgatgggccggatgttatggggtcatcaaagaaaattttcactaatatggttacggaatcgggtgttttgcctgagacttctgaagttagtgcgcccacggggtctcttcccctcaatactgaaccgaagaatatcgttgaggttgtaagggagaattcgcacttggaagcaaaggaaaatgttgcggaggaggattttttcaaggccgaggaggtgggccaaaacatgccccccaatcccttatgttagccctctcttggaactgctggggtcttggcaaacctcaggcagtcaactcgctgcgatctctaattcgcagtgtaaacccggatattgtgtttttgatggaaacgaagagggatagtactgacatggaagggatttggcgtaggttgggctttgcccatggtgtggcgcactcctctaatggtgcgtctggtggtgtggctcttttctggagagcgggatggaatattcaagtgttaaatgtgagcagtgataagattctggttagatttcaagaggataggaacttcaaggcttgggtgggcggctttgtgtatgcccccctagaagaggtgatcgtgactttttttgggatactttgacctatacgatgaaaggctacaatgaggcttggatgattatgggtgatttgaatgcggttttgaatcaacaggagaaggtggggggaagaccggtgtgtgaaagtgagggccgcggccttcgtaactttctgttcgaatgtggtggagttgatatggagggaatgggggccctttatacttggtctaatggccaagattggaatagcctcattcaggagaagttggaccgtgttgtttgttctacggagtggctctcgattttctctaaggccggaactaagaatcttccaattagacactccgaccattcagccattattctcaacacttttatggatacaaccccctacaaggccccttttcgctattttgatgcttggaatagggatgaagggtgctggaaaataattcaagaggcttggcaacatgatttctttgggtatcatagctttattctttgcgcgaaactcagacatacggcgggtgctcttgcaaagtggaacaaagattgctttgggttctgcaagaagaagctgagtttcctggaaaaccttctctctgaggttcagtctcgtcccccttcctcggacaacttgcaacttgaaagtgctctgcttttggagatcgatgagatcgaagctagacaggaagctatttggagacaacaatctcgcgagatgtggctaaaggaaggagaccgtaattctcgtttcttccatgcttctatggtggtgagaagaaagaagaacttcatttgggctgtgtcggaagatggggtgaattggttggaggatcgggctttgcttgctgagtacttccggacgaaatttgtggattctttcaagtcttcgtcggttgagattgattatgacttatcttccttgatttcttcgagcataacgacggcggaaaatgaagctctgttgaaaatccctcattgcggaggaaatcaaacgggttgtctgggagatgcctcagctgaaatcccctgggcctgatgggtt

SEQ ID NO: 184191 - DNA, 4978 bp, Cannabis indica
ttttttttttttatgttttgataagaaaaaaggctaatatcattacaaagacgagaatatgtctttaaaacacaaatataaatgcaaacaaatgaaacatgttgatgcaaaccaacctcttcaaccacacgtcgacgctttcccccagttcgatttgatctgctagtaccaaattgtgtacaggctatgccagagaaggaatttgcaactaatctacaacagcacaatgcagcatcctttcttattgcaccatcctcatcatctaaatatacaacaactgattctcttgcaaactcgagaaggtcatgaccctgaaccaaatattagtttctgaataagatttaaaatgaaaatgtcaatataggataacataagttaaatattacacatagagaaaccttaaaattgaaacaagccaaagtctgcagagcaagttgcacaaggcctgaactgctagggtcaaaaacttgctggggaatattcatcaaatttcctcgacctgtgcctacaactgacctcccttgagaataatgagactttgaaagaaccatagaaatgcaatcaagtaaccgatcctgaatggtaggcaacagcgatggaatactggcataacaaataatgttagagaaaggttgccaagaacataacggtcaaatgagataaaagaaagtctagacaacaatggttacctaatagctatttgatcaagggcctcaacaagggttgaagagagaccagcagagaacataatatccaaaagtccgcgaacatgaggttccattgcagggcccattgcttttgcaatgtttccaacacaagctaaagcctcaagtaaaggtttaccccttcgtggtgcaatctacatcaataaaaggaagcattaagaataaatttgttgattccaaaattgatagtcatttgaatagaatccacaaggtagctagaaagtgcaactaaattagtgatggagaacaatgcttgacaagacaatgtggcatactgcttcgcgtagtggagccataatcaaaggcaaatagttcacaagttccccatccaaagcttcagccatctctccaagggcaataaacccactagcacgttcagcaggtattcgaagaactgccagaatatgattcatgcaaatctgcaagaagtagaaaaaaataaacataccatggactttcactcccaaaattacatgacaatgtcagattatttggaaaaacaaaaaacaccacagaagtaccgttaagtagtttgtaacaaatctatcccgtagaaaatgagcaattcgaggtaacaatgaagttatgctccgtcgaacaagacgatctcgatgttctaggtatctaagaacaatttccgcaacttctctgtaccttgacatcatgaactcccctgtattcctgtcaatatatataatataaaaagtgcaaattttatgaactacatccaaacacatgataaaattgattaattataggaacaaaacaaatttctgaactcaattactctattaaccaaacaatccaaaacatagtttaaccacaaatactctttgaaaaattatattattgctcccattcaatgatgccaaaaataatccaagattgctgaatattgctcccttattactgaagtgattaatgtttattcttgtaataaagaaaaaaaatcaggatcattatatatgagtagctcctgttctattcactaaaaagttaataagaagagaaacctaatgagcacaagcatcatttgaaaagccatctcaaattgttttaggaaaatacatgaaccaacataaaagtaccacaacaatgtagatactcgaatcccacaccattggtacacttaagtttttctgtttttttttttttcttttggaaacaaaacctcaacttgtatatacctcactttagtattaacttcatgctacttgaaaatcttattgatcgtttcaatgcctaatgctgttatccacccaaactttaatatagatcaagtgaaaataataataaaaccattttcagaagtgtttataatccactacccgcattgcctttttttaattgcaaaactaacatactcagacaggacaattgttctaacactaaacaagaatactatttccaaacattgtttggtaaacaccagacattcaatgtaatctaccaaccttaaaagctctccaactgcaagcaaagaaccatgtatgctgtgaacaggagcatttctacccaatccatcctgtgtagcctcaaacatacgataatacctgtgaataaaatttggtgtcaacaaacaggtataaccaatttgggcccataaacaataaaattacttaaaacaaaaccccaaaataaacaataagaacataagctttatattaacattcatttgtgtgggccaaatcagccccatatgcattcatgcagtagaagatatgagtatggacaaaccattgtacacgccatcgtgtctcacgcttctcaatgacacgaagacaagcacgcagtgcctcaacagctcgctcccgaacatccaatcttggatctcttaaggcaacccatatcacgtcgacaaattcaggaacatgaacattgaagacagttgacgcattttctgccatttcctgaataaaagataacgttgatgagaattacctaaatgatacaattaacaatttcatctttcttcttattacaaaggggtggaggcagggcaatacccttgaccttctctttaagaggagaggttcagaccaaattaaactaagcctataccacataaaattaatatgcaataaaacaaataagttgtacactatagtattctaacacgtaaattgagaaatagttcataaaaaaaacacgtaaattgagaaagtgatttcttttttcgaaaaagaaactccgttgtgttttcatataaaaaagattaaaaagaaaggagatcaaaagatctcagaatagccaaaaccagatatgtacaaataaaacagcataaatttaatagttaaaacattaagtgccaaaagctaccccaatctctgttgagatcaagaaaagataaacctgcaaagcctttaactttataaacccattttgcaacccgctacttaaccttaattgagaaaatgtatttcattttaaacaaaaaaagaacttacaaaattaaatcacctttaatgcaggctaaaggtctcataaataaaatttcagtagcttttctccataagaaataagaattgtattagatgggccaagaaatacaaaaggttaacaaaagacgattagatatcatctttgagaaagagaagaagaagaagaagaagtaggaaatggaattatgatatgggatcatcttagattacaacaaaaattactctttattgaaacaaaaatccatgtaatcaacattaaacaataaaaagtaaaaaaaaaacaaataaaaagtaaaaaaaaaaaagtaaaggcttacttttaatattaagacagcagcaaaacgacgatactctaccctatctccacgtagccactcaagtgcggtttttacctaaaaacacaaggctcgtcagatgctcacttctttaaaagcacacagctagatcaaaggagaactgtgaaatgaaaaaacaaacctgatattccacctcatctgcagtcattgctccaccagcccttgctagatgacccaaaacccggctggctagttccagattatcaggatcacgctttacttcaaacacagttcgcatgtaattagaaaatttagagaccttggaagcattctctccaagagcaacatctatcagttcatctatagctcttaaagctcccaaattttctgccacgtcattactttccaaaagaacagaaatcctatcatacaactgatccatgaaacgtgaaaaggcttctccactaagatcacgagcttcttcctccaaatgtttcttaaaagctaaagaagctccatcctgaaaacagagttttaatttaagaaaatgacacaaatattaaaagttacaaaataatgaacaagcaaatagcacactaagcagatattaggaccacaccaatgaatgtatatccaaagatgtcaaatcattcatatgccagattacttgtggaagcagataccaagaaggctcatttggtatagtttttgttttaatttttaagttttgtaatcactgttggcatatttagtttaattgaatttttaaaatcataaaaagtaattttataaaatttcattaaaattcaaaataacaatattcatttaataagaactttttaaaaagcgtgcaaagacttactgccttgaaaaagatgaagattaggaaaagaaaacacatttaaaattcatccaaaaaccagcttttcaatttcataaagataaaatgtgtcaaaaactacacatccacatggtagaacataaagataaaatatgtcaaaaaccagcttttcaatttcataaagataaaatgtgtcaaaaactacacatccacatggtagaacatacgaaaatggctgcagcaattataagccaaacctattcacaaacagttacataacaacaaatacatgaccaggatgctgttctcaaatccaacaactgaattcaaattcaaaataagaaataatatttgattaaaatttttttttaatggcaaaatatcttataacaattctagaaataatattttaatttaaatcttacagataatttacaattgatttactgcacataatttatgtagaagtgagaaagcatagttctcaataataacactcttcttccccattagggtgatctcaaatccttatctgcgtgtataagctcatttttcacatgcctttcaatactcaaaacttcattagtttctgcactacattggcacgcctaaataaatactgacagtacctttttctcataattaagccgaacaggtgaaaactgaagaaaaact

SEQ ID NO: 184192 - DNA, 1231 bp, Cannabis indica
cggtcccgaaaactgaaaccctatgttggttgtcaacttgggcgttaggtgaaaccgtaggtgctcgagttgacttttgatgtattgtttcgtgtaatttcagctcccgggccttggacgtggatgtttcatgtcttcatggtatagaatactgaaagatagtgagtgagaaacaacttggcgggacccaaacatccattccggagttcccaaagtcaacttgggcgtgggtgctagggacctctcccaagtcgactgctatgactcgagacttctcaactctaggatgttttttttcttgccacgtgccaaatattgatgtccacgttactggggtcaatttctgggttaatagaaagtttatttgaattgtaaatatctttcatattcaagggagtgtaagcggtgctatgggaatataaatagtgtgcacaatcattagtaacaaagactaaaaaatcacttgggaagagacacttttgtagaacataactctggagaacttttcttaagtattgagaataataaaactacgaagtggattaacctattaccgtggaaagagggtgaaccactataaatatggtgttcataatttttttcttattattcatatattgtttattcgaaatttgataattctgtgttcaatatgcgttttacaatctttttagattcgttaaaaaaaaaccgcatcaagaagcttgtttgatctctattatctcatcaaaccaacaaaacatctccattcaatgcttctttcaattttgattttttttttcttcattcattagacattattgtattatgtttcttcaagggttaaagaattaaagtgtacaaaatataataaatgtttggtgaaagagaatttggaacaatgatagtttggtccttgctgtaaaaattaatgtgtaagtacatatagtaacaatagtaataaagtgtgacaagtaaatcgtctccactaaggttacaaattataataaatataaatatttaactaatacaatttttagaattaaagaaagtaattgattggtttttgtaaacttaaaactgaaataaaagaaattaaaatatgcttaataataaccataattagtaaagagatgacatgaagaaaaagttatcaatcgaaaatggacttcccatattttaaaaacgtaacaataccattacttttagcaaaacgtaacaaatatattcttgtaacttactgtataaaatc

SEQ ID NO: 184193 - DNA, 3568 bp, Cannabis indica
aaacccaacaacgggagctgagagtagcattacttgtaattgcagcaaggagatagacaattgtcatgtcgtaatcatgtatcactccttcattgtcaaatgagttgtcttgaattgatacatatatctctgtactccagagattgttatcaatgacaatcatgttactaagattactgtatagacatgaattacaagaatgttcctttagatacctcataatttcttgcctagtgagctctagaacatgtgtagtagtaaatggttttatttctcagctagcttccagtttttcatttgaagtatgagtttggaggtttacacgtagtaaattgtctttgaaggtagtttggattttgatttgtataacaaaaggggtttttttagtgatagcaatggttgggaagatagaatgaaattagttaaccattcggtgattagaagaaaactgaagaaatcataattgtaaataaaaaacatctacaattaattgcagaggaacttctttcctgacaccattaatattatattcttgacagagtactcaagggtcttaatcttcctggtgtgcttccacctcaactggttaaacttcctttccttgagcaaatgtaagagcatttggaatattttagtttaatatttgatctattttcttttcctcctttcttttgtctcatttttctgtttcctcttctaacagtgatttcgcatataactacttgagtggtacaataccacaggaatgggcttcattacaattaacaaacatgtaatctcctttatcattttctgtggtcaagttttgatttaattgtatatcgaatgcattaactgcaatgaaccattcagctctcttctcgtaaaccgcttatcggggaagatccctaaggagttgggaaatattactagactcacatatctgtaagttttgaacttccgactgttatttttatttggacagcatagttaagttatggacattgaggtacttgtgattaaggtttgtgctttgaaagttccactttttccatctactgagaaccactttttcattttcctattgttgaaattttttcccaatggtataattgtatgtctgccatatatatatatatttatatattttaattttcttctttaaatgacagtaatctggaagcaaaccaattctttggaagtgttcctcctgaacttgggaaactgatcaaccttcaaactttgtatggtgtttcttcccttgtactttattttcaatttttgtttttagctatcagtgtattatgaagattgccatagatatatctcacactttcttattacaattgcaggctgctttcgtcaaataatttgactgggaccctaccattgacatttgttgagctagaaaatttaacagatttgttagtagttatatacgcatatgattttctttaaagcatatggtcaatatacttgtcttacttgtgcaatctgttattgaatacagtaggatcaacgattaataaattaaatggacccattccggaccttatacagaactggaaacaactccgaagactgtaagatttaattgttttctctacatttactcaagtgctttaatctatttaaacggatatattcatgcttgttttctaatagttatttgcacatttatttgaattattgaagagaattgcatgcaagtggatttgagggacccatcccatccgagatatcccttttggttaaattaactgagctgtgagtaaaatctaatttcattcataagttttttgcatttgtttattaatttttgaaattggccgttctccttcaggcttttactttgataatagcatagtttgtcttttatatgtaggaggattagcgacattagtgggccggagcagaagtttccaacgttgaatggcacaacaggcttagttagactgtatgttcagtatatcaattagtctatgtcatgatcagtgtttcagtatgcacatttaatgatgatttaggtaatgccatttagttatgcacttcaggattctgagaaactgcaagatatctgggaatattccttcatacatatggacatggaagagtctagatctgctgtaagtattggatcttcgtgtccacgaagctttttttttacttgattaccttggataaaaggatttaaaaggtcttgtaaatggaatgattcagatgatgtcaagaagaaactgtttgttgaaatagtacaggctgatgtagtccttggcaatgatttttaattgtattatagtattaaagcagctttattgaaaaatgatgggataaacacaaatgtaaaactgtagaagtttgcaccaggtattaaactgttattttttaatgtgaaagttcagacgtttatttaagcaaattgttagggaagatgtaacaaaaatttatataagctgttcaagtgatgactatgtgatttccatttggtattaacttaaagtaatagcaaatatataagtagtaagaaacaaacatttataaactctgtgtacatcttttaaccaattggattttaagagcaccttgtatataatggtcactacattatgatcttgttattttcttcagctcttctctttggttgagtatagaaaatactagtagatgtagtttctgtaattatgtaagtttcattttctaaaggaatcactacctcaaacatgctaaagtggttgatctatgataaccaatttaaattagaaatctaaatgcccatatcctaactccggtattttatttattttttgtgctcagggaggaattttaatatttaagaatggagagtttcttttcatgtttgtgaatctgtgtcattggcagggatttgagttttaacaatttagaagggaaaatttcagagacaacaaagatgaagcatataagattcatgtaagcctattgtaatgagcccagtctttatttggttatgcatttgaaacagtgcacttttatttgaattttgagagagatatgctggatttataaaattattgctgggaaaggaccattaattttcatgtgtactttagaaatttttaaactagaaagtacttgtacatatagtttacagtcttttgtgtgtgtcttttttttttcaataaatattattcatctaaatctgatttcttacattgactaattcatattgtcttccattagctttttaactggaaatcgactatatggaaatgtaccagaagatttcttgaaggatggaactagtgtgtatgtttcttatctataatgctgttatttttatttctttagaattatatgtaccaaactttttccctaccatgatgttggaattcctggtgctattacatgaaaaagcactgttattgaccatcctataacttatgcactgtaggtgtttgtttcacgtacatctactactttttcctttatcgcaaatgacctgccttcatctattttttccttcttttcatgtaaactaatttttctttttccttttctccttcatcaccttcttcagtcgtgcttcaaatatattactatattcaatcta

SEQ ID NO: 184194 - DNA, 3516 bp, Cannabis indica
gtagcaaccacatcactccccaccgtctcccaatggtctttgaaaaatttaccaggcattccatcaggccccggggccttcagaggaggcatagcccacaccacagcctttatctcttctacagaaggggttcgcacaagaatctgattggcttcatccgagatcgaatttgagacaaggtcatgaagttgaggatcgggggggagcgtcgaggacaacattgccataaactttgtcctaaagtagtccccaaccgggagtcttccttctatccactcatcctcgtcgacccggaccgcatttatgaaattcctctttcgcttaatcaccgtcgccgcatgaaagaatttggaattccggtctccatggcggaaccagagctctctagacttttgcttccaaatttccgcttggcgggcctccacttcatcaatctcaagcaaaatatccgcctctagcttcagattgctctcagaaggtacccgactttggacatctaccaaaagattattcagggccctcagtttctctttacacaaaccaaaatgggtcttattccacttcgccaagcatctccgggtgttattcaaccgagtaacaagttgaaaacttctagcccctctaacatcaattgcccaagcttgtttgatgacttctttgcatccctcatcccggttccaagcatccaagtatctaaagggcgtgtggaaacgctctctatccataagaagatcgagtaccaaaggggcatggtcagaatcttttatagcaagggttcgagcccccgccttcggatacatcataatccactccggatcaccaatagctctatcaaggcgctccttgattaagtcttgaaagcaccttccatttgaccaagtgtagagattccccacacaacccaaatccacccctcctgtagcatctagaaggtcattcagatctttgctatcattatcatccacttctcgacccccatacttctcatgctgattcaaaatagaattaaggtcacccatcaataaccaaggatgattaagagccaataaatccaaggttctcgcttcccaaaaggcctttctttcgttcctatacggcgggccatagacaaaaaggcagtaccaatcggggccacccagaacattagaaaaacacgctttagtggcccctatatcaaccgaagaagcttgtatatccacccccgctttccaacaaagacaagttccacccgcagtgcctaccgccgccaccaccaaggctccaccaaagcctaaacctctccaaaccccattcatctgcaagtcacttagcttagtttccatcaagaacaacacatccggatcctctctagtcaccaaagctcgaagagctcgcttcgccgacggactccctagtcctcggcaattccacgaaaggaacttcatgagtctttggggggcatgtttcggcccgcctcctcggccatagaaaaatcctgagttaacctcctttccctagcagtcgggttatgcaaaagtaatggagttctagcatccgacaaagccgatgactccactttctccaaaccatcaagacgagcaggggccgattctatcatagcaacaaggccccctcctctagccaacgccgcctcatgaccaccaactttcaacaccccacgggttatctcctcggaatccttatcggcctcaaaggaagactcttcagaacgtagagtttgagtgatcagtctcgccttcttgctttggtcaatctcttcgtctctactattggattcaatactctggttcacaccacttacttccccaaaagcctctttaacccctgttttatccacaccaatgaaacaacattgaccttggctttcatcaacaaaatcattcttcgggtcactactccccgagatcttcttcctcttgttgcctctgaccaaacccgattcatccagagtccgaccaaagattggaggtcttggaatgcctctaggccccacaacacagggcttcttgagttttttaatgttcaccggtttagtggtagccgaatccacctcttccctagaagccccaaacttgatcgtcccaagcttttctttaaagatattggccacatgaaccacatgttgagtcggaaaatgagaacaatccacataatcgttataagctacttcaaaggaattatcagacctctgtgaaactactccttccatgccctccttttccactctcgttgaccccccaatagcatcaacaattggagatgactccaaccccctgttaatcccgtcactaccaacctcctccgactgtaacactttcggtgaagcctctttgactaaagcactactctctggtctttcaagacgacgccgatcctgtagttcatcaacttctagtaatgcaaagccattttcaagcctagccccatccctaagccacggtccatacagaggaatagaccgtccgtcatggaccgccaccattctcttacgtccagaacaaccatcttcttcgtgaccaatgataccacacttaaaacagaacagaggtagacgttcatatttaaaatagctccatacctttttatttccgaggtccggcagcgagacaccagctagcaagggagcaagaaggttgatcctgacctgaaaccgcaaatagtccttgacaatggttccattgtgcctgaccttgttagcccgaacaagggtccccattctattagccatttgcttcaaacactcatccgtcaggtaaggcatcggcacccccaaagccttcacccaaatctccaaaccagagaagtcagcagattcccatctcccatcctccggtaaagccaccgccatcataaagcctccacacgggttccacggtccgttctcaaggacgtatttcacctcccgtggattattcagacggaagatgaaagtttttggggcagggctctgaagacgccagcccctgctcagtttccacataccagagagagccttcctcaaggttccattagagaccagtttctttgagaagaaacgccccaccaccgtagactccactgtcgcccgagccccttcattatcagcttcaacttggattgaaaaatcattcaggcttacattttccgtctcttcgatcaactcctccaccacagaaccagaaggaatattcatattcataatattgcagaaaatttttccagggaaacaaaaggatttcagagtaaaatttccttgtgccagagccctaaaaggagtaaaatgtttgcaaaagaagtgtatttccaataaggaagggatatagtaccctgggacaccttgtacggtgaccaacggtagcaaaaagctaccctgagccatcatcggaggtacgagtcgacgcccactaccacgcacggaccaacattcgcacagtacggaaacaattcaaaaaaaatcgtacagagagaaaaattttaatggagaagtttacagtggactgattcaacttaggttttcattattactttttaactaca

SEQ ID NO: 184195 - DNA, 3784 bp, Cannabis indica
gttgtgctatttgagttaattgatattcaagagctcaagatggagctctaatggtgatttcttggtttaagttgtttgttgtgcttttgatgcttgaatgagtttgttgggacatgaataggtattctggaaagttttggaaagtttggcattgaattgaagtgtggggatcggttttggaaagtttgttggcattaatagctccctgaacaccaataagttggaaatgctagctctttgaaccaatgatgctatctgtttacacagccatggaaatgctggacagaacaatggttattgaagagtttgttacataagtagttaagttagttgttgctgttagttaaagttgttaaaagagttagttactctgtctttctttcctgtagctaagtcggttgttttgatcagcatgtatataaatacttatatctagctttgtattcaatcaagaagtgaaataataatttagattcattttcttctctctttatattttcttctgcaactttctcaagttggtatcagtagactgttggttcgtccatggcgacctcctctggcgaaggtgcctcgtccaacaactatggcgtttccacaaccatgtttctccctcctctttgccttgacaataacaactatttcttctggcgttcccaagttctcccagcaattcgtgctcatgatcttaagggcattcttctcaatcgcaaccatcctcaaccacggattcgtcaacctcttgaatccaccaccatggttaataatcctgaattcattcgttggcatcgacttgatcaatttcttttatcatggctcttatcttctatttctgaatccatgttgggtcatgttgtcaattgtgagtctgctcatgacatatggagaactcttgagcttctttttggcacagcctctcgagctcgtatgattcatttgatgaatcaactacagaacaccaagaaaggctctctagtcattcatgagtatctcttaaaaatgaagaaccttgcagatggtcttcgagcagctggaaatcaaatcactgaggagcaattgattctatatgttcttgcgggtcttggcactaattatgaagatgttgttgttaatcttacatccagagaccacctcacttttcaagaagttcagttcttgcttcaaaatcatgaaatgcgaattgaagccaacaatgcaacactcatggcagatttctatggagcctcaaccaatttcgcccaatctaagaaatcggctactcttaatattactggtaatcgtggtgcttcgaatggatacagaggcaggggaaggaatacaaatggtggctgtggtcacactggtggcagaggatcctacactcagaaccgtgtcatatgtcaattatgtgggaggcctggacagacagtccaaaagtgctacaggagatttgagatcagtttcaatggaccagatgactcccaaatcagtgcctcatcttccaattccaaccaacccccttagcccctatctttgctcaacttggcatagtctttagacatccatgtccccacactcaccaaaaacaaggaagagccgagagaaaagatagagatgtcactgaaataaggattacacttcttgctcaagccaaaatgccccttcatcattggtgggatgcctttgtctctaccacttttctcataaatcgaatgcatgttcaaagaataaatatatctctccatttgaaagtttgctaaatcaaaaaccagattacacttttttaaaagtttttggctgtgcttgttttccatttctcagaccatataacaaacataagttcaattttaagacttctatgtgtatttctcttagctacaacacctctcacaaaggctatagatgtcttcatcctttaggaagaatatacatagctaggagtgtaacatttgatgaaaatatttttccttacaactctctgtttcctagtgcagcaccagcccccaaacaaaactctcagcatgttgctattccctttccaccatttcctgccactatcacaactacagctccctgttcccctccttcttcctcatcatctcaccacatcaggtccacagacccctctccatttccaccacagacacaaattccttcccccataccacaaccccccatcctcgactgacaataatcaaacacaaccactgcctctttccaacagaaaccaacctttaccccctgctcttacctctctccatccaatgaaaacaaggtccaaatcaggaatttataaactaaaagctctagctgctaatattactagtactaactaatttttatttgagccaaaatctataaagaagactcttgcagatccacaatggaacaatgctatgacaactgaatacaaagaattaatcaagaaaaagacttggattcttgttccctacaatgatgatatgaatgtccttgacaacaagtgggttttgagaaagaaatacaaagcagatggcactttggagagattaaaagctcgtttttggcaaaggggttccaacaaacacatggagtagactatttcgacagatttagtcctgtggtaaaaccctctacactaagaataatgtttactcatgctgtcacttacaattgggacattcaacaagttggtattaataatgcttttcttaatggagagcttcatgagacaatctatatgcagcaaccaaagggctttgtggatcctcaataccctacatatgtttgcaaactacaaaaagccttgtatggcctaaagcaggcccctagagcctgatatgaaaagctaaaatcttcattggtgtcttggggattcaaaaattcagtatctgacaactctctcttttcctcaaataagaatggaaaattcttactgatcttaatatatgttgatgatatgttaatcacaggtgaagatactgctgctgtctcacatctcatctcctctctcaactctcaatttgcattaaaaatcatgggatcagtaagatttttcttaggttttcaagcaatccaagatcagtcaccactctaccttaatcaagctcaatatgctaaagacattctaagaaaaaaaaacatggaagatgccaagacttgcaccacccccatgacacctggtcataagctatccaccatgggcagtgatccttttcttgatcccatactgtatagaagcacaatcgggtcactccaatacctcacattaaccagaccagatctcagctatgaaatcaacaaactcagccaacatacgcaaactccaacgaatgctcattggcttgcttgaagatgggtcctgcgatatataaaagacaccataaaccttggcctagtcttcaaaccaacaaaaatccttgctctggaaggatattctgatgccgattgggcatgtaatttggatgatcgaaaatccactactggttactgtgttatgcttggttcgaatcttatcacgtaggggtcaaagaaacaaacggctgttgcccgttcaagcacagaatctgagtaccgatccttgtcatctatagccactgaggttgtatggatctcctctgttcttaaggaacttggcattacacagccatcgaaatgttggacagaacaatggtgagctcggggtcaatcacccctgactgtttctgcttcagcagcggccagttggtgagcgtttaaatctcgtatgacgcacttttcttcttttgtgtagcctcctctgcggcaacagccatgcaccgaaaatgtctcgctgatctcttgccat

SEQ ID NO: 184196 - DNA, 3209 bp, Cannabis indica
tattgttaacagtgagcctctcacattgaaaagaataaactcttgttttcttgttgaaaaatgttcttgcattttgtaaattgtaacccttcacaagcagtgtatgcaatgtattgataaggataagaaatactcaaaatatgaggaattctgacctcatgatctcaagagaggtgactatccaatcaaagcagcactgtacattttttttctcatgaaaactatgttgatagcaggctctacaagagcactcacctctcttaaaagcatggattcggttcccatctctaaaaataacatccctatcaataaatcgagttagcagcattatgaagtcatgacattcactgcagatacgaatatccttgcttatgtgtattgtagccttagatggagtattgagaagaccaaacacaacagctaatttctcactatgataagatgaaccttctgtgtcttgtaatgtgtaaccttgtttcttcaattcctttgtaagtgataatattttgtcatgaatgtctgtcatctgtggatgtgatctatctcctgcgtcgaagatatgaaccttgtttccattctcaatacagcattgcccgggattcttcctcacccctctatcttccatcagctggcgtgtcttcttgcctaagttggatcgacccagttcatcgtacaagtttgcaaggactgtgtagaaaactgggtcagacggatcaagttcaagacctcgtcttgccatatcttcagctagagtcaagttgccatggagtttgcaagaacccaataatgttttgtatattaaaggatctggcttaaatggcatgttgtcaatgacttccaaagcatcctctagctgcccagctcggccaagtagatccactaaacaagcatagtgaccgagctctggggttataccatgcttatttctcattgaatgaaaataatcaaggcctaaatcaaccaacccacctcggctgcaagcaaaaagtacagacaggaatgtgatggaatcaggtttcagtcctgctaacctcatgtcttccaaggcagaaagagcagagttgatgtatccatttgatgccaatccagaaattaatccattccatgatataacatctggatctgaaatttctctaaaagctctgtaaccatcttctgcataaccacatttccagtacaagtcaaccaaactgttggaaactgaagtccagctgctgaaacccgattttattgaataacaatggagttgcttcccaattttgattgctgctaaggccgctgcgcagcaaaaaactcgataagctaaatccgtccatctcaatttcgtcgtccttcatgtgcttgatgacattcaataccatttggtgatttcccaacttgttcattcgggccactgatttgtgtatgtgataatgtctctgtgcttcagtctttttgttactttccatgaatcatttaccatacctacagaagcataagtatctacaagagcatttccaaccattacatcagaaaatgctttagctttaagtatgtatccatgaagctttaacattcgactaattgatttatcggtactacaggcacgaaggaggacaacaagagtataagaattcggttctactcccatagcttgcatctgcaggaaaaactgaaaagaatctcgttcaaaaccatgatcagcaaaaccagcaatcaaagacgtccaagagataacgtttggtgaggttattcccctaaagactctaaaaccatcttcgacgaagttggaacatttcatatacatttcaactagtgcatttccaacagaaacatcagcctccaagccagtcctgaaagccagcgagtgtatttgctttcccaattcgaataacaaaacagttgcacaagcctttagtatgttagtatacgtgaaactatttggcttaattcccaagatctccatctcctgcattgcagaaacaacttccttgattttgaaatcattagtgtaaccggaaataacagaggtccatagcacgacatcatattcaggggtgagatgtaagaccttaatggcatctttcatcctcttggaactcgaatacatattcacaagagctgttttcagcatcaaactcaaggttattccccgagttattaaatgggcatgtagcagtttcccataatgtgactctagataacaggaagcctctaaaagtttcacaaaagtgaactcgtttggaggaacttgggcattgatcatatcaatataatgtttcaaagccagactccatttttgagcttggagcaatgaagaaatcattgttgtccaagttatagtattacccttatccatatttctaaacacattatgagcttcctcggtataaccacacttggcataaaaatcaatcaaggagctgagcaaaactgtgttcttctctaacccaagttttacaatatagttgtgaatgtgagtccccaaatagaattcaccaagggcagaacatgaacgtaaaacactagagaaagtaaactcatttggggtttccccagaagctatcatggaatcaaacaactcaagggtcatacaatgtttgtcagctcttgaataagcagaaagtaaaccagtccaagttacaacatctctataaggcatttcatcaaacaagtagtgtgcttgttgtggtccaaagcatttagcataaagagacaagagattgttgcttaaaagcatgttaccttgaagacccagtttgataagtggggtgtggacacacaaaccttgttccaaggactgtgagttgcatgatgaaacaatcctcaaacatgtttcttcaaaacactcagtttcggttttgttgaacaacgtgttgttcactttcagtttcaacaaggtcctcaataattggtggtctttcaccttacacattttatttgtcgactcaagtctacaaaaaataaaaaacaaagctttatgtatgtaatacaagtttaatgttagattgagatatgccttttgtatgggatgctcttaacattatataacttctctctttttttaaaaaaaaatatttaggttgataagccacgtatcattaattatatgttagattggctatattttttaaggaatatagtattttgtttgaatatattacgtataaataataaaattataaataaatttaatattagagtggtagatgtgaaatgttagttagtta

SEQ ID NO: 184197 - DNA, 6001 bp, Cannabis indica
tattttaataatttttagaggtatttactattaaaacattttagagtaaaaagtgcaaaaataagaaataaaataaaataagatattatattgtcaagtaaagtgaaaattttcacatccttaaacaatgccacaattggagatgcacttaggcaccttaaggtgtacaacatcatatagatatagtgtgtttacatgaaactagtcctgataacgtagatattaatatttaacacgtgacaagaagaaaaacatttacagagttgaatagtcccgagttagcaatcgacttgagatgagtccctagttttgcgcctaagttcattccaggaactcctgaataagtgttttgatctcgccaaattattttcaatttacaatccttcattattcttaaccaaaaagacaagaataatctaagtctgaggcctgaacagtgaaaagaaacgaaacaacatttactttttagaaatttgaactcttttccttaggcaattcttttgtaactctcatgagaaatcaaaactcaaagtagacggaactcaattagtgtcgtgatatggagagttaactactatagatgtaatgtatctctttttaatatttacttaactcattcatcttgcgaatctattaaacttgtattgctcattttttaatgtcaacatagtgtggtataagtagttagtattattttttcataaattaagaaaatttcattatttaatatatattaaataataataatattattttaataatttttagaagtgtttactattgaaatattttagggtaaaaggtataaaaataatgtaaaagagaaataaaatattatatttttaggtaaagtaaagtttttcacacccttaaataatgccataattggagatgcgcttatgcaccttaaggtgcccaacactatggaaatatagcttgtttacatgaaactagtccttataagttataacatggacattaatatttagcacgtgagaagaagaaaaatatttacagagagtaatcccgagttagcggttgacttgagatgggtctctagctctgcacccaaatttactcgaagaactccaaaatgagtaattagatcccgctaatttgtttttaatttaccatcctttaatattttgaactaaaaagacaataataatctaagtttaaggaagagacgaaacaacatctactttctaaaaatttgaactcttttcttagtcaattcttttgtaactctcgtgaaaaatcaaaactcaaaataaacgtagctcaattactgtcgtaatatgagaaatactgtaaatatagtgtatctctcttaaatatttacttaacttatttatcttgctaatctattgaactcttattgctcatttttcaatgtcaatatagtgcattataaatggttattgaattcagatattatttataaaattataatatttaggatctgatattaaattataacaataacaataggatgaaatgataatgagtactttagcatttgtctgatttaataaaactattattggaggtggtgaaagtaagagtgaaagtgaaagtggttagtgccgctaatgcagccacgcaactcatattctattcatatattcaattcaaagttccaacctttttgggatcatcatagggtttgcgtgcaaacacataatcacccttttctttctcttccttgatttggtttatggtggggcattgtattattccaggaacaaccgcctcaacaaatggtaggtttcattttggggtttaagaatgaatagcaaccattttggggtttaagagaaagagagaaagagaaatatgaaaggggttgaaagaaaaagccgcgttgagcaattctcacctcagtattatgggatttgtgctcttggtggaatgatcagtgctggttctacccatttcgctagcacacctcttgactgcttgaaagttcatatgcatgtaagtatcgatgttaaagtttcatacttttaaactattgtttttgttttattgaaaatgttgtcagcatccaaaaaaaaatgtcaatttgtgggggggttttgttttgtcagtttcttgtacacttagctatacatattacatgttccactcattcaaatctctgagatttatagttgtttttatatggtttattaggtgaatccagtcaagtataatgggtttggttcagggctatctactctctatagagaacaaggccctttttccctttggaggggttggtctggaaagttatgtggatatggtcttcagggtggtgccaaatatggtttctatgagtactttaagaatacttactcagatgtattgggagatagtaaaaagagtttcatatactttatcagcagtatatcagctcaagtaattgcagatatggctctttgtccatttgaagctgtcaaagtcagagttcaaacacagcctagttttgcaaagggcatgttagatgggtttccaaaattttatgcaactgaaggctttacagggtaacttacctagaaacttgattaactacttcatccaatgtttttggttcctttttctgatgtctataccttactatcttattcttggttccagcttttacaggggacttcttccactttggggtcgaaatattccatgtaatatgtcaatcatgaaattgttattagctttttttattgaaaaagacccatcttttaaattactattgtttttttgaaaggcaagatttttactctcatatgtaccaaatcatgcccctaaacttttctatccattaaaaatttatctgaactattgagattgttgaaatttgagacttttgtcaaatattattcaattttactaattttgtgattgtctatgtattaaattatgttttccaaactttgatatctaccaaattatcccatcaaatttttgacatgtatcaaatcatgttcattgaacttttatctatgttagactttccttaccaaaattagacaaaaatccttaaatccaacaatctcaatagtttaggaagaatttttaatggttttgaaaagttcagctagcaaaaattctaattagcctttttggaaatttgacacatattagtttacaatttagagatatggtatatacccccttattgtttccaaaatgatggacaaattggtttggcttcatgcaattgaatcttgaaaaactaatgttatttcatcaatcattcagttggaatcagtagtggtattttggtattcagaaatagcttcctttttttatttaacttgcaaacattatttttgacagtttcaatgatcatgttcacaacatttgagcattcagtggacttcatataccgtaatataattcaaaataagaaagaaaattgctcaagatcccaacaacttagtgtgtcatgtatagcgggtttcactgcttcaactgctggtgccgtcgtctctaatcctgctgacattattgtatcctccctatataaaaaaaatgctggaactattatgcaggtaatcttgtgaagtagcttataatgttgttgtttaatccaaatgtgtaatactaaaagcagtgtaatcactcacatttgtctgtatataccatttttcaggctataaggaatactgggattgtaaatttgcttactagaagtcttcctgttcgaatgacgattatcggccctcttgttactacgcagtggttcttgtatgacagcattaaattgatgattggattgtgagtacctttcatcataatttatcatatttttccccctacttgaatagttaacaaatgcttttggattttaggttcttttattgctaagaaccacccaataaatgtattcgcattcttttgtttacttacagattaggaaacaaatatgattaaccatagatacattacatgtatgccttcactaaccattattacatgaacaatatgttagcttttatcctgtaatacaaacacccgaaaaaggaatgaactataacttgttccggggagagttaggtagataggaaagaaggttaatgcaactcttgatttaaagtacattagtgaagttgcatctaacccagttaccgactatcattgaattggaattaggctctttttcgtttccccaactaatcttgtccgcgtttgattttattcaatcttgatctaaaattttccatttcctttcctttctgaaagctttccttctttccatcacatagaaccgaaatatcttggttctgtttcatcagtttgctgttgttggattggttttgagtgccaacaaatgatttcataggcctcaaaattgctggtcttcaccaccacctgatcaaagaacattttcatcatgtacaacccatctgctattatgtacagctattgcccattaagcatgttttttcatcatttaacaaaccatatgtaggctcgttttaacattccgttggagtaatatgatttcggtaggttgtgttattgatgtgagaactctgaagctctgtgctaacatgtcttaatggattttgaagaacttaatataagacacaaaagaccgaagactcttcgtttcttgaatgtaaaacaaatatgtcattgtttcgatttttgccttaattctaacacagacttgttctttacaactttccaggcctacaagtggaggactcaacaagcgccttgaagagggtaactaatcgtcggataaaaaccagtgaaatttcggaaattaggtattcttttattgattctaatctattatatatagatacaaaaacacaagtaaataatttggtactaatattggtggcataatggtcacctgtctcagatttttttaccccctaactcccatggctgttggcactacacactaccaactacccaaaattggttagacattatagagatatattaaagagaagagttatatgatgcattgtctttaggggcacatgtggtgttggtcatgaatactaaactaaacactaatacatgcattgtatttgtatcaatttgtttttattggtcatttgaattgtaatagcaaataattggaatgtaaaaggatattgtacacttaagtaacactattttctacattacaatcattataatgatttgaaaagagctactttttttcttgagcaattgaaaagagttacttttggtaaagtttgagtgtcattgtattttctctacttgtataaatgtcattataaagtctcctgattatatctttatattatgacatctgtggaactgagaatatatgggtttaagacgatttaaattttgagtgttatgggattcgaattcacaccagtatttgttgtttataatacacttaattttatttaaatgaaattttaatgaagcctttcgttatttattttgagctcctgaaaagtttgaaccttagtccgtcatgcctaaggtcggctcttgactttgagagaagaaaattaaataaaataaaaaataatcaatagtttctattttcttttgaatttaatgtcaaacaacatagtttccctcctttcttcccttgtaaaatatgtctctctaattcttttaaataataacaattcttttttaaactaaagaaattattgaaagtttaccagttcttctgttgtattatgttcatttgtcaacatgccattggcatagttattgtagaaaagtctatttaactaactaaagtttattgacattagtttcaagaatgcatataaatattattaaaacttgtaattagattaaattttgtttgtactcttaaattggcttatattaacgctacattagtgttacatcaatatattgttaaaaaaaaaaggcatttttttctcaggcaaaattatataagaatgaatgaataacaaataaaagaaattaaaaaataaaatggtgaaaatattatttttgtacttgtaacaataattatgtcattatgtgtcaatattgttattgg

SEQ ID NO: 184198 - DNA, 5423 bp, Cannabis indica
aaaaaaaaaaaactaatttagtaaatttgctgctattattctcttagttttgtaactttcttatttcttatgatcgtcattttaaatgttgagtgagccgttagtggtgttggatattggtacttttatttattttcttatgccatacctgttcctttattaattatatatggtcaaatgcaaaggtgaaaatacacacccttattaagattcatactactcccctcccaccctttcatgcactccagatcctgtgattgatttattctaaacatttgcttttacaggaaataattgacgaagaggatgaaaaattgaacaacttaaagaacgagtgtggtgatgaagcttacggtgctgtgatcaaagccttgaaggaattgaatgagtacaatccgagtggtaggtacataatacaagagctttggaactttaaggaggagaggaaggcaccattaaaggaaggagtagattttatactgaggaattggagacagaataaacgaaagaaaaattgaagatagcgtcgaatcgcttttgtctaagccttttacagattattacagctacagcttgatggaatagatagaccatgttactggattcattgattctcttgccctttttgatgacggattgattggacttttcaacccaggaaccgatctactatactagattgggctaaaggatagttgacttgggcctttattgttcggcaatgaatttagattggtggtcttgtagatcaacagtgaccctcctatactccttacactgcatacacataatggattgactagtttttttgaaaaaaaaagggacaaatctttacaaaaggtcgtaggcatctcatattttgtcatccttctatagatttacatatccattatcctaaccagtcagatatatggctaagaacctctgtattggataacttttcaagtttaaaagtctcgtagtttttaaccgtatgcatctaactgatacataacgattagaagataaaaaagaaagaaaaatagttgcgagggacccaaagaattggtatttctccttattaggaatacaaagttatttgttataaaaaatgactcaaaataaaatacggtgatagaaatcttacctccgcatgtcaagggagcattagcaaaaccagccccacccacccatgtgcaactagtttctgtgatgtgacttacttctattggatctgttcatactttcatggctatggactacaaaacgaatccagttcattttataaaatttatatggtgtttatcagattttcttaatgtagtaagaaattatgtttaaatagcaatatgagtatcaaaagtctattatttatttttagggggcatgagtacttaatatttatatttaaaatttaaatattatatgtatcgtactttttataaatattgaatacttatactaattaaaaaaattgtgtagcttcgtccattaaaatctgtagataaggaattgtcacatatacatgcaactgtttatctagccctaaagccttcctagccaggtggtgagcatcgtgattacaatttctggccacatgtctaaaacaaacttcagggaagttgtgacgagggggaaaagaattgtttccagtatttattatctttgctttcaaattaagttaatctataatctatattcaaggttgtgcgtgtctgcctctttttggtttgtcaggaaacttccctcagcacaacatgtcacatacggtttctgagctctactctttttttttctgagggaatctgtagctctacttcaggaaccccatattgtcaaaagttcaactaagctacagattttaatggatgaagctacacaattttttttatttattttttaaaaaataatctagtagaaatggagcatttaagagcattcttggaagtttcctacaaaaataaatatagaattgagatatcttctctttttcagattgcatgtatatgtgacattccttatccaagattcgataatgattcttgaaagtggaaaccagatccgaaagtgaggtttttgttttttttttctttctcttctaaaggggtcaatttaggttttaaataattcaaacaataaaaaataaaaaccgaagctctctttctcctatttcaaatgatgcttcatcccatccttgtttctcattcatcttcaaccttctggtttcttgctacaaaaccagagggtatttgtggcatctcaaaatttcataccatgtaatgtgaccggttaaaagtatttaattcgtatgtggtgattatttattattaaaacagagctatcatacgagagttttactcaagtctcacaaattagatacgagttatgtctcattttggcaaaaccacaagaaatgaaataaagggcataagcaaaccaaaatatgacattccaaaagtcatccttttacaaagatatactacaatacacttcattactatatcatatactaaaatttcactggtatacttgtaaaggctgcgggcttgcaaacctttttggtgcagccgcttcaagcctaacccctaaaatcccttcactgttttcactattaaaaaaacagtgatactcacctcagtcccaccaatatcaatttgttaaaaacaagtctttctcacacttagtcaaacccctctccacattctaacttttacattctccaacaccaccctcagtcagaccaataagttcttagttttgcggatttaaaaagggaaaaaggaaaaatacatactcttcttttagagccgaagaaagggttaaaaaaagaaaattataaaagtaataataacattatggcgggaagcctagaaaatggttgtgtgttgttgttgtttgactggtcaaactctgaagttcttgcctgtgaaagtttgaccgaactgccaatgagctggaacgatgttccacgacgtggagctacgtctgtcacttgctctcactctaaaagacagtgattggccaaccaaaacggcgtttgactgccagttttgaccccagttacggctcatggtcatccaaccagtctttgttcctttaacgctaaccttcacgatatcccctgcacccgcgacgttggagatcaaaaccaagttgaagtaacggaaaccattaattgtgaacctgatccctccgtgcttccggcatggcactctgtgtacatcattatttaagaaaaaaaataaaaaaacaggtcaggagggcagtttcgtaattacatagcgtgccacttgccccgtgatttaggcattgggaaatgttaattttcagcttcgatcggtgagtttaggacttttggttctgttttgtttcttcttgggttaagtgtttgattttaatttttgggggtcaaactcaattgttaataaaatgctaatttctaaacttaaataaaaaaaaaactttaaacgaattttcgtaataatataatatatttttttgaaaaaaaaaaaattcgttgaagattgttacctataggtcttagaatgtgacatgtattaaattttttagtatggagtggtgcgtagcaataagtaacaaaaaaaaagagtggccaagtaattttggcagctgcgataggaacaatctcatccaaatgtatgcaagatggaattaattcaagtagttttctaaattttttttattcttttaagggttgttttctaatctttgtagtttgtagatatattcttttaagggttgttttctaatcgttgtagatatattcttttagtttgttaatgtaagggaccaaaacgggtaaaaacaaaaacccgacagcgacccgataggatccaatgactcaaggtgggataccaataaaccgttttaactaactaaataatatctctaaaaaataaaaattgtactaaatagtctaaatttaggatgacgctatggatatcttggctaatctattattttcattaaagagtataccttcggattaaagtaataatatgactagtgatcataccatatccaactcataggaacatggatctgagtattatgacccaccaaataaatatagtggggccaaaaataataaaaaactactactattattactattattattattattattattattattattattagagtattgctattagacactaacaccttctcgacatgttgtgttgcgattgtctagcgatactttctaaaagctattatgttaaactattgggatccaatacttagttggaccaataaacactagacaccattggtgccctctagcatttcacttattattattattattattattattattattattattattattattattattattatgtttcaattttattggactaaatctaattattattgttaaataaaaaatgcctaattggatattattattattattattagagataatattattttgaaagaaagatcagttatctcttagaagtaggaacctttttaagctctctattccaaaagcagaaacatatttttggataatttggattaattatcgaaaactaattaaagctaaaaagaaaatataaattaaaaggaaaagagagtgagttacggtgattattaccttcggaaggatactggaacaattccagctctgtactcagcgatcttgagaaacataggcatggcaaggtcgaaatgaggccgaggtgggttacaccatccgccattgtcgttgggcagagcgtagttaggtgggcaaaaattagtagcagtaatgaagatagaagggcttccggaatggcaccagcttggatcattggcacacttgatttcaaaacaagcaccacagcttagcccattattgaacagagcagtgctcaaagcggccgtgttcaccccataaccttggctgtacaggtttccatacccacaagctccacctgttacataacaaaaacataaagcaaacccagttcgagttatcagaaactatgaaatgggctttcgctaaatctaacaactgtcttaataatgtagccaaaaagaaatgtgggtttgtacgtaacgtacccatagttcctgaggcatcagaacctccatagaaggttgcatgagctgattcccatggacctccagagtaaatacctgggagtctagcttctgctagagtcaacattagtgagattagggacacaatcacagctcttagaaccgccattgttgtatttttttttgctttttatttcttacctaactcctctggttttttaactagaaaacaaaataataaaagaacagaggagtggaaggtaataggattgaggatgaggggttcaaggagaggatgttacctctacttaaggagatgaaagcttagctgagagagggtaattttgtaatttcataaaaactattatatatttttt

SEQ ID NO: 184199 - DNA, 5980 bp, Cannabis indica
aatgataccatagtttagtaatgatcttccaacattaagaagatcatcacatcacattcacatctgaagacatcttattaatttaaaaaacaatagtaattataatccaaatgaagattaatatagtacaacgattaaaataacaaacactactaaatagatatatttatatatatcataataagagtcataatgatcatgcatgtatatatacggctggtgcatccatatatatatacacttctgaaaatcaccaaaatattttgcattgtcagaaacttcattcgtcatggtataatatgtatgagatctctaatcccttcttcttctcttcttcttcatcttctacatcaagagatcgttgacccacccgagatccggatccgaacccgacccggcattgttaacctcgtttagcttattaagcttattattatgattctcattaacaatatcattgtacctcttgctagaccaatggctgaaattctcagacccagatgggtaactcggagtagagggagaaagaacaaattgttgttggtcttcggcgccggagttgaacggcaagacgtccacccaaggatgattacggtcgccggtggtggcgaccgacatgggagaaattggtgaagctgcttcgttgaaattcatcgactctatggaactcatcagatcggtgagggcttccttgtaactaacagctccttgaccggaatagtgaccgttcgctgcggcagcggcggcggcggcgtaatgttctttgtaggctgaaatgggagaaaatttctccggcgacatgggcggtgagaaatgggaaatgcccatgagagtagaggtgggagaagagttgttatggcaggaacagaaagcgcagcagtggttggaattaggcgagttattattattgagggatattgggtatttgatttttttcttggaagtaaccggagaagccatttccgatgaagacccattagaatgaagaggcaagatccgaagctgacgaggagtatgggcaaagaaacaaacctttctcttacaattcttcccatctttacaagcctcagttctgtacctcgccggatgaagccaacactcgaacacgccgtgagcgaactcacagctatctcctctaccgcatccgccgcgtcggtaatccggacaaaccatgccggagtagtggtggcggcgcgggtctctccggcgagccttctctcccggatgagcaaaagggcagtcagtccagtcgtggctccgactccgggtacacctccggactttaaactcgtacatccgaaagtgatcggaagaataagggtcagatcctccggcatcgtcgtcggattctccttcgccggggttgttgtagggaaggaacttctgaaagagagcgctggtggtggtgtcgtcgtggcctggggagatcaacctcggtgacccatttgaaaacatgtcggctgcggcagcgagctcgtggtggcgtcggccgacgagctttctgggcggaatgttgatatctcaaaggagaaggtggtggagcttttgctgatcagaacaaactccggtggtcattatatacttatttaattattagctaggtgagatcagatgatgatgatatatatagtagtactgtatatatttattgagagagaatgagagtgagtgagtgagtgagtgaggcggtgttgaatataatgttgatgaggtggggaacaaagaagaaagaatagggttttatatataggagaacaaatagatatacaaaaattaaaaatgatgacaaggatggagaataggtatgggcaaataggtgcgtggctgcatagtattagggatcagcatgcaactttggctatgtggcaacttcacaatcccatcccaccttctcatctcttgtctccttccttattatcaaactcttttctatttttaatttttatttattatattattatgagtttgagtaatgtggaggtcacaaagtgtattgagtgatattatttatggttatggatagcttagctatagacacaaaaatagagttggggtacttttggggattatatattatatatatgtatttattattattacaattatgtgtatatatacatcttctacatttatgtagatcttgtacttgaacctaatagaacttatagaagttagtttctttgttttattattagacaccctaaccctaggaggtggaaggaccaattacatgtaatttattgttttgatcaccaagtagctagatagtagttattatgataaatttttcttttatcttctgtaaaaatatacatttgtgattttatccaaatcatcatcatcatcatcatgtattgtaattttgaaagtcgtaccattaaatttgaattggtactatatttgtctttagtggggtgatattattagaaaatgcttacctattattattattatttttttaaattctggagtgtatgcaaaataataataatagtgataataataataattttggagggagtttgtttcgagtttcgaccgtatgaaattagtatatatcgataatggtcttcgtgaattgattgatatacatgaaaaaattgcatcattaatgttaatacgtaacttttctttgtgttgtgttgtttggccccttcgtgcatgtaacaaatactcataacataccatctcggtggtattatatatataatatacttattttataaatcacaccaaatatttttccaattattaaaattttataataaaattataatttaatagttactaaatgtaatatgaacacctatttaaaaaatatatataatataaacaccacaaattattcacacataaataatataaaacaacacacacaagtattttgcggtagtgttacatttataatcaagaatttatgtataagattaattctcataattttgaattataataaatagtgtcccattataatgttgattataaataatatcaaatataagtaaatagttaattattattattattattattattattattattattattatccacttttttttttgaaagaatgattatccactttaaattaagtaaataaataaataacattttaacattattatatatccaccggttcaccctaaaaatatggagcttttttatctaaatattagtttatttaggcaacaaatttgttaactaccaactacttcaataatttaaaattaagcaaatatggatcaaagcaataataattataataaataaataaaaataataatgaaaattctttataggtggcttggtgaaacctaaaaaagtacatcttaagagaaattgtgttggcacaaatctaataaaggtatgagtttatgagacttacctctttttaattaagctcttttggttaagcaagcagcgagattgtattatgtttctcattttctagtggctagagttatgaagactatttacaatcctagctcctagtttttcatgacgggcgagtcaaagattcttttttatttagaggtttattttatgggattaggagatttttgaaacttatagtttttggcttattagcaatggagctaatgtttctatttatcatgaccgatggaattctagtttagatggtaaaagtcttactctcctcgttttctacctgatgatgctactgtgaatgagctgttgctatccctttctatgtgcatgaggctagggctatacttgccatagctcaggatcatatttcacattttgataatctggtgtggcattttaagagatcaagtctttactcagtcaagagagggtactgggatactatacgtattcttggcattggggaaggttctagttccaatggtgaatttgaattatggaataaggtttggcgattgcatctccatgcgaaggtcaaacttttactttggaaggcctctcataattagttgcctactaatgataatataagtcactgtggtgtccctgctactactaccttccctttttgtttgattggtatcgagacatccttgcatgccctttgggattgtaataagctttcttctatccgtgaggttattaccctccatcttcaggcacctatttttctttgttgggaaatctatgagttctttcatgcttgtctagatgttatgtctattgccttgtttgaaaagttcatagtctatctttgaagaatttggtatcggtttaataaatgaatgaatgaaaaattttgtgtgaaggatgattgaccttttgtttgattgaagtatgtattatctacaacgatactcttatgccaatagttgtattcctagtcttgataatcttttagagaatcagtagtcaattgtcagatggtcttaaccacccgctaaggtggtgcaaatcgaattcgtgatccagggttgaatctagagttgggtaaatctgggactggggtggtgtttcgtgataatactggtttcgtcctagcttatagtacttggacttggaatggttatttttctcctggcgttgctggggctttgggtatctactctggggtcttgcttgcttgtcgtcttggctattagagagtggtgttggagtctgattgccttaatgttattaatgtcatttttcatagtaaggttgattagtcttatttaggttgtcttatcatagatatccttgcttattgtaatcattttattgatatttcttttatatatgtattgtcttaggattattaatagtgtaatatctcaataagcctagcagtaaataattaggagttatatttatattatcgattaatcaggtaataagttggattatgatcctactaatctattttagcataaattttaaatctgctataagtgggtaaataagcgtaatttattaattacgaaatttatatagcatgtgtgaatataatatgagatatatgttgaataaaaatgtaacaccctaacaattaggcacgtcacgacaactatatatgaaaccctaatcccctaatccgggattactagaaaaatacgcccgggaaattttaaactttatttgaaacagaatgaaaattaaacttgtaataaccttaaactttataaaccaaaagatacatgtttcgggatcccgcaaatattttcacaaaaatattacaagttcatttgacgagccgacctaagcggaaaaactagaattacaaaatacatcactagtagaccccaacccgcttggtctagtgtggctcaaacatgtacaagcatcaccaacccaggaaactgcaattctagccacacgaaaatcaatccaaatcacacctaattcaccccaatcatgcacatacttcaaaaccataatccatagttaaataggtattaaaacaaaccattaggacacataaattaagctcaaactcaacaatcatgcatcaaaaatcaacaactcaacatgagcaacaacatcaaagttaagaactcaaatctaacaaaataccactccacaaacttgagcatcactatcaaagttccacagcaaggaaatatcaattataatctccaaattctcacattcaaaactcaacctaagttcctaaacatccaaaacttagctagagttaacaacaacaagggaatcaaactagaatatcatcatttcataccaattctcatccatgcattttcaagaacataaacacataaaagcatgcttttcaatcctcacaccagcaacaaattcaaaaagtaaaaaggataagaactacctcaagctctctacacaaataagcaccaaaactcaccaaaaatccaagcctccaagacaattcctccaacacttagcaattgaagagacgaagtaaaagagagagaggaggttggtttatggctgaggaaaagtaaccaaaaaaaaaaataatacctttttcttcaaaattttcttttattgaatatacattaaatggttgaaaaga

SEQ ID NO: 184200 - DNA, 4617 bp, Cannabis indica
tttttttctttttctttttgttgatgaaagctcatgattgaattttattttgattttgccgttaactcttgctcattgagctacctagcagagttttatacgcatatttaatctgaaatgtttattttgttaatattgaatagaatcatttacgttttgcatttaaattgtgaagtgttacgatctttctatatatcttttgcgcttaaattgtttgtttaatcacggatgatgaaataatatcttcgtgctaccgtaccatttaaatatagattagctggacagaagtttacttactgttttcttgtgaagttctcaaccatttgttgttctttcagtgtatcttgataaacgcttgaattcatttttgcttacaatgtatttataggtatagaattatatttttttctattgtgtattcttctatgtaaaatgaaaattatatatttttagagggagaaagctatagtttgtgttagagttatgatttgccaatacaaaaatatttgtgtatcaattaatattgttttaggctagctcaaaagggaggatgagtgatcagagtacagtaaatatgtcttaataagaagagaaaaatatttcatacattactacatggctggttcttctagaagggctatggtatggtgcaatgttgtggggttctgttctgttttcacatttgatgaaacttggtttttttttttcctttctttttttggtcgagtaagaagaatgtcaaataactcaatgatatagagcacaatggtaatccataattcaacagtagaccatgacttaagaatatttagtgattctttatttatttttattttttgtacaagctcaaaatttattacacgatggaagttcaaatttttatgaagcatagtctctttgtaattgctatacatgcagcttactattctgcattcataaattaatcttagtatataatctctcattacttgctccactgtagagatggcatcagttcatagtgccctgacatcagttgtgttcaagaatggaaaccattcttctccaaaaaagttcccaagtagttccttcttacctggatttgatattatggggcgtgtttcatgtccacataaaagggaaatgtcaggccctagagccacattaacctttgatcccccaacaaccaatgagggtaaggacaaacaaaggaagcatacagttgatcccgcttctcctgattttctgccacttccatcctttgaacaatgttttccaaagagcacaaaagaacaaaggtctgatagtactttttacgacgattacttgcgttggtcatgtgtgaacatttaaattatttcaaaccaaaaataagtaaaaaaataattacttaaatgatgtttattattttgtttattgcgatatacccttcaaagcactgaactcagatatatatgttactaatgaacttgtcactatccataaaacagggaagttatccatgaacaaactggccatgtacttaaagttccatttcgacgtgtccacctttctggggatgaacctcattttgatacctatgataccagtggtcttcaaaacattgacccacgtgttggtatgcaaatttattttcatatattttctttttcatcttggtgtctgtgcgcttcatatttcagtatgtggtacttgcatttgcctatattataccccactcctaacacacattcatgctatattcattgattcaaaagttagacattagttttggtccatgctattatgttttaaggagacagatattcagaccaaattattttaattattgagtcttactgcacaaaatgaacttggcaatttccagaagtgaaatacctgacttgtttggtattataaatggtaaataatgtccaacttagtcatgctgtctttaaatgctcactacaagttttaaaaaattgaattatataaaagaaaagagtagttgactcgccatatattttttttgatattgtctattttattttccttacataagtatttctctcatctttgagtggttctgttagacacttggaattctaagataatctgattcggcatttagtcataaaaccatttcatttcacttgacttaactagattcttgtctttggagctcaaaatagctttataattcatttgtttggttcacattgtcaaataggactccctaaattacgtaaagattggatcaacaagcgtgaaaaattaggtgcacctagatacacccaaatgtactatgctaagcagggaatcataactgaggaaatgttatattgtgccactcgtgagaatcttgaccctgagtttgtgaggtcagaagttgctcgtgggcgggcaatcatcccatccaataagaagcacttggagctggagccgatgatagtgggaagaaaatttttggtcaaagttaatgcaaacattgggaactctgctgttgcaagctccattgaagaggaagtttacaaagtccagtgggcaaccatgtggggtgctgacactgtcatggatctctctacaggtcgccatatccatgagactcgtgaatggattctgaggaactctgctgtaccagtagggactgtaccaatttatcaagcactcgaaaaagtgaatggaattgcagaaaatctaaactgggaagtgttcagagacacccttattgaacaagctgagcagggtgtcgattacttcactatccatgccggagtactactaaggtatattccactaacagcaaagcgcatgacaggaattgtttcacgtggaggatccattcatgcaaaatggtgtcttgcttatcacaaagagaattttgcttatgagcactgggatgacattctcgacatctgtaatcagtatgatgtggccttgtcaattggtgatgggctgagacctgggtctatatatgatgccaatgacactgctcaatttgcagagcttttaactcagggagaactgactcgcagagcatgggaaaaggatgtacaggtaatgaacatttgtcctcacaaggtttacatttcttttatcaaaagcaaactgtgtttacttttatagtgtttttattttaattggattttcaggtaatgaatgaagggcctggacatgttccaatgcataagattcctgaaacatgcagaaacagctagaatggtgtaatgaagcacctttctacacccttggtcctttaacaacagatatcgctcctggatatgatcacattacctctgccattggtgcggccaacataggtgctctgggcactgcacttctctgttatgtcactcccaaagaacaccttgggttgccaaatcgtgatgatgtgaaggctggggtcatagcatataagatagctgcccatgcagctgatttagccaaacaacatccgtatgctcaagcttgggatgatgcattaagtaaggcaagatttgagttccggtggatggaccagtttgctttgtcactggacccaatgactgctatgtcctttcatgatgagaccttgccatcggatggtgctaaggtagctcatttctgctccatgtgtgggccaaaattctgctctatgaagataactgaagatgtgaggaaatatgctgaggagcacggctatgggactgaggaagctgtgcagcgaggaatggatgctatgagtgctgagtttttgtctgctaagaaaactattagcggggaacaacatggtgagattggtggagaaatctacttgcctgagagctatgttaaatccgcagagaggtgaaggtcagtctttgtttctttgtataagtttttccttcttattctcatgtcagatgattgtatgtagacgtgaatggttctaataaaataatcgaagtctgtaatccaagagccaaagataagatttgtaatgtcgcattaaactctggccaaacatttgtaatttctttagctttaatttatcattgtagagaccttcactgaatcctgatgtattaaaattgttttcaacagtgtaatcgattctcttagtgaatcttcaatcttttcttacaatgttcgttgcttgaacttcatttatttgttttacttaaaaggaggtcttatattgggttgggttggtttatattttgcaggaacattgaatgaaaggaagcacattgacaagtttggacgcttaaacagcatgttcagcagatcgagatcgcgttattggggttgttttatgttcatgctatggtatagaacgtagcttggtgtttgaaacttatctaaagacattatttatgtgttctacctatttcaatgcgtcagtaataaaacaattgtgctttcttgttttaagtgattctattttctgtgtttgattccactaacataagagacgcaccaggggtgcctgagtctgcttcgcaatagctaaattgggccagcggggcaggcaggtcaggctgagatagtccctttgaacctgaacaggataatacctgcgtagggagtgtgcatgttattttcctgttttattgtacaggaagagagagagagagacctgtgatgtgatccatggtccgagaaactcgacaacataatggccggatgaactgcgtttat

SEQ ID NO: 184201 - DNA, 3026 bp, Cannabis indica
ctccattgtgatttgcatcttttgaacttttaatcacttactttagagtactcccagagaaagtgacatggtagatacatagatattatgctcccttggttatcaagaatccaatgagattaccaacctgtgcctgattgatgatatgtgtaatatgtttcaaaaatctgatgttgttctgttttgttggactactgcagtagtggaagcctcgtagcatattcagaatcacagtcagatgtgagctctcctggtgttaatgctaatcaaattgagcctgggaaaaagagagtggtggttcttggcacaggatgggctggcactagtttccttaaggatttggatgcttcgttgtatgatgttcaggttgtttcgcctagaaattattttgcatttacgcctttattgcctagtgtcacatgtgggacagttgaagctcgaagcattgttgaaccagttcggaacattataaagaaggtaaatgaaataaacaaatccaggactgtgaaatttcaaaatttaaatatatttatactttcctttcctttttttttctgtagacactatactgtaaaatggacacgaacagtttcgatattgctgtttggttgacaagcatcacacattgtttttgttgatactgtctcctcatttgtgtttcattccagagaacaggagaagtaagattttttgaggctgaatgtgtcaagattgattcttcaaataaaaaggttatatgccggtcgaattttgatgacaaagcactagggaatgaagagttctgtctagaatatgattacttggttatagcacttggagcccaagtaaatacttttaatactcctggtgtcaaggagaattgccattttctgaaggtacagcctacctagttttgaatgtagtagaatttttataacttgagttactactttcctttaatttattttattgtttaaacaccaatcaagttgcttccagcttattttgacaagtgatccttgtgcaggaagtagaggatgctttgaagatacggcgtagcgtgatagattgttttgaaaaggcttcacttcctgggttaactgaagaagaaaagagagcaaatcttcactttgttattgttggagggggtcctactggtgtggaatttgctgcagagctacatgactttgttgaagaagatatactcaagttatatcctggagttaaggatctgttgaaaatcacagtgatccaatcaggagatcatatcttaaacatgtaagatgaaaaaacaattgatatttcacattcatctgtcttaatgctttcgaacaccttcattgagaacccacttttaaaatctgtctaccaacttttccctcatgtacccttcttaaaatagtgcaaccatctttagaagtgtgtagaaagaataaattcccacttggagtgagattattaattaagttggcttcagtgtgaccatcttctgaatcttgcagtcaaccatgtttaattactgatgccatttgttctctataaatcaatttcgtgttattatttcaaatatgagttccatgttaaactaatctctttgcagtcccatagtttttaccaccatctctttgttctgaaaatatattagtgtctttgcccggtcttccatcttatgaaactttccttgcttgcaattatccttttattttcgtaggtttgatgaaagaattagttcttttgccgagctgaaatttggaagagatggtattgacgttcaaacaggatgtcgggttactagtgtgtctgaaaaggagattacaatgaagagcaagacaaatggacaagtctactccataccccatggattggttgtatggtccaccggtgttgggactcgtccagtggtgaaggacttcatggaccaaattgggcaggttcgttactaagttcctagctatttgatcactaagtgatgcttaatgaattggaggatctatttgcttacttgtgtggatgtatatgacttctgcagcacccttagcctcagctttcaggattattaaaagaaatcttttatttacacccttctaaacatgcaggctaacaggcgtattctagcaactgatgagtggttgcaggtaaaggggtgcaagaatgtttatgccataggtgactgcgcttcaattgatcaacgtaaaatcatggtacgtcaagtacctaaagcttctacttttgatttcatctttggttgttttgatatggtcaattggtgaagttgtagtcaagcgggaatgtatgtagtcttttgctctctcatgttcatgaccgttttgatgttgtgtctcactgtaaatttttgctacttttatgtaccttcataattgaaagaatattgcatacatgaaagtcattcaatgattcaatttcaggaagatatatcagccatatttgaagcagcagacaaggacaaatctggctccttaacagttagtgaatttcaagatgtaatagatgacatcctcataaggtatcctcaagtggatcattatctaaggagcaaacatctagctgatgtaacagatctgttgaaagattctgaaggtaaagacaggaaggaagtggacattgaaggatttaaatcagctctttctcaagtggattcacagaggaagagtctgcctgcaactgcacaggttcatgtctttcctgtttttattttttgctttggacaagttgttctagctcataagttactttgttgtctaataaaataaccattatcctctccaccctttttgttttcaggttgctgctcaacagggttcatatctttctagatgcttcaatcgcagggagcactgcgaagcaaatcctgaaggtcctcggcgttttagaagttctggacaacatctgtttcgccccttccagtatgtttcatacattaatgttcatccattttgtatcatttatgtatccttacagcatactaaaatttggtacaacacaaaaaagtaatgacttcagtgtgtaaaatgcacggccacccctct

SEQ ID NO: 184202 - DNA, 9328 bp, Cannabis indica
acatagagattaaaatcacttcagaatttacgatgctcacatccgcaatcagcgcaggtaacttgtaatattgaaggtttagaaattagagacaatagtcgtggcatggagtgctattttctataagttatcgagagaattgggtagaaagttagaagtcagccaactttttgatgatagaacaatgatttggtgcaaagatgagaaggaaaaagaggagctgattggaattcattagttaaatgtactgggggccaacacagtagtgtctttcatccattggagctgggaagagcagagaaaaaatgtgaaggttgattgcagaggctcttggattagaagaaaaggtttaactttgaacctttggaacatgaaaatgttcaggaagataggagccttatgtggagggctgctcgacgtggataaagacactgccgaatctaatattttgtctcatttaagactttagttgatgagtgatgagtatggttttgtccctgaatctatagctttacatcatgaagatattgtgtttgagcttagcctgttcaaacttaatgatgttagttatagatttcatggatatttcaatatttgttggttccaggacagtgagtacgccaaaaaaaaatggctatggaagatgaagcagtcactgttaatgttatgggaaaagacgcaaaagaggaggagaatgggggagtgaacaatgggcctattgacgatgcttttccattacatcaaagtctcaggcgatggaggccatactgtcggtcgacgtgactatgattgttgaactcggcaagggcaagatgtggaaatcaagaatggtggtggaaggcaattaatggctcttgatgacaactaaagtcctgaggatgatagctgccacaccattattgaaacgcacgaggttgttattaccaaaataacagtgtgagaagcgagggagtcggttggccttcagcaagtttttaatcgtcttttgcaaaacatgaatgtgataagccaccaattcgttatacctatgctagaagatctcacactaattgagatgagttatttaggaaagttgatgatttgttttgccttatgatttaattggaattatttgtttttgtttttgtgattagctttgtttggaaagtttaaagaattaaaatagaggagaatgtgaggagggtcaaacctttaatttgtaatagagcagtagttcttggagagaaacaaggtctctcgaatatcttgggcaatttcttattttcaatactctttgtttctctatgtacattcttcttatattttccttgcatctttttggtttggttcgatacacttctggtgcgtatcatttagtatcagagcaccgaccgggaccgggtatgactcgaatggaagttgtagaaggtttagtagttgcggtacaaaaagatctgggaacaatgaaggaagaaataaaaaaattacctctgctggaaaatggaatcactaccctggtacagcggttagatgattttctacagagccaggaggagcggcacaaggcgcccatagaggaggagcaggaccaggcgtcggcaactggaaaaaaaatggcagctgatggtggcgcccgacttatggcacctggtcgtccgttcatgattaagggagtgtccgtgtatgttgagggaagtcgtggaaacaatagtgggactcgcaacaaccaggtaacccacgatgggatattaggcctcgctggattgaactttctacgttcgacagcaacaacccagacgaatggctattgaaagctgaacgatatttttccattcatcgtatgacaaatcaagagtgtttgaaaactgctgtaaatagcttggagggagaggctttgatttggtttcaacgggaacatcgtcgacgaccatttttcaattgggaggacttgaagatgcaaatgattcagaggtttcaacctctgctcgttgaatcaatgtatcgaaaattccttgccctcaaacaagaagctaccgtacgtgaatattgtaagaggtttgagttgattgcctcttctttagaaggaatttcagaacaaatattagaatcttcttttattaatgggctgaattcaaaaataaggtatgaagtaaccgtaatggccccaaatgggctggaacatgttatggaattagcccaaaaggtggaattaaagttgttggcccaacaaaagcaaaaatctgttatacaaagctctgtttcacgattccagggagggctgactagaagtggtgaaagtagcttcgttccaagttcaacaaatttcaaagatgaaggtcagccagctaggaatggattttgacagcccacggagactgaaattcagcataagaaggctcggggattatgtttcaaatgtgatgaaaagttttcccctggtcatcggtgcaaaaaaactgaactctaggtcattattgttcaagaattcaatgaataaagagaatgaaacatagatgacttggacgaggttgttgaagaagaagacaccaaactggaaaatcaagtcgtagaggtttcccttaattctgttattggtttgacatcccaaaaactttaaaattacagggacacgttagttctcagtcggtggtggttctcattgatagtgggacgactcataattttatctcgaatgttctaatacgaactttgcagctgcctatcacagccacaactccctacggtgttgtattgggtgcgggacaatcaactgagactcgaggcatatgtaagggggacaatcaacatagactcgatgcatatgtaaggggtgtcactccctaaagtgttgtatttgggcaatactaatataattttgggtatacagtggttggaaactatgggtgtgactcacataaactggaagactcactctatgaaattcatggtgggaaacacagcagtaagtttacagggagacccaactttacataggactcttgtgtccttaaaagctatgatgcaaacaattaaacgagagagtcatggattaattattgaacttggggctgcctccattgagaacgggaatgatgaaatacctaatgaaattaaagaagttttgagtgaggccaaaaaaatctttgaaatgccaaccggactttcaccacttcggggccacaagcattctatcttcttacaagaaggtacatcgccaataagtgtccgtccataccggtatgcacaagcctaaaaggatgtcattgaacaattagtgaaggagatgttagctaccggcattgttcaaccgagcgtcagcccgttctctagtccggtgttgttagttcgcaaaaaggatgggagctggcggttttgtgtggactaccgtgaattgaaccgtgagacagtgccagagaagtttccaattcctgttattgatgagctattggatgaactccatggagccactatcttttcgaagctcgatttgaaatcgggatatcaccaaattagagtgaaaccttccaatgtgcctaagacggcttttcgaactcatgatggacattatgagtttctactaatgacatttggtcttactaatgcctagacaaccttccagtcattgatgaatgaggtatttcatccccatctccgtcaatttgtcttagtatttttttatgacattttggtgtataataacagcttaagcgatcgggtgcaacacctttccaaagttcaactcttgtccaaacacaagctttacgctaatctcaaaaaatgttcatttgctcgtcaaaaattgaattatgttagagtggcctgaacccaagaacatcagggagttacgaggtttcttggcttaacaggttgttaccgcaaatttgttaaagggtatagtgaaatggcatggccattgacagagcaattgaagaaggacaaatttggatggaatgatgctgcaactatcgcttttatagcacttaagcaagctatgaccatggtgcctatattggctctgcccgattttgaccaaccctttgtagtggaaactaatgcgttaggatatggcgtcggggatgttttgatgcaaaactagcggcccgtgtcttattacagtcaagttttgggacagcaagcaaggttgaagcctatttatgaaaaggaattgatggcatatttgcaatccaaaaatggaggccatatttgttgggaagaaagtttgtagtgcggactgatcagcaaagtttaaagttcctactcgaataatgtattgttgccctagaataccaatgttggatggttaagctcatggggtacaatttgagatttagtacaagccagggacggaaaaccgagtttccgatgctttatcacgagttcaccaaccactgaatttaaaaatctacttgtttctcaaggtattgactgggtagcagtgcaacatgaagtgcaacaggatccatttttgaccagaatggttgctgatttacacaggagaggtcgagggcaactgggtcttctttggacatgggaaattaatgtaagattcctactattttgcgagaataccacaattctcatttgggtggacattcaggtgagaataaaacattttataagattgcttctaatttttattgggtgggaatgagaaaagtggtggatgataaggtacgagaatgtgaagtgtgccaaaaacataagactatgaatacttctcccgcaggttcgttgcagcctatagcattaccctcgctggtttgggatgaatttgactggatttcatagaagggttgccccattcgcatggcatggacactacaatggtggcggtggatagattgagtaaatacactcatttcataccactgaagcattcttttactgcccgtagtgttgctgaagtgtttttaaaagaggtggtccgacttctcggcattcctagttcaataatttcaaacagggacaaggttttcatgaatcacttttggcaagagctctttaagttgcaaggtacgaaacttcgacatagcactgcatatcatccccaaactgatgggtaaacagaagttgtgaattgttgtttggagacttacgctgttatgcgtcagatcagccacgagcttagatgtgttggctagcttgggctgagtattggtatccaagcacactctatttaaactattatatgggcgtgatcctcccgcgcttctttgttaccgaaagaatgcgactccagtgtcttcgatggatgaaatgttagaagagcgacatgcgcagctagatgaccttaaaatgcacttgcttcgagctcaacagaaaatgaaggatgtggcagataaaacgagaaaggctgaacaatttgcagttggtgaaaaggtgtttgccaagctcaaaccttatcgtcagaaatccttggcttctcgacgcaatgagaaactgtcacctcatttttatggaccatttgatgttttggcacgaataggggctgttgcctatagcttgctaccagccacttcctcggtgcatcccgtgttccatgtttcacaattgcagcgtgctcatggggtgactcattcttcttcattactgccaccacaactcagtcctgatttggagatgatagttgagccagctgaagtttttggtgtacggaacactcaatctgatggaatgggggaaatggaggtcttaatcttatggaaggacctgccaatgtttgaagctacttaggaaaactacaacaaattgctacagcaattccctcaattccaccttgaggataaggtgaaagtttgggcagcgggtaatgataagcctccaatttgttatacctatgctagaagatcttgcactaattgagatgagttattcagggaagtttatgattttttttgccttatgatttaattggaattatttgtttctgtttttgtgattagcttagagaagagaatgtgaggagggtcaggctttcgattcgtaatagagcagtagctctaggagagaaaccgggtctctcaaatatcctgggcaatttcttattttcaataaatactctatttctctatatacatttttcttatattttccttgcatctttttggtttggttcgatacacttctggtgtgtatcagaatggaccacaattgtttaaaaatcacaggactaggttttctctcaatattaatggcacatgtaattatatggaaaaaggagatgttatttctttggccctagacatattatgggtcgatgtcctgatggatttattaataccaagaaaaactcaatgagaaggtcgggattgggtcaaaccgatttgggccgaaattaatatatacacaatgggccttacagtattattttggcccaaaagagtaaaagtttaagacttggctttaagcccatgattgcggtggaattggggttgtcggcaagtgaaaaaggttaggaagagtccagattggtaggaggccttttaaggcattgagaagagaagttatgggccctattaataacaagctggccttggtggaaaaaaagaatccagtctaaataattcacgattttcttgatcgctgcctaagaaggattcgacctaagaaacgtgcaaattttagggatgcagccatcaattttcgggcagagtttgaagaactgatacaagaaataggatcatcagttctgcataattcagagaagatagaaccaaaagagttttttgaaaacgaacaattgaaagtctacccaaggaaaaggaagttaatatgcccaaaccgagaggaaactatcatgaaaaccttcagggattttcaatttgatgaattggaagaagatgaagatcctcgagaggaggaaatcggtgaatactttcccaaaaatgatggttcaaatgcagaatgtgacgactactctgaagggattggtgaaacatatgttgacatattaggcgatatcaaagaattgtggatcgagaaagacactatgatggctggagggacgtgtagcattggtggggatttaagtaggggtgatcatgaattggtttcgtctggactttcataatttttgaaccaaactagtataatggttttttaaatattggaaaccaaaccagactaataaatttctcaaaccaaaccattaagaacggtgtggtttgattcgaaaccatagtttaaatggaatttataattattcatattttttaagtaattgtattatttttactaagtttttaattttatttttcaaaatatatatttaacatgttaagtaataaatctataacatataaataactatataaaaacattctcaaaagtcaaacataacataaaaatctaaaattcatgcaataaaaaacttgacacacaaaaaaattcaaaattatgcatatagtcatatataagatatatataaatcaattatttattataaacagtccaatccgttttaaccattaactatttattacgaactgcaaccgaaccattatgcagtaaacggtctggattaaccagaccaccaataacagttttcccagttacgatctacagtagatcagattgtcgtggtctggatttaaaccgcaattttccagtttcgatgaacagccctagattcaagtgtaaaggaaccctcattatcctcatggccgaaggtatttgattccatggccgcgatggggatggaattaattattaaagaggaagtaatggctagaagtgaggcgaaagagctagcaaagagctagtagctaaaagaaaatgtaaggagttgaaaaaattgacttctaacattaactatgataaaagtctcaaaaaatcaaagttggacaaaaaattccaatgaaatttctcacctggaatataagaggtagtagggacaaggagaagagaagggctattatggcaaacaatgtataagttcaatccgaatatagcaattctacaagaagttaaaaaggaagtggtacgtaaaaaatttattggaagcatttggaaatctcagtttaaagcatggattctttttccatctatcgagaagtcaggggcacactgatgatttgggatactagaagcatcacagtgtttgattcaatggtggggaattctctatttcacttttgattcaagcaaaaggaaaagaacctccacggttttcaggtatttatgggccatgctcttataaagcaagacttgatttaagagatgagctttagatggtctcagttcattgtgtggagagtcatgatgaaacgagagtgattttaatgtggttagaagtgtccaagaaaaattgaatagcatttcatgcactacgagtatgaagatttttgatgaactagtgcgggaattacgattaattggtcccgaactgaataatggtgatttaattggtcaaattttagagtgaaacccatttttagtagattggatagattcttgttcgccaacaagtggaacataatctatcattatgttagacaagagatggtcgtgagattggtgtccgatcatagtttaataatacttgactcaaacccaccaaaatgtgaagttcctagtctactcgggttgcaacagcgtatggaacatgtgaatttggcacaggtgttagttaatagtagaggttggaagccagaatatggaggttctttctcatgtaaatctgcttttcaatggtttacttcaaaaggtaatgtaccagctaaagttaaggtatttgcctagttggtggctttgagaaaagcaaatgtgcatgcaattatgcaaaagagaagaccatatatggccttgtctcctgacaggtgtgtttgctgcaagtctagtagtgaaaccatagaacatttgttcttagaatgtacttacactgaaaaaatccggtcttcgttctacaaagaattcaagatggtttgggtgatgccttagttagtgtctcaagtgttgttgaataagtcgttaggtggcaaaaggagagtaaagttgttgaggactgcactattggtcattttgtgtgatgtttggaatgagagaaatagcagaatcttcgaaggaattaagaaatcaacggagaatgtttgggagggagtcagattttggacagtgacatgggtctttagaacgaaacattttgagaatatttccttcctagacttgtgtagggagtggagtctggtgatgtaaaaagacctgatgatttgttctgttttgttttgtgattttactttctgctattttgtactaaacttttgtttaacaaggtattcctccgccacaagtgaggttcttaatacataatggggaggggctagtataagagaagcagtctctttctcttttt

SEQ ID NO: 184203 - DNA, 4349 bp, Cannabis indica
gaatgttatttgttgagagtttttatttatttagtcagctactaatttaaattctatgatagaattttgataatttaatacaagggatgctctcctttttttaaataaaaaagttttccaaattttaaaagaagatttttttgagaattcccccctccgagctgtgaaatcctttatatgtaaccattttgttcccgaaagtagggccttttgcattccacaaatcaaaaaattacaaaaatacgatttatggaattttaaatatttttatattttttttattttattaaaaaaatacgtttatgttgtactcttgttaattttttgttatttatatattatttttttcttattatttagatgttattttcatattacttttatataatttttataaaaaatcgtaaaaatatataaaaaaaaattctaaaaatataattttttttaaaaataatacgtaattatcccttcaattttttttggttaagttaaacaataggcaaaataaatagattagacttatgaagaggagacgacgtcgtttatgacaattggctctctaagtaagtagtatgcaaaccaaactaacgtaacataggaaagaaagaaagaaagaaaggtgagattgtgcctttcaacgttcaaacttgttttggcagcccatccttcattgctattattaattctttcccagttttatttattttctataaatttcgtcgaaacttcactctttctccttgcttccaactacccctcttccctcttccactgggtcctttgctttcctatccaattcaatccatctcttcgctccatatttgattatttcaaattcaaggttagtactttcttcttctctctcttttacttctcatattactaggtttgtttttggtcagtaacgtcaccatagaattttttatgtcgtctgctaattacaaacaatttacaattgttcccttatattgagtttttcttttacctttacctgttgttacatttgggttattttaatttgttattactattaattattaagattttttttttcggctaagttcgatagatagatatttattgccccctatttaaagacttgaaatggttggtgtacccagttgcgtctggttggaaaggatgagtggatgtaatgggctttcattgaatttgcttttgtaaaatctgtcaattttcattttgccaatatctgtatggataaaggaatggtctggttgttatttttccatttaaattcatattgtgaacaattgaagaggtcttgttgaccattgtgctttaattttgaactttaaattcaagatttgtataatgataatctttttgagttgggacgaggggccatttggatttattgctctttgattaaggttttgagtgttgagtgttaattgagtttgtaatacttttggtataggacttggaagattttgggttcaagagcagagggatggctagtgggattggtggatcaccaagcaggccatcccaagacccttcttcctctgctaataacaatggtgatgcaggtagctttgaatgcaacatttgctttgagttagctcaagatccgattgtgaccttatgcggccatcttttttgctggccttgcctttacaaatggcttcaccttcactcacgttcgaaggattgcccagtttgcaaggcccttattgaggaggagaagttggttccattatatggtaggggaaagtcatcaactgatccaagatcaaagtcaattcctgatgataacattccacaccgtcccacggggcagaggccagaaactgcccctcccccagacccaaatgagtttcgtgatcattacggaatcatggcaggcatgggaggcatggcaggctttggaggttttgctccattggcaagtgctagaatagggaatttcacattgtctgcagcttttggtggtctaatcccatctttatttaatattcagatgcatggttttcctgatgctggaatgcacggtggcacaaccggttttcctcatgggttttctaatttatttcacggtggcaatgtgcataggtaccataggcacccaactcaaggacaacaggattattttctgaaaaggctgcttgtgtttgttttattatgcgtcattcttgctcttttgtggcagtagattaagaacgctgtcacggctgaaattgctaacggtggttacctagggtaagcatatctttaaatctgttagcacatcttgtccttgattttctttttctactagtattctattccaggagatgatcacatagtgatttagagaagctttttattttctgttgttgtttatgtttttcatcagtatgtgaaatatggcttcgtgtgttcgttgtttgtagtagatgtaaactaatgtatatgtatacacaatgttgttgatgggcgaaattttgtgtgttctcttcactaggatagataagtgctgttgtggtagtcatgtaactcttatgccattttgctgttttgttttttcttcttcttaggttgtggtgaatttcacaaactagcttgttgatttatgaaacggattctactatttctgaagttgctttcttcgaatcgttgatattggagttaaattttcttagttgtgtagtgttttgctttcttcttcattgacaagagcaaggactgcgaatcaaatgctagtttttttagggtgcatgttaagattttggtaaatacaaatgatttcagttttaataggatatcataaaattagctttctttaatgtaaggttattgacatttttgtgttactgcaagagcaatggagaggtggttcttgttttggttgaatgtcaatacatagtgttgtgcaaagttcgttttggggttggttccgatcgacggtagacagttctgtttttcacactaatctttgaaatgtagctcagttttctcgtttctgtgttgaaatactactatatttgtgttttcatcaatctattgtttatatagaagatttaaaagcttaaaataatgaaattctggtttaagatagtttactaattgaatagggaagatattagcatgaaacattttaaatgatcgaactatattcaaattcattgttttggtcggtttcgtaaatgttgtagcaaaatctgagtctttacattaccatctgtgatcctaaccttcaaattttgcattctattttttatactttcaaataatttttatagttcaaacttcaaactccaataatgttaatttcaacattaacttggttattgttattaggctttccaatacatttaaattccctacttatcagattgttgtaacatttttatgttaactatagtaatttatcatcttctgcacttaccaaaatacattaacatgcagagaaagaagctattcaagttcaaaattccaattcatcaagtccattttcatgatttccctctttcattaactttttttcaagcactgattgttcattaggtttcaaaactcgctaaaacaaatggcatcctttgaatgtgagggcacgcgcgcgcacacacacacatgtactagtattttttttatttaagcgtttatatattacacaatgtataacttaggactcgaaccctcttatggtcacttgaactagcctcaagttacgtactagttagaatctacgtgcattacgttatatttgttgtgccaatagttaaaattaaaatatggtcaagaaatcaacatctttaaaatcaacatatttagttcataaatgttagcttaaaaagaaaatgtagtccaattaactatgaagaatatagtccacatgaaattgattgtatacatttaagtattcatgcacttgttccattaaaaattcgttcaagcacgcaataaaactctgctctaaaggttgagatgcaaattttttttttgtttttaaagaagaaatagctaaaactatccatagtattgataatttatttgttattttaactcacaagctgtcagtttgtcaaaaaaaaaaagaagaaaaattcacaaggcagtttgcttgtgaagggaaacacgtacaagaacccaaaaaagaaaaacaactatgacttgtatcaattatttccaatagacaactacaaaatcactaataagagagtgacacattaaacttaaaataaaagagaaataagcaactaaaactaatagaagtaaggaactgctatgcatgcatgacacaaacttccaatcaaaacttcttctgctacatcaaatattaaccaaactttggttgtataacagtaaatagtatagtgcatgtgcatgcaatctcaaatttcttagca

SEQ ID NO: 184204 - DNA, 3235 bp, Cannabis indica
ttttttttggtgttcatcaatgatcagttgtgagaatttgagagctctgttctaaaatggaaggaagatgctgcttaactctaattattagtcaggcttgattttttgtttttttaagctctactagtaatgtcttgtctatttttattattattattattattatttatttattttatatatatttttctcttaggagtgctattttattgtcaatcataattcatggatacaaaaaatgtatagttttgtagaatttgatgtatatcagcactaaacagtagacttttggattgatttgcatgcatatataattttgtacagtttgcttttgttgcaagttgaatggttattgttaaaatatgttttacaaatttaagaatatttcgttcgttaatttaatttcatacatttaaatgttcaggtttaaatgtctacaccaaatcaagaacagaaaacaataacagcaaagcaacaagaagaataaaatcaaaacaaaaacaatataactgaaatgcaaaccagaaatgcttggtttcaacagacaaaaaacaaaaagctttgttggctgatccaaagaagaggtcagccacattaatggcttagaattttctattaaatcttcaaaagagtgataccaattcgagttacaagagccttagctttttagattacaaagctttgacatccctccgattcaccctctaaagacttgggaaaattcagtaaatgaaatgggataggactctatatataggctaggacagaaactcaaaaaactaacaaatattttcctttagagatcaattaacaaaactaatatgacatgaatcatcaccacaagatataatttacaaaaatttgtttgatgcaaatatgaccatctgtttaatgcctgctcctcaggaaagaagacaccatctgtctatcctcttgtgctaaacacaatatgaaaccacacttattttcctatgagaactgtttaatgtgctaatgtagtttaaatattttaattctattctatatttctcctaaaaatattgtctcataaacatgttttgcattacatgttttcttgtgaaccccaaaaatcgttgtcgtttaattgtctaaacattatcgtaattcctagctcactaactctgaaaagttcattgaaatcaagcacacccaaaccttgatggtaagtacaattactcattttattaagtacggttttacaattacgaattaatacttggtgtcattttcatttaaccttgattgaattgaagctaagctaccgactttagttataatatacatttttgtggttttttgttaatttgagaaacctatgactccataaataatgatagacacacgcttattgggtatattcttttggatgtgtttgaaaaaattggtgaaagagtataatctcaaaagattgtagattttatacgggcaaagaaaatggaccaaaagatgtttaagataattaggagttatgattagtcaaaactattactagtgatgttcaggagatgcaaataagaaatgaaagtgtgaaggaatgacttaataaactcaaagaaacttcccatgagctagagaacttaataaatgagataataattgatattttgtaaagcaaggtgaaaagtgagcctcgaagtagctgtgaaagtaatgaactttcaattattttaggtgacaaagtagaacccaaaataagaaagctagaaaaagtataaggcaatttaattaaaaaatatgttcttaatttaagaaaggggttatgaatggagtatttagatgattccttgcctcttggtgcaagaatgtaatatcttaggtaagacttttgacaagaatcatattgcctttagacttttgacaagaattatattattgttggatagttaatttcaaatgtatacaatattgtccttcctatactagaaatgaatgggattaggaagaatttaggtcaactcatttacaatgatgatagagtgaaagattatttcaatattatcgagtatgataaatttaaggtagcattgccaagtaaaaaaaaatgagtctagaatataaatgctattataatgagtctcaatgacttctatcaactccaagttaacttgaaatactttttgaccggtaattctttattccgtaaataacacatggaacaaaattacaacaggtgggattgttttttaaaaagtatgttttgagttaagaacttaggaaaatgaaatcataattaataatagaagtgaagttatagcatcaaaaatgtgttaggccacaacctatcacctgcaagcactatccaataataattgttgatccttatttgctaaacacacctttaataataagcaaaatttacgtgaacattcaaatttagaaacaattgataggttgattattacactttacaataatatgctattggcaaggaaatcaattaatgggcttttgatttcataattaaatctaaggaaaagaaatattttacttaaagagcaacatatggaaattatccaagatagaaagtaatattattctagttttatggttaagttactattatgtgtcaccacatctaagagatgattcacgtattgctcaaaactatccgagtattactaatttgagcaaaacgaattagtttggatgtggataggagaagatattttgtaaatagagaaagagaaacaaaaatagaagaagttgggaaagattactttgagcatcttgtagttaggttattgatccaaaaatcaagaataacactagtttcattatgcatggattagttaatgacttagcacaatttagcttggagaattttacgtaggttaaaagtgatgaatttagtagaattgtaaacaacattactcttcatttgtcgttttgtaaaaggagatattgacaatgtaatgtaatgtatggactttgctaaaataatgtctctacaaataattttgtcattagaatacctggaggttggcgaggagcttgtatggaacgaatagttattagataaactcttgacatcaactaaatatttgcgagttcttttagaacaataatatttagaactgcatacatcttaaatttgctatccaataatatgattcttgtcaaaaactcttacacgtaggatatcacattcttacaccaaacgacaaggtaatgatctaaatgctctatttctaatacaagaactctttgagcagag

SEQ ID NO: 184205 - DNA, 5267 bp, Cannabis indica
aaaaaggttgctaaaagacatcactatggttttgtgtttaatctcattatgaatgaaggagaaactacaataaaactttctaataaatgaaaaagtttttggaatgctttctataaacctatgaatgtgtaatatggattaaacgaatttcacttaacctccaatgcaaaatttaaatttgtagaatttaatgagaaaaaattaagagttatttttttttttttttatttggcaatgcatatttaggttatggatttttaattttctttatatttttatggacattctaaatgtcatatttttgtaaaataattttcaaataccatagtttaaattttttcttaattttattgttagcattaaaaaataaaaaatcatcaaaccttgtcttcttccacaagccatcttgagtctcgatccctcgaataattttttttaatctagacccctcgaagcttcgaccaaatccctcccattgtcaacctattaaagctcatcaagaagtatgagatgccctcgtcaagcttgttcgtttctacggttgcagtggtaggttcaaataagcctgttaaagaaattgaatccaatcatgagctggcataggagtagtggctgcactggatgagggaatcccaaggctatgcaatcattgtttaatcattacattttctcaacttttcgttgggccttatattctgtatatttgctttaacacgtgtaatgtctttattggcttatgttttcccttgcaatgtcctactctgctgtataatgaaatgctactcactcactcatttcttgagctaagttttccattcaaaatgctattctcttaaatcttctcttgatatcagagtgacttcttggcctccgccaatgtcaacatgtcaaagccaaactacactaggaaacgtcggtggtggaaactcttaaggaaactccatgactcagactagttctgccatggctggtgctccattaacactgtcaactccctttagtaataccttgagccaaccatttaccgtcaagcttggcaggaacaactttcccttgtggaaaacaatagtttataccataatcagagatcacaggttagagggatatctcaatggtcaaaaaccatgtccaaacgaagtcatctcagtcgagagaatagctaagaatgaggttgttgtcactgaacttcagccaaacccaaagtttgaggcatggattgtgcatgaccagctcctaatgggctggctttacgaatccatgtctgaaagcattgcatcaaaagtaatgggttgcaaattggcatctgctctttggacagctctgaaggagctttatggagctcactcaaaggctaacatggattatttgtgcaccaaacttaaactacaagaaaaggagcccaaccaatgactgactacttaaagatgaaacgaatgtgggctgattcactagcccttgctggtgatccctgtccagaaaagcatctcatatcaaatgtgctgtctggaattgatatggagtgcctctccattgtgcttctccttgagcatcgaacagatctaacctggcaagagttgcagggatctcttctcagctttgacagtaaacttgaacgactgggagctgtctctcgaactagcaagacactgggcaatccctatgcaagtttggcttaacgacccaaccatcctaacaacagaggaaaccaatcttgaagaggaaataaatacaacaataatcaaggtcgtggaagtcaatatcaaggcaacacatctagaggcaacaacaataacaacaacaacaacaacagcaatcgtggaagagggagatataatagggaaaactcgagaccatcttgtcaactctgtggaaagtttggtcactcaccagttgtgtgctactataggtataatgataattacatgggccaaccaccacaaggtgacaatcagcaaacacaggataaaaattcccagatgacagcactggttgctactcctcagatcctgaacgatgatgcttagtatgctgacagtggagctacaaatcatctcactccaaaatttgggaaaatgaccaacaaaacagagtatcatggtaaggattaaatgataataggtgatccaacaagcttgaaattgctcatgttggtactggttcattaaataccacaaattctacttctcttgttctaaatgatttacttcattttccctctattacatagaacgtgattagtgttttaaaactaactagtgacaacaatgtatctattgagtttttccttgatctttgttctgtgaaggacctaacaacagggaaggaggtgttgcaaggaacacataaagatggtctctaccaacttggttccacttcaaccaattcttgtacttccacgacctctgaaatttatttgtctagtgcctccacttggtctagtgtgtctagttttaactccctaaaagatacatggcatagatgcctagatcatccatctagttatgtattgaatcaagtgttaaaattgtctcatgtaccttttaatgctaatgaaacaacaattttgatgcttgccaatttggcaaagcttagtgacagtctctgcctttccctacatcaacaagtcatgcttctcaagttttagaactaatacacgcggacttgtgggggcctgccccaattgcctcacacactaactacaaatactatattcattttctagatgactatagtagatatacatggctatttccactcaaataaaaatctgatgcattatcgacttttgttcactttaaaagactagctgaaaattaatttgaaaagaaaattaaacaattaagaactgactgggtggtgaatttcaagctttcttagatttagtcagtgaacatgatatctactttcatcacagctgtccacacacctcagaacaaaatggtagggtcgaacgtaaacacagacacgtagtagaaactagattggctctccttgctcaagccaaaatgccccttaaatattggttagatgcattttaaactgcagtgtatctaatcaatagactccctactactgtccttaaggaaaagtcacccttttaaacactattctctaaagtccctgattacaagtttctaaaagtttttggtgtttcttacttcccctgtatctgaccttatcaaagtcacaagtttgagtttcactctgttaaatgtgttaatttgggttatagtgtggttcattaaggctataaatgccttagtccacacggtcgaatctatatcacaaggcatatgatttttaatgaaaatgaattccccttctcctttggttttctcaacactagacaacctgaacaatttatcactatgaccactccacagtcctggttcacattgcctgttgttcctctgtcctttcaatcccatcctcctattccatcttcaagtgttcatgtagcatcaccaaccccaacctcactaacttcctctgtaagtgactccttttccattgttggctcccctatttctttccctgctgctgatcctgcagaagctactattgcttctccttcatttcttcctgagtcccttgagagtcctgctagtagctcagtccctgctccacttcaggtcactcatcccatgacaccaggggcaaggttggcatcaaagacctggccttgattttggtgaaacttttagtccagttgttaaagctacaatagtgcgagtagttctcaccttagctgctgcttatgactgggaagtgagacaagttgacatcaacaatgcattcctcagtggagtggttgatgaagatgtttttatgatgtagcccctagctttgaagaccccttaaaaatctcattatgggtgcaaataacacaactctatttatggttgaaaataggctccaagagtctggtatgaacatctaaggacaacacttattcagtggggtttcaaaaactccatggctgactcatctttcttcatacttaaacactcaaaatttgtcatcatgactcttacttatgttgatgatatagttgttacaggaagttgtccaagccaaatcaacactttcatcaccaaaccaacaagactttctctccaaaggatttgggaccattacaatactttctgggcattaaagtttacagggacaacactagactatacttgtccaagagcaaatatataactgagcttcttcaaaaggtcaaaatggaacacacaaaacctagtgttactccaatcacagtaggaaaaactttgtctataacagatggtacatctctcagtgaaccaaccaactacatgagtgtaataggagccttgcaatacctcagccataccaggcctgccatttattttactgtcaataagcctagccaattccataaacaacccattgttgtgcactggggagcaactaagagtattagatatctcaagggtacaatgcatcatggattacacatacatccaagcactaatacgacattgattggcttctctgatgttgattgggcatgttgcccagatgacaggaagtctgttgtagggtactatgtgttcttaggagatgctttgatctcctggtcatcaaagaaacagacagtcgtggctaggagcaacacagagtctgatatagagctctttctcaactacctgcagaaatttcatggcttcaagagctattgaatgaactcaaattcaaatgctcatcgacacctgtcatctggtgtgacaatttgagtgcaagtgcactggctacaaaccctgtctatcatgctcgaacgaaacacattgaactcaatgttcactttgtgagaaacaaagtcttggagaagaaactggagattttgttccttatttcttgtagaaacatatacaacatatctagtatacctttaatcaaataattatactcagtctaggttatcatattaaaacatatacaaataaattcaataaatttaaaacacatcaaattactaaattaattgggagaattttcaataacaaaaactaaatatgatttatttttaacattctctagatgctactctcttataattattatagattatatatatatatattattttctttataataatatatgtataatttaagaattatatatatacatagttctaattagccactaaagtaaaaatatgttacatgtatatatatgtctaccatatatgtataattaaaaaaatattattcgttatgtcaatattgtcatataat

SEQ ID NO: 184206 - DNA, 2190 bp, Cannabis indica
gtttattaattagagaatcagaaatatttttgaaaaatatatttgtattttttttcctaaatcaaaatttttaaagataaaaataagttagtttcaaattttagttaaataattttttaatcagaatttattttatattatctttttattcacttcattttcttcaacttcatttcacttgaatagaaaaataataaaaaattaccaaatatatttttatttttttcataaattaaaaaataataatgaaaaaggtatttcaatttttatatatatttagaaacaaaaaaaaacttatacaattattactcttatgttttttatttgtgtatttatatctgcccgactgcccgagtattttttaaattaaaaagtttaatagtcaagtcaacttaagtaacaatttaagaaacacaagttatatttcttatcgaatcaaatttcaacttaataattaacattaaaaatacttttcaaataataaatatcacaaagtccaatttatacgtttacgttgtatctaaatgtgtgaaccaaatttgtgtactagtgaatttataacaacgttttcctaatgtgataaagtaaaaccgaagattactaaattaatttttaattgtgacatgtgctatcaagtactagaaatggttggtatgaacgacagcttcttatcaatataggataggcataaccaaaatacagagtgttttttgcctacaactttaacataactgctcactaatatataaaagttaatctataattagtaatatcaagaaccattttagggaactaaatgaattattttttaacggttgaatggaattaaatgaattatcttttaacaaataaaaaatctttatttatatcaagatagttcatgtttcaacagaatatttttaacaggtgttttaaaatagctaaaaaagttataaaatgttcaatccgtcaactgagctattaaacttcaatcttctacctcaatctacaaatgggctcaatcttttacctcatgtacacggcttggccacatatggctaaagttttatcataaggcataattgtttttgaccttttttcattttatatattcacacagtggccgacctacattggaataaggagagacaattgacacccctaactttttttaaaatatatatagataggtgtgtgaagatatatcatatgttacaaatgtggagtgctctaagagtatgttttatattattttaagtttgcaatcagtgtaacatcctcgaattaggatagtttattgttcaaccgaattgtattttttgtcaaactataaattgctaaattcttaactcaaattaaataggacaaaattactatcataatttagattataaagttataacgtattcaaatagcatactaagtatattgaattaccctttccattattaatagttgttgctagagctagccaatttaaaaaaaaaaaaaaacatcataataccaaaccaaaaatataattatattaaaatgacaatcttcaaaataaatattaatatacaaacttagatgtattgaaatacattttaataaatgagattcaacttaaataaaaataatttattgtaattatttggccatgtatgccaaatattcttgtgatttcagagtaattattcgtgaaatttagagaattataagtttaaacccctgtaaacacgtcttttcagagtaatgtgctggatgatcttctccatgccgcatttaatgcgtatacaatgactttaatctcatgtagtgtgttatgctctactcatccttttgcactttcttcgagtcgaactcacttacaaagaggaagagaaccgaaacctctcgtcctccaggtagactttcctggagatgaccaatcctttacaattattgtgaaaatagcaacctctgaaagtaattagaggtggcacatcttatagtgtcggtcccgttagtatgtgatttgctcttgaactgtagagttgttcatcgaaaacggaaaactgtggtataaattcggaccgtgagaatctgaaccaattgtatcataaccggggaaatcatttttggtggtctggttaatctggactataatggttcggttacggttcgtaatacatagttaacggttaaaccggacccgaccgtttataattaataattgatttatatatattt

SEQ ID NO: 184207 - DNA, 4023 bp, Cannabis indica
tcccatatttttaaaaatagcccgtttggatatgtctaaagaacccatattgtaccttacaaagcttgatcgaaatcgagaaaagtaggccataccagcccatacttgtaaacccaaataaatgggcccgacccggaagcccatctttatgctgtcaacagtgaataaacaaagtaaacgaaacatggcgggctaagaccaaactgtattttcaaagttcaaatcaaaacatctctttagtttctctctcttccactgcactctcttctgcaagtctctctctttctagaaatcgatagcagtgctatggagccgatatggacgaggatggagtcgctgcgtatggcctgcgacagagacaaactagctaagcagcacaagatcgacgcctgggcagactcgtttagagaatcccgaacgttgatccacaccaaaggacaagaaaccatcaaatgtcaaggtactcattttcacgacccccgaccgaattcttactcattcttatgctctcaattaggggttttgagactgaagttggacattgagttagggtttatgatgggtcgatttcggatttgttttttttttattcaatttcatgcgcaattttacaggtaaacttgcggaggttaagagtaagttgagggaggcagaagatgatttggtgaaagcactatcaggtatatgtaattctgctaataagcatttgagtttgaaagttggtttttttcgctgattgatgtggaaattaatgctgcatttgtttaattaattcaagtttcagtgtgaagtaaaacaattcccacttttttttttcttttttcttgctttgttatgaggataacatttcaatcttgtttgtgtttcgtttttcattcctgattggtgtttatataatatcttttattgttattttctagtgaagaaccgtaaagaggccaagcgcattgccattgtggaatctcttgctgctaaaaaaaacagtgtggaagaacttaaaagacatgttcaagatcagagggctaagagagatgaatatgctgaaattgtttctgatctatcttcaggtattcccttttatgccaaacaggcccttgaacttgtacatttcctttgggaaatcttgtggcttgtaattaattattgagcgaacagtctgaaccttccctcagttgtgtaaagttattatttttttagtactctcatcacttattttgtcctggttgatgtgattttctttttggcagtatctgaagaaacaggtagccaaaatgataaagatgaaatacaggaagccctctcttggtacaatagggttcttggtttccatgttgaaggcgggcatggtaatgtagattttgaggctttttaaatctgcaacaaatgttccttccccctccttttttttttgaagaaagacatgtaatgcttacatctgtttggtaggtgtgaaattcgtattcaagaacattagtttgaaaaatccaaatgaggaatattcattcaccattcgccatgctgacaatatttactactgtaagtgagatattgtcatttgttagcaatgttaaattatttaaagccaactaattttctgcattttggccctttcccctctgctcccttgtttgcatttccagtgttagattgcaatccacacttgaatgacatcaaggagttggtccatgaattgaacagaacaaatgggttatttgcatttgtcagaataatgaggcagaagtttcaagaagttgccgcccaaggtaaaatcctctacgtttataagtgaaaaacttgtggagtttgtgttctgtcctcatggatgatacggtagttgcttcaagtaataatattaagaaataacttactgtgtcctcttatcgctgtgcgtttctttcatactgattcttccactttgattaaatgactgtgtccataacatgtttttattttgatttatgattcagtaggatatttacctgagacaacaagtcttcctcaagagtcttctatagtttctgcctctgcaccagcttcgtcagcttcaactgatagaagtgaatctttgcctaagaaaaatgaacaccaacttccccatggtgaagttgatagacagagcaagaaacaaaacagaggaaagggctttaacaatgtacttgtatcgcctggatctgctcgccgctctcctcgttttttggtataatttcgctaaacatgcacatgtgttcttgtatgtttacagtaatgatatttgatggatcagatagatgcatagtatcttgcctactgctattaatgcgattaaaattaatgtcttccatgtattttacttttaacttgtagaatagggttatagtctgggatatttgctagctaaaatttccgtcgtcagcctaaaaaaactactattgtatttttacaccccgcctttttttagcatctttttctttgtttctttaagattctttataaagctgctcggtagggattttcagtcatatgaaagttgtatacatccgtggtgtgactgcatcattttacatggagaaatcttgatgatttgattgtaagtttgcgacattttgcagggcaaaaaatgatggtggagaagaggctgctgtcccctctcagtaaatgcaagcgtgtttacaacattctgatctgtgttggtcataacttatgactcgtgtgctttacagctgatacttaaaaaaggcaggaagctttaacaaaaaaccatcatgcgcatgctacatagtgccctttttcacttctatattttttgtgtatggaattattttaatagctagtggaatgtaagggtgacaatccccagagttctaatttctggacctctatattctttcattttgccatttttgtagcctagccgtttctaagcttaatttaaaaggtttgattagtgatttaaatgcaaggattcaaggaacaattttatgtgaatttcttcattgtataaataaaatgtaaccatagtactgtgttctctctctctctctctcgtataatttatatatatagtgattattcaaagggcatgcagaatataatgctctttatttttgaagggaaataggttttcctctgaattatatagtgttgtcctctgaatttttttgccaagttaaaaatctttcgaatcataacaactcttaatatagtacaccatcttagttgaattatccatttttctatctccatctgtggtattcttctagcattgtcataaaatgcaatggtgtctaacacttattatcattggtgtaagtgtagtagatttcatataatttgagttaaataaatttaaaaatataattatgggagatttattaatacacaaaaaacgatacaggatgttgcacaccctagtgtagtgtgcacttggcagctcctcatgttggttttacattattgaaccaaattgtatttcttttttacaacaaaggtaccattaaaaaagaaaatgattttatttataaaagtatcataaaaaaagaagaattacagcctcgagacgagaatgaaatggggatgtttttaggaatctagaagggtggggaaaatatttggagtcccttgttttgttattaccattattattattttcaattttcatcatgtacttttaaaataatctattaaaggcttgtgtagtgagccactcgtggcatgaacaataaataagctttatatacatggcttggcttgattggctgctgtaaaatgatacgtgttttagagttttaaatgacataatcgtctgcgtagtaaagctcgagtttgcttccacaacttatgtgcttcggattcatcattggctagaggtgagcagctactctcgttgcaatctacaaagtactttccacttacaccttctgtttgaggactcaaagcaacatagcaagtagttgatgcaccctgccacaccatataattacacccctttaaaccactacaccaaaactacttcattgtatagtacatatagtgttatgtttgtgt

SEQ ID NO: 184208 - DNA, 3812 bp, Cannabis indica
aaaaaaaaaaaaaaagcttttagatttattttataaaaatacttttaaatataaacatattatcatgtcgaatttaaagctaattaactttttatttatatatccattcaaaagaaaaaatatatattttttaaatggtcccagcccaccatcaaagggaagacctctaagtaggggaggaggacatagaaaacctgtactcattcattacttgcttcatgcaatacaagagattgaaaacaaagaggatagtcgggccaccaaaccttactaacagtctccaataaagcatacttagctaaaatgtgaaccgtcatattaggagttctaggacaatgcaccacacttaacacattaaaattattaaaagacaaactaaaataatttaagaaaagtcctaaagaagactccaacaatatatgattgttaaatttggacaccaaattaaaacaattcaaataaaaaatacaatttttaaatctaaataaacaacattgagcacccgcacttttaagagccaaagtttcaacggttttaggtaagaaacctccatccaagaaccaagaagtcaaatccaacacctctccttgatcattcctgacaatcatgcccaaccaacaacacccactagcctagtccaaactagcattaatgttagcttttacgaatcctaaaggacgcgatgacaaagaggggtgttgaacagtagcagtcagctcctctccatcatatataacaacgactttcctttaatatgcagtcaagaaatcataagcccatgttaccaccaggccaggagggataagtttattattatgaacccatttatgttttcaaagccagactctccataagacaaccaaaattaattcaatctgatgcttgggaagagagtcaataaagatttgaataaaataaaaaaaaatccttacaagaagtaaacaaatcatctagttgaaaatcacaaagcttacgacactgagcaagagaagagcaggcccacaaagcatgatgtgtagtctctaattgatcatcacaaaccgggcacacaccatcattcaagagaccatgactaatgagatttttcctagtgggactagtcagaagaaatctgccgagcaaaagatttaaccttaggaggaatattgagatcccaaagtttcttccatctacccgaataaccaatagaagaagaagatctatcaagaccctccttatgaagcgcaaactagtaaccactcttcacactgtataaacccgaatctttatggccccaaatcatcttatcacacgttggatgaaaaggccaaggaaaagtaagaatagaagcagcttcatcaagaaaaaaggtcacgaactaaatttacattccaaccttcgctagaagtccgaaggagagtcatcatactatcttctccaagaacactaggagacaaaatttgaggcccaaaccctgaaggaatcgaagcatctttataaatgcgaatttgactaccatctctcaccctccacaaagcttttaaatcaaagagttcttttcctcaaagaatgttcctccaaacataacaaccttttattgaagaagaaatggacccaaaagatttatttttataataaaaacctttcaacaccatagaagtcaggagttgggagcattataaagcatcaaagcttgtttagccaacaaagcttaattaaagagatgtacgttcctaaaacccataccaccatcattcctctgccaacataatttttctcaagtacaccaatgcatcttcatattcacatcattactaccccagcagaactaaaaagacattctatgaatatccttcacaaaacgcttaggaagtttaaagagattcatggtatatgtaggaatagattggataaccgccttaaggagcacttctctgcctgccattgaaaaatacttagccttccaactataaggtttgttccaaatacaatcacgaactgaatcaaataaagcagatttattgtgccctgcaaaacaaggaagacccaaatatttctcatgacactcaacttccacaacttgaagagtattccccttcccaatcttcatctaaaatattgaaacttaaacaaactgcaaatttgtcaaaattcacactttggcctaaagaaccaccatacaaagagagaagaacttcagacacgctggaacggaaccttttaacaaaaacaagctatcgtcatcaaataatatgtgagaaattaccgttcctgaagtttcacaaggaaacccactcaacgaactattatcacaatcctatttaactaaagcaattaaaccttcaacacaaaggaagaacagataaggcgacatgatctccctaccttaattccctctcaggcctaaaatcctccattcaacaagatagaataatactccacaaaagatatacaatcaagaattttttatattcattccacataaaatcccaacttgggcatcattttttcaagataacacccccaatttttttttatttggatgagacttcttagatttaattataatatttaaacaaaattaaatttagatatctatttaatattttcacaaattacgaagtccagtaattaacaagatagtattagtaggactagatgaacaagttgaatattcctaattaaaatctcaaaatgacaaatcttaaacacaatataaaacgattttaggaacagagatttgataacaaacaaaatatgtcgttatcaagcttttaaattacataaatacatagtcttgtcttttgacatggtaggactgtcttgttgatcgtttgttcttttttctggtcttgtttcttttgttgtgttgattttcttcagagtgattatggaacctcggcaacatactggaggggatatgaataggaaatatgcatcaatgaacttgggacaggaagatgaagaatttttgatgtacgatgatagctcaaaagatatatttaagattgatgatcgatggtgtttggttggaaggtttcttacgaaccgtataatcgatttccaagcgatgcaacataagatagcttcactatagcgactagttctgggtatgattattaaaaaattagatccaaatcaattttgtttttcaattttatcatgaaatggatatcgaatgtgttatggaggatatccatggacctttgatcggatacctctaatttttgaaagattaaacattggggaaaatccacattttataactctgaataaatttaaattatgggttcaattctacaacaggatttctggcttcatattagaacgagtagtacaggatcttgggaattatatgggagcgtggagagaatttttaagggcgtgagtccaggtttgatttgatttaccattgaaaaaaagaggaagttatagctgaaaatgtcccatcttgcaatgtgaaattcaagtatgaagacttaacagctttctactttgtgtgtggcattcttggccattcgaaacatttttgcaaaaaagctttcgatacaccagaccattttcttactaaaccttatgggcttgaattaaaagtagcttcgagaaggaccccataccattggtgcgcaatgggtgaagatagaattagctacaaaatccaacagcttaggaatttctaatcccagagtatcaacgatggtcaaactagaagtagccataaatgagcaatcacgagtggaaggaattcaaagagaaaatctggagtttcatgaaaattgggtgagggagagaaatcatgaggaaataagggataataatgtaatgagattggt

SEQ ID NO: 184209 - DNA, 3575 bp, Cannabis indica
gtatacattcaatactattgtaatgtgatttatgttttttgatgagtatttgaattagaggaacttagtttggatatgttgcacattctcattctgacatgtattttgctgttttgtttagaaaaatatttgcaggaaagttggcctaaggtgaaatctgctttgaaagaccatggtgtttcgtgtgaactaaatctggtaggttattgttgtagtagtaaatagtgttctaaagtcactctcttttagttattggcaaaccatatgagaattttgtgctgctgattaattatatgaataatatacgataccggaatacaaatcagaaacactttaccacaagtgttcttgatagatttaggtctgcctgttggtttattgtggttcttaattgttggccaggttgacggttctatgacagttacaactaccagaaagactagagacccgtatataattgtcaaggctagggatcttattaagcttttgtcaagaagtgtgcctgttgctcaggtatagattatcataaattttctcacttgaatttgtattttaactagatttatttttattttatgtatgttgatatgagggttacttacttttaattgtattcatctaaatgttcatctataatttcaatgcaggctataaaaatactgaacgatgaaatgcaatgtgatgtcattaagattgggaatttggttcggaataaggtgcgctatatgtatgattaaaatagtttataaaagatgacttctttgaaatcttacagaaacaagtgctgtagtgatgtgtgtctaaattaaaaaaaaaaacaaagagagaacaatgcaagcttgtttatctcatttcggacaaaatcaattaactgtgcccgttttcaataggttgttttaagttgatttccatgtgcactgtgcagtgatcatgaaactatgttttttaggtattgttagtaaagtagatgtatatttatctgtgtcttttctttgaattatcattagttgatgttgtgtttccttcttaattctaatggattgagcgcttagttgtgttttacttctctagtggcaaagacatgattttataaaatttaatatttttgaggttgaaagatgtaacacaaaggatattaatgcccaaactgcacatacatatatattagaagaaaagtaatcaataccagactaaattgttgataaatctgttctttatgcaaatggatcagttaagagctgtagttttcaaacgtgacaaacactattaaaatgtagtattttcaagattgtgaccaccttagatttattacctgagatttttgtttaggtgtgtactcttttggtattgaaaatattatagttgaagttgtgcaatatggtatgtgccatgtggtaatggatttctttcatgaataaagctctctttctttctttctttctctccctctactggctggttggggagtgcaaatttttaaaatactatcagacctcaaaattcatttaatcggtggttggtgggctaatggtatgcaggaacggtttgttaaacgaaggcaacatcttatcggtcccaattcttccactttaaaggtgtgtttctttattttaatatgatatgttagctgttatctgtacttaagaaataaagtatgttatctgttttttttcttcagataaatgaatattatctgtgactattagatgcttttcaatattggatactgatgttacacatgtttatttaatggcttgcaggcacttgaaatactaactggatgctatattctggttcaagtaattatccaatttccttattatttcatgtgtcatatgccaaggctctgtataattaataaaatgattttttgttgttgttgttgttgatgctaaatgaatagggaaacactgttgctgccatgggttcatttaaaggtttaaagcaagttaggaagatagtggaagattgcattcaaaataaaatgcatcccgtgtaccatattaaggtacatatcttggtaattttacttatatattgttgacttttcatcggtactcaacctcttgcttctcattttgtagattttgatgatgaggaaagagcttgaaaaagatcctgctcttgcaaatgaaaactgggataggtttcttccaaaattcaagaagtacgacatattctctcttcgccttttttttgggtgcttgttatgtgctatttactgaacttatttttgtttctctaggaaaaatgttcagcaaaagaaagttaaaagtaaggagaagaaaccatatacaccattccctcctcctcaacaacctagcaaggtgcgtgattactactcggttcttgaaagggtttaatagcatcgttcatttgtttatgttgaataaaatcacaatgtactgattgcatgttagctttttgtttctgatagtggatgcaaatatacatgtaatcgagtttttttgttattaaagggataaacatatattaacaagtcatgtttgaaaaatatgtaaaaacagattgatatgcaattggaaactggagaatatttcttgagtgacaagacaaaatcagcaaagaagtggcaggagaagcaggagaagcaagcagaaaagactgccgaaaccaaaagaaaacgagacgctgcatatattgcacccgaggtattaaaagatagctcttccttccataattttttgggtagttttctgagaatgtgttgtaaaatattggtgtatgtatatgtttcaggaacccataaagcaagatagcaatgtaaaaaataatgacaaggaagatgtggctgcaatggctacttccttaaaggtaacacaataagataatgagaatgtatttcacaatgaaaaccccaaatggggattttttaattttttaactaacaaaaatttcatttttatttcgatagaaaaaagctaaggagtttggaaaacaaaaattggctgaaaatgtggatgcagaggcatatatagcagaagccggaggagaaaaacctaagaaaaagaaatccaaacacaggcattcttaactaagcatgttaggatggatggcggttccattgtaaccgaaaaccgacatggtttcaagatatgtttgttagggactgatttcgagttactgtaaaagttttgaccgatcttaaaagtgtagcttaaatggtcaaaatgttttgagtctattaggtgtttacatggtaattgttatagttttctctggtctctgtacggacaagtgtctagttaaaaagaaaaaaagactgattgaaccaagttatgatttttattattttctctgcaaaaaaatgaactattgccaggcatgatggagtggcattggtgggtaaattacatattagtttaagggatatttgtagctaaatctccttaattaaaaagttactataaataattgttaagtgtagtaaataagaggtggtttgctttgtttttgtgacaatttacatacactttatcagtagttttgttgtgaagatatatgtctccgtttagttgggcttctactttatgttttaatagaatggaatcaaa

SEQ ID NO: 184210 - DNA, 5369 bp, Cannabis indica
ttttttttttttgattagtttttcatcataataattaatcgagacatttttgtttattcaagcatcaccaagacgcttgagaggtatgacagatgcagctatggagcacaggaaggaaaactggctggaaacgacacagaggtacgccgtaccattatacttgaagtgatatatcactatcgttaattaataactagtttatacgtagaaagaaacaaaagaacagaaaaatgcttctcgaccatgggggtactattaattaaatttatcagtaatggcatataaatatgtgatcgacattttctctcataaagaggaggtacaaattctaatttccgtcccaataaaaaaaattaatgtaatgtatataggtatgtattaatttttggcatataatatatgttaaactccatgaaagacctcattatctttattgatatatatacagagcatctatcaagagtatctcaagctgaaagcaaaagttgaggttcttagacgaacgcagaggtatgttattcaacacttattaaataaactcattatatatatgtatataaaagaaagtatggagcttcgattttagtatcaatacacgcttgtttggtgtttggatttttctaaacaaaaaatttgccagcgaaaaagaaaactgagaaatttcatgtaattttctctttttctaataatacatatgcttgcaaaattagctttttaacatttaattatttaaatctggtatttctttttttaagtttgaaaaaaaaaaagatatttctttttttttttttaaatcaccaaaaattcctgtgtttgatctatatatctatataaaaatatatataataagcactgagtataacgccatttttgttcaggaatcttctcggggaggatttagagcatttgggactaaaggagattcaacagcttgagcaaaaacttgactcgtcattgaagcaaatcaggtcaactaaggtacatagcatgaagctccaactttttcattttttattttgaaagaagcttaaagctccagcttattgattacaataattggaatttagaattatatatagatatctatggacttatggagtgagaggggagagcgggtgaaattcaacttattgtttataattaacatatatttctataatttttttttgctggaaatatatttatataataaagtatataataaaatggagaacgacggaaaatataactatatataatttcaatattcaattttttctatacggttagcatataattgtatagatatattgactcatgtctaattaattataatatgctaggaccttgtaaaattagtgactgcaatcctgttaaattttgcatctaattaaaaaacattaagtggattaattattgtcaagtggatttgcatctaattaaaaaactttatttaatgcaatcctgttaaatttagtaaaatagataatgaacgaattaaacaaatgagtgagaacagattgcgtttgcatgtttcgtttagatgggcttcccccactagaaaactatatgtgtacctttagtgcattcttttcagttttgcctcatgaaaaaatataaatttaattttgtttaataatataacagtgtccaatataattatttaaaactattaaaggagctaaattgagtttatttaatctgtttgttacacacgtaggccggcaactattctaaatttctcctaaatagtaaaaattagaatttaccaaaacatatctattaattaggagttcaatcaataaagaattttcaaaatatattccatattatttgttattgagaggctttatcagtaaagtattatgttgaagcattcgaagaaacgaatacatcgatgtaatataggaatgttgatattgtaaccgttatatggacatgtataatacgttatttggtttccatattttatttacgttattgggtttaattagtatattttaaatttataattattatcaaaataaaactgttaatattttataaggtgtcaccttatttatggtgatggtcgtatgttgggcattactggtgaatagtaatattcttattattttcaatgaaagtagtcattgaataaaataataaaaaaaaacattcttagttaaaacgatgatgccataatgttaaatacaatttactggttatttctgcaatttactaataagtgtacatatacattagtacattacatatgtacctaccatggctatataggacaaccagcttttcccttcatcagaattaattctgtcatatataaaatttgaacggattcatgcatcttgcatatatatacaatactgtacaaagtaacaaatcataaaaaacctgttaaccaattctgctgaccagtacttgtaataaatattctgccacacgagcattatttgacgcaacaaacgaaatttacattcattgattttggcatactatttaaacttcccatgttcatttttaaattagcatcatactattctaatataaatgaatatttttttaaaaaattatatatatttatttatttttgagataatatgttttgaaaatatcactttttattataggatgatatttatagtatagagcaatgatcaattgaaatgtttcatatatttgactaaaagatttaatttttgataggaagggtactagtactgcaggtcaacttaactaatttatgtatatatgatgcaacagcgaggccgtacgcttgttttacattcagatttctttataaaatgaagtacgtacggataataaagctatagttattaattatactaaaaggtgtaatacttgaccataaaccatatatcttttaagaaattttagaaaagactaacactatgtttggtaggagggagagttgggtagatggagaagagaagaggagagagatgggaggagacaacaaattcacttgtttggcaagagagattgggggaggggaggggagggaaggaatatagttagatggagagtaaatccttctaaatccttaatttaaaattcttacataaatgtaagaattcacacattcctcattaattatttaaaattacaaatatactttcaaaatatattattaaaaaattacaaataatataataattttataaataaatactcttcatctttctatcatttcccttccaccaaacaccttaaaacattacctgctctcctctccctcctttttatctacatcctctctaccaactctccatcctccgtattctccatctttcctatattttatttcttatcacaataaatgtttccatcttaattaatctaaacaaatcacgattgctattacatatagtggtgctcaataatattttataatattattaaattaaattatattagatttaatactaattgtaccaaatgacatattaaagcttaaatattattaggcaagaatttcttttggcattttttatttagtaattagctagtttgaaaaagcgtgcctaagtgtagtaacttcaaattgatctacctaataaattctcaaatcttatattaccctaaaaactaagttgttcttacctaaatagtttgtaaaactagtaacaaactacctacagaataggttgatgttgaaacaaatatatgttattcttaacaacttaaatttttggcatatataaattatatttttagttacttcggaaagtaaataataatgaaaatctacgaagtaaatgtgtcacaatgaaagtatatacatctatacattataggtacttcgatttagttattaacatgagcaaacaattataggaaaattaaataaaattatttatttggattatttctaactttttttatagaaataaaaattatataaaatattcttatttatttcagattgtaaaaacaaatattgtagatatatgtatatacatatatagatgagacttgggagatatatatataatctatatctactcatcattctaaaccaatataaatatgttcaacttttaacaaatacataaaccaaaatttaattaattaattggaacaaaaacaatctttacaaagttagtccgaaaaattaccaagcatgccataaatactgcaggcaggggtactggtggcagtaatttatgaacagtaaacattctaacaaattaactgttataaagtcatccaaatagaactacatatacattaaatgtaaaatacgtacagaccttttattgaatggtgctattgtttgtcgaagtaatgactgattcataaaaaaaaaatgtaaaatacgttaatatggatttttctttcaatgattttattgcagacacagcatatgattgatgagctttctcttcttcgggggaaggtacttatctctttcttatatatatgtaataatgtgtgttaataatatgtgcgatcaaattattattattatacatataaataatgttagttagttttggaaagagtattatatatatgtaggtgcttatgtaagcatatcgaagtccttggtcaattaattaattttttctaatcaaggagactcattattatggtttaatcaatttgtaggaagagacattgcttgaagaaaacaatgaattgaaaaagaaggtatatttcaattctcagacctcgctataagcctataagatatagctatatataacaatgagagagctatagaaactagaaagagagaaagaaagagttgtgaataaattggctcatcgccaagctaactaagaagcctattatcgaaaatatatctataactattttatgaaccttgaaactacaagattaatatgtttgaaattttttaaaattgggataaatgtaagtatatatgtatataaatgaaccagcaaccagaaactggcaggaacatgaaatgataatcaggagagatcagagagattaacaaatacttccttaaatattatgtagctattcgtaaccttacttagttatttctgtagtacatttgtaagtgaactcatttcaacattcttcttttgcagtaccatgcaatgcatctttggctttattttatttattttttttagtgaccgttgcagtcgcgtgtgaccttcttttattgaacttatataaaaattactgtatattcttatatttgtagtgttcctcaaaagagtcgcctatattgcatatgtatatttatatatatatatatatctacatatatatgagcgtgcagccactttagctttcgggctgtttaccaaaaggagactaaataccaatgcttgacaattatatttatatatatataggtacttgatctaaaaacaaaaaataataaatattat

SEQ ID NO: 184211 - DNA, 2440 bp, Cannabis indica
tattttcttaatcataggttatagtagcacttgtataacccacaattataaccggtttcgtagtttatagttgttttctctttgtttggttagttttgtaattcaattttagtttttccaatatagtgtttcaggtattcttaatgtctttttgaatgggataactaacttcaactaccaaatactatagcaaatcagttagaacagattccaaattgaaacgacgattagggtataacataacaacctttgcgaaattatagatcaccatattaacatatcgtttaacaaaagaaaccaaaatactccttaaacttgctaacaagtttttacaatcattaataacaatttcaaataaagataccatagacaaagaattttgtaaagcttgaacgacacgtaagcagtcggtctctactttaacttgttgtaaatttaattcctttacccaactaagagcttcctgaattccaatagcttcgacaaggacaagttccacttgatcatgggcaaggatggtacggccttcaatcatcataccattggcatttggcatcactagcaaccatactcaaaccataactacgacccctccaaacatctacattaatctacattattttttttctattgttattagtttggaaccggtttcttgtacttggttggtcttcattttgttgtcataaatttaggtatgtgtttttgcagtaattatatagtgtgttttatattatgtgtttatcaaacaacaacataatgaaacctgccatatgtatatatgtatacatatcaacattacaagttggtatttaataacaatacactagaatagtgaatagtaatactaaaacaaaattgctgagtcaaatgggtgcataacagaataatcaatcaatgtcacaccccaaatactaatcagaatactttatctgcagtgtaaaaaattcatcgaaaaagaagctcaccgagcaatgttcatgttggaaacaaagggttccacctcccttgaatcaacgaaaccaaaatgattcttagaagcagcccaggctgcaagaccgtgagctgccacattcaacttgcgggacaaccaactaagctccacccctggaagttgatcaataacagaaaacaattcaaacaacaaagggcttaatcttccaacagggagattttttcttcttcataccctgaactaagttcaagcaatcagaaaaaatagacgggttccagcagtgttggtatgtatataatgtatatatgtatgtatgtatgttatgtgatgtgtagtccatttctggtgctacatgttcaaagctcaacctggtcctgagagagatgctttctctggctatataaatatatataaacatatacatatatatgtatcttgagagaattgaaactcaaactcatgtcattatctgtcgtcatcaaactcttacacatttgtcatcaaggttggcttgctcagttttctaattttatagatattacatacattaaaagtggcagtaagaaaataaataaataaataaaatcatgtcaattaccaaaaattatgaggtaaatattttgataagagtcaatatgtcaactactagcattcttctcagttctgacttatatgtatatacagaagactcactcaagaaccaacttattgaaagaggaaaaagtagccgatgcaacaatgtagagcttgagcttgtaatatgttgtgtctcatcttctataaagaacattacataaaggcatctttgttccttcctaatttttttgaatgtaagtagccgagccgaaatgtgaaatagcatggtttcggttatcatggttcattcttgaggctaccgacttgtatggtgagaaaagacacactcaaagcaaggctttttctgtcaatttacgaactcaactatttctttgaaattttttactgtctataatgagaaattaagtttcaaaatactgaatgcagactagtatttagaaccaccaatcatcactctaaaaaaataatgttattctcttgcagaactagaaacttgagttgtttagacaaataaaatatgaacaaaagcctagtagaaaatcctaaacattggtgtagttgttagtctcatttgaaatacaaattccaaagtactttgctatagtactaaacaaaaacaaacaatagaagatacgtctaacttgaggttagttaatcagagtaatgcaaagatagtttagtgaagttaagaaccatctttacctcatttaataggagtcgctttcttgttcgagttcacgtatatgttgccttgtcatcccataccattcatcaatccaggcaaactattccggttactctctagaaaagagctctttcaccctgaaaatggtatcaatgagcaaaaaaaaattcaattagatcttaacatttctgcttgctgtgaat

SEQ ID NO: 184212 - DNA, 3737 bp, Cannabis indica
aactaagcgggctttacaagcaaaatatctcaacataatctccaattaattccagacaatagaggtatattttagttgacggttctcaaacactgaacacaatttttattatttattctaattaaaactcaattaattaattaaaataattataataaatacctacagtgatcaataaattttagatcatattccacatcaaagcatacacaataaaagtactacaaaaataatttttttccagtttttacatcaactaagcatttttttcataattaatttaagcattgacccaataaattcatgaaaactataaaattgacttgaaatctaattttataatagtttataacccataaacagtcatataaaagaccaaccaaatggagattggaggattgtggcataatattaaagaaagtgaaactagaactccattcttaggcgaacatacacctctcttttgctggtaaaattcagctgattcaccccactttgattggcttaaggaattattggatgaatatttttcttttgtcttacaaaaataatttttttctgtttttacatcaactaagcatttttttcataattgatttaagcattgactaaataaattcatgaaaactataaaatcgactaaaaatctaattttgtaatagtttatacatcaactaagcatttttttcataattaatttaagcattgaccaaataaattcatgaaaactataaaatcgactaaaaatctaattttgtaatagtttataacccataaacagtcatataaaagaccaaccaaatggagattggaggattgtggcataatattacaaaaaatgaaaccaaaactccattcttaggcgaacatacacctctcttttgctggttgaattcaacttattcactccactttgattggcttaattattggatgaatatttttttttttgcctcgaagtgtgataaaagaaattgagaaactgtggtgtggcttcctctggggtttgaaaggaattcgtaaccgagttcatatgacagcttgggacaaggtgtgcctgcttaaagcctatggtggccttggctttaaagacggaacgaaatggaacaaggcggttcttgcaaggtttatttgggctctcatgaataaaaaaaaaacttgctatgggtgaagtggatcaatgttatctatctaaaagggacggatttctggagttacaacctaagaaccgactcaagttggtattggaaaaagatttgtcgattgagaaatatgtatactaaacaggatattaactcaacaggcagcggaggaaagtttagagcttgtaagctctataactcagctttaaatcaggctcttgctccattttctaaagtaatttggtgtggcctcaatatcctaaaacatagcttcatagtttagcaatctatcaacttcaatctactcacaagggatactttgagtaggttcaatatagtactggactccttggactgcctagtttgtgggactgctgaagagagccataaacatttgttcttcagctgctggttttcgcagaaagtgttggaagaattatttagatggctaggtttcaagggatggtcagtaagcgtcgaaagttagttttcttggttgtatttaaacaactcgagtttaatcaaaaggataagtgtggtaatcttagcagctgctatctaccacatttggagaaatagaaacaattgcttatttgtcaactttttttacacaattacttgtatagttaataaaattaaaaaagatgtttaatataaattgtacataatcaagaatagaaagtggtctatagttgaaaatgctttattacaaagattgatatgtaattaattgtgtggtggtgaggttgtttggtgctctctgtttagtttgaagagtccctttgagggtgtaattggttgttttgattattgaaattcttcttcttgataaaaaaaaaacagtcatagaaaataaatttagatttttctgagtgacctaggtatttttcatagttaatttaagtattaatcgaataaattcatgaaaagtataaaatcgaccaaaaattcaatctatcaatcttataacagtttatatcccataaaccgtcatataaaataaattttgatttttctgagcgacttaagtatgtttcataattaatttaataaatatattaaataattctaaataaattctaataattatcaaacttcactaagtaccctaaaataatatagagaatcgaaatttagagagagagagagagagagagaaacacctcagaactttccaaaacatggtcgccacagttacgtcgtcgaagtcgtattctccggaggcgacaaagtccaaagccccttcttgcatgctttcgacgcctcctttcaattggaaattattcccactgtgatcagcaactcaaaacgatccaaaatcatccaagaaaacaagtaaaacacattggaatagaattgtctgccttggctctggtgtaccgcgtttaatggtgattctcgtgacaagcctttaaacttcatttctccacgtccaaagtgatcctttggttctttagaactcatacaaatgcctaaacgaacccaaaaataattgaaatcctctcaatcgattcttaatgaaaaacctacgatgaacgtcctaagaacatggttcgttttgagataatgggttctggaatatatgccaacgtccaacctccttctaagatgattatgaattcaaagaaaatctcaataacactcaaatcgtgcccaacttgtagaaagaaagaaacaaaaaaaaaccttaattgttcgacccattctctttgtctctctctctctcttgcacaaattctaaacctaaaaatcgatctctaacatgtttaaacccaaataaaattgatcgctttgaacagaaaatagaatgactcactcccataaattttggccatatcgtaacaatataatcctacgtgtatacattaggtatactatttctactctttaaatagaataaataaataataatattaataataataaaatgtgtgaaataagtcatttagtatgatacactacatcatataacaatattcattaacattattaatattacaataccaaaataataataatcaccaataatcataggaaaattttattttaatgtttaaaaaataccctactaacaaaatttagactcttaaataatttatacaatttaatgctattgttttaatttctacccaaaaactctccctttcatttttcttctctctttgtctctttctcttcctcactctctcttcctctttctcgcaccactgagacactcaaactcaagcacagagaccaccaaccaccaccactaaatctcttctcctccaccaccgaacctcctcatctacccaaaacttaatccaacaacctccaaatctcacctacccaaatctttctctcttcctcctcctcgacttctctcaaccacatcgccattcgtcaccgcccacctatttctcccccaaccagaaactcattaaattcgtatttgtttgagacattagatggtggtggagggtatgattttctggccaaaataggattatcgatgggttatcgatactttatcgatggttttgtctgcgcactgcttttttgtgtgcaaatagaaatcatcgataacctatcgacaacttatcgataaatgtcatc

SEQ ID NO: 184213 - DNA, 3328 bp, Cannabis indica
aaaaaaaaaaaaaaaaagaagagagagagaaaaagaaaagaaaagaaaagaaaaaggtagtccttttccttctaaagctatttttatcaactggggtatataagttctccttggttgtagttcactacacgtatccaattctggagtatgttctggtatcctactctaggggcattattattattattaattggagaggtacagataacattattacattaaaagatatctttaagctcaaagttacatctctccattcttttagaaaagggtttttaaacaacttggatttcatctgtattgtgctttgaaatatgcttctatctgttggaagtatggctcgaacagctaattttacccttttcgaatatactaatttcattagacgttgattcataattagtgcatttggaggcttttttaagtgtaatcctgaaaagaataatgggattgctagtccttatcgtactgtaaatgaggatttatattttctttaaaaatattatttaatcaatttatttaattgatttaggtacgtgctcttttggttggtggtcttcatatgcaaattttgttttgcatactttctccaggcaagctagtttgtttataattttgtcttcactagattaagaagctatttttttcgactttatgttgtctctcaagatgtactaactggcttaaatacggaatctgaagctactttattatggaccttattgcagattcaaccacttgttagtcctaccaatacaattgtcgggcttagaaatttagattactcatggcatgatttagtccctggaggtaatttattactatatttattgatgtagttacttagttagatttaggggaattaccttatatattattattatttttttttctacaaatttatagtttagattgctctggtagttgctctagtaatttttatatgggttgttatgtgaattttgattacaatttaagttgcttcgttgattgttatgtgtatttttcgtaaaaatacaaaataataaaaaaaaaactattttaaaatataaaaataaaaaccctcttaaatttatattgttagtttctggtctcatgcttatcatgtttgttaagtttggaatgatgcattgaatgcgatattatatatgtaatggactctcttatgactgtcttctaaacaaggaccgaaacttagaaattccaaactgaattagcccaaatcatcaatatcgcactaaaacccctcgaataggccaacaattccttagctcaaatttatattgataatattactatcaattaaacttagaaaataaatttctttggtcattcctattcccaccaaatctaacgtgcactttgctttctaggtgagcttggaattgtacttattaatttactaaaatttaatccacttgagaagtttagactaatggttgtgtcttattagtcaaggatggttttcaaggggtttggttcttctttatttagagtactttgcattctaggcgagcttggaattgtacttataagtatcgtcaattttttctcctccttcccatcctgtgcataattcattgctattgttttttattttatggctacttagtgatgtcacctaataactaactattagttatctattatgttagttagttatgattagtttatttttctattattgttttcctgattttggttgtactgaacttgtgctataaataaacgaatggcctactcagttgagtcaaggcttccctttctttactctgtttttcctttctctggctctctaacatttcatcttctacatagtatcatcgtcccttgactaatgtccatggagtcttccacctccgatcctcacaccacagctgtcgctactcctcagaatcaattcaccaacaactggaatcccttctccaattccttgacatcttcattaactttgaagctcgaccgtaacaacttcctttcttggaagctagtctcaggtggttcccacagtcattggtcatgacttggatcaaattctcttctctaatgtttctcccccagggaatctggtcacgagagcttcaaatcctgaatatgctcagtggaaaaagaaggaccagctcctcctctcctggcttcgatcatcaatgacagaacctgttctggcttctgtggcaaacttccatacttcattcattgtctgacgcgccttggaacaacgattctcaagccaaaccaaagctcgtcttctctaactaaaaggatagttctctcacctactaaagaacaatctctccatctctgaatatgtggacaaagctcagtcgattgttgatgctctgatgattgctggatcaccagtgtcgaaccaggatcttattctacagctcctcaatggtcttggtcttgaatttgacctggttgcgtctagtatcacttcaagaattgatctacttacatttgaagaagttcaagccttacttctctctcatgagactcgacttgaacatcacaactcgctcactgacctttctttaaagatgcaagcaaatcttgctgcaagaaatggtccctatagacctccaattggaactgttcgtggcaatcctactgataacagtcgaaattgatcctatggttgttgctctagtgcaagattacgctgtcaagtctgtcttcgcactggccacactggtgtagtgtgccacttccggtgtgacaagaattggatcacacccaaatatggtaactataatacccaggctcttttagttgaaactcgcttttattatgatccacaggcttcatcaacaattatgctccctgaaattggagatgatgattcttggtacgttgataggggtgccactaatcatgtatctgttgccacttctaatctggatatggccaccacctacaatggcaatgaaaccattgttgttggaaatggtaagaagctctttatatctcatattggtcacacatcttttccttcatctttaccttatacgccactgcacttaaattttgtccttaatgtaccttcaatgaccaagaatcttgttagtgtttctcaactaacctctgacaatgatgtctttctcgagtttcacaaatcatgttattttgttaaggacaaacaaacagggacagtgctcctcaaagggaaggctaaagatggtctgtatcagcttggtgaagcccccaccacaacactccagtgtcttcttgctactgtgtctaatgatactgttgaatcttacatgtgtaattggacttgtcattcaataacaactgttcaatcttgtaactctgctgaaatcaataa

SEQ ID NO: 184214 - DNA, 2758 bp, Cannabis indica
ctcttcacttcttcttctccgtcctttcttcccgcaatttgctgtgtttgctctgttcttacaaagaagtttaggctttaaaaggaaaacaaaactgaaatcctaaggtccaagcttttagaaccggaacctcagagatctggaagtaagtaatgttcgttaagttttttgaaaaataacttgttgaaatttcaaggtccaggccattggaaccacgatttcaaggaacctagaagtaaacaatttacaaaaaattcaaattttaagcacaaaagtcaaaatcctaaggttcaggccgttggagccagaacctcaaggatcccagaagtagactaacttaccaagcaaaaattcattcaagttataacatacttaatgaatttaaaatagatatgataaataaaagcagtttacacttctagaaggttgaaggctgaatatttacatgtcaaaaggaccccgtggtaagggcaccagaaaattatctccatgtatataaaaagaggaacccttatcccccaaaagcaaagttaaaaataaatataaagttaggattaggcagatatgtctagatgagcggataaatcagactagatggatgtatcttgaagtgtggaggcatcagtagccagatctacattagaagttggaagagaaagttccaatggtggttttgtagctgaaagaattgttttagatccagactatgcagttttttttttggagagcttttccattctttcgatctccatgatcttgggatcctagctatctcatatatcctatcgagctatcaaatcacgaaatatctatgacgaactaactctaagaagtatgggtcaaagccccctgatcaacctgattcaagtcttccagacttggagcatagattaaacaaaaaggagaactatctcttccagatgtactcgctcccagggtgccttcatccgaaataaccccataaaatggacctcaagcattctttttcgctcatgggctctgaatgaagtgggcgcagtcttccaaccatctttggtctttcttgatggcttttcacactgcatcaacaactatctctgtaataacctctttaaaatccagagagtctccatgaataaagtctttgacgtgaaagacatatatgctctgatgaggagcaagcaaaccaacttgtctaagaggttggctgtagtaacaagcttttccacctgcaagtctttaggaggaaagccctggtataaagcttgtctagcctccaagaaaggggtggctaccggacgtgtaattttatctagaaataaagaggcaaaaggatcctaattagagactatagggaaagatgatcctaattagagactatagggaaagatgggcaaagaaatcaaataagaaagagtaatccaattactttcaatatagaaatctaaaaaaagggtcggaaccctcttcaaccggaaacccgtggtgaaaaaccaatagctcttgaagtcgttcatatacttcacggcactagtttgacagattaaggacttgaagtgcttctcaagctggtggaagcctatttttctcttattcttccacataaattgaggctttacttgataaaaaatagaaaatctcttccgaattagggacctccatcttcttgtctttgcacaaaacgaaccaacccgtaaggggcgatgcctactatcgcacaaaagttggcaaagtatctcctaagtggaagatgtgctcccatattaatatgggcccagctccagacgttgaagtcgtctatacaattacatggtgactccccaaggacggagagtctgatccagaataaacctagaacactctggaggccacattttgtctcatacttccaaagattgccataattttggaacttattggtgtactgatccatctcccaaggagaagaattgtataccactttgggagctgcaacttcttcttctaaaacttcaacttcctcgcgctggtcaatttttgtcatggtagaagctggaaaagaataagaaagaaaataaccaagcagttagatactcatactaaagaagatagtagggacacgagagagtcctccactataactacttagagaggtccccactagaccttatatccaaaaataaaactctcaaagagtatcaattttgaacgatcatatcgggaacatagaaggccaattgaaagtacaaacgacgtattacctaaaactataagggtcctggataaaggaagcgatttcagtcatccctatttcaatcaaatgttcaaacaaaaagggtgaaatttcatagaacctagtcaagactacaagcgatatgtgttaaatgtcttatttctacaaaacattcagaatcactccaagccctgaaatcctattcatcaacaattcaaggtaaacatgtaaggattgaaagtgaatgccaaaccctaacaataatcaaaattctagaaaggtaaaagaaacatacttgaagaagaattagaaaaagacaaagaacttgaggaaggccgagaatttagggaaaaaattctagcgtgatgtgatagtcacaaggaaactttcatcgaaggaatttggtcaagaagtagaatcctagactgaattagacgaatcttactagggaggttttcaacctccacttgaatatctagtgttctctatggtggtgaagaatcgataattagagctggggttggtgctcctggattttctcaccaacaaatttgaaggagaagatga

SEQ ID NO: 184215 - DNA, 6094 bp, Cannabis indica
ttttttttttttgcttcttcttttgagatgctctaacatgcttgttgagttgtaagaactaattcgagtatatcaatcttaaagattttaatgacctgactctaaaaaggagctttgattttgaattgctatgttattgttacaacctaaagtaatatatttaatattaaattgtctactctataatgcttctatattgagtcattgcagtgtgaaatttcaactagaaaagaaagcctaacacgacacataaatacaaaacaagattaaaatctaaaattgaatgttacattacatttcatccaacaacaagaaaaccattattaagtattagcaacaactatttttctttctatttccatggacaaagggggcattagctcattgtattatatgctaaattgcttctatcaaaatcttggtaagtccaaaatttctcaaccaaaatttgcttaaacacaatagaaaattaacaaatgccaaagaactgatcggggttaaaaaaaaatcctcaaatttgaagagagtttgttggtagcaaatcgccaagcacgctcatcgccaaagcctgctaatgaaaccctttttgtctttcttcatcctattatcaagagatggaaaatcaatgaagttgtatgcgaggtccaggacaatgggatttcgtggaattgcctgaaaagctggagggaaagcttcgatgcgtggaacacttttcaccgttggatcgccaaccgcagatccatagctctcaagtttctcaagaaggtatttctccaactgaagataaaaatcagtatatcaaatgtcagcaaaatgtaacttatagtttgctagttcaaagcagatatcagctggctcttagatgtgccagttttgcttcatatgattatttaatgaaagaacacttttgttgcgaaagaaaacgaaatgcagaataaagattaccttcttgtcatctccagttaatgaaatattagatatctttttcgatagattttcaggagccttcagttcttccatgatacctgttgcgtgttctatacatatgttggatctgcactcctcacacaacgtcttcaactctttgatcattatctgctacgccaaaaaaaaaaggcaaaaaccccagtttagatgatagtttaacagttacatttattaggctagctgttatttggtaaaatcttctaaaagtgtaaaactaaaaaacttagaccaaaggttaaatataagtaaagcatggctacttgaaacttctatacaagaaatgcagaagacagtaaatttcaagatgccaaaaaaaagggaaaaaaaatggacgcaagagaaagtgattatgctacgcacctgatcaccatcaccagtagcctggtatttctttaacgcgtcctcagcaagagaacgagcacgacagtacaatgtgtaagcttctgccctcataccagccatactgtatgattttcccaaaaagaacacctacaaatagaaggtatgattcaaaagttatgtactatcactctttgatttctttttattgtagtactctatcccttgtacttaaggattatatgcatatgatgagatgtatatatatttctctgattaagagagtgagagaggaaaagataaatgtaatatatccttcgccacaaaataattgattagagtaggatactaaaaaaaatatagcttaaatggtcaaacatttcgataatgcgaggaaacatataatagcaggaatcgctacatgagatgggtaaagtagcagcaaggaagaaatgaatgagccgatgctcatgataaaaaatatttttccaaacatgtggtccataaagaccaaaataaacaatcatcaaattattaatcaagcaaaggagatggcagatatgattccactttgaataaaaaagtgatgccagaacaaaaaaaaggttcataattttaatgcataatagattctcatggaaaaaagtataagaaaacattaaacgagtaaaaaaaaacttggaagagaaataaaatagctatttcatgagaagcaaacctctgggctcggaaggccaaacttttcaattcacagtcttcagcaaaagcaatttcttcgggctttctgtctcttccagaactgactaaatcagacagatcagaagtattctgcagacagacataacaaggttaaaatttggaattttcagcagttagtataaacactatccatttaaaaaatacaataaacaataaattcaaatacataaaagaaattaacctgcagtaagaggtcatacaaacgaacaagctcttcaggtttggtggctttctcatttttgtcatcacgttgcctggtaagcttactctttgcaatgctaaccaacaattggttgcgttcaatggttctttgtcctaatacagcaccaacagctttatcaagaccatttaggtcatctttcgcggattcagaactacctgcactgacctagaatgtaaattaggcataaggtactgaaatcacatcacaaatttgaatatagaaaagagtttccataagaaagaagctaccattattaagataacaagaacaattctacaagcacaagaagagactgcataccaaatcactacggataaagctcctagcttcatgataagcagtaaaaactttgtcaaaaatggcaagttttttctccccgggaagtgaatcagctgttggaccatgtaaatccttctccaaatcctgagctgcgcaggttcaagtccacaaaaaacttgagaacgcttattcagattacaaaatgttaaaaaagaaaagaaaaaaccacagacaatgcagacagctaatatttcccataaaatactaagggcctgctgccattagggaagacacaaatatagaaagtttcaggatggacaatataagataatttttgtagcaagtagtaactaatacaaagataatataatccaacaggaaacccctccaaattattgcattaatgcaacgatataaatactcagaaaacatcctgttagtttatgctactttcccaaatcacaaatatggatcaatgcatgcatagggtgttcacaaaggcacagcctctcagcccatacaaaaaaagatattgaaaaaggaaaaatatacatataactaagtaagttactggatagagaagatgaaagaaaaaagagaagaaatttgcatagtcaatagataacaaatatatgagaggaagaaggaattaaaaggccagagctgaagaactgaggtttaaggaaaagcagaaacatatacataaaggtgagcaggaaaataattatttttgaaaaaagtaataagataacatagaactataaaagatggcaactaatttaagtggctttgcattttttaatttcttgacacattcattttcgtattgaataaatattgattgctaaagttgtaaggcatcagcattcttgtttaagatatttaatttaaaaatattctgccaaaaaatatgatatgaaaattaatatcaaaattaatatcacacataccatagataataatatgaagtttaactttaaagtgcaaacatatttttaatttgaggataattcttagtaccacacctataatatatgactaacgaaccttttaaaatggcaacccttgttttagcattagatattggaaacctgtgaccaagccaatggaactcagtcaatgatgcagcttgttgagatctcgtttccgccataacagcctacaaacaaataatgcgcaagacatgagctcacatagtaccactttagaagtcacaaaattatcttacaaaaaacgacatgcacctttatttttttaactcatttttatttcaaaatatcatatacatgcacttaaactccaaagcactcatcaaacaacaaacaaggacagctcattaacactccaaaacactcatcaaacactcacttaaccaacaactcgagctagcttcaagtaacaaggaacacacaccattaataacaaataaggacagcccagtaatgaagaagaaattcaaaaaagataactacagtaaataattcaaaacccataacaaagcaaagtactaccaacaagagaaatgttacacaagcaacagtcacaactcaattttgatattttcacactaacctccagtttagccttaaagaggtcaagtgctggaccttccatctcaccaatgtttagaagttcagaggcttgcagatttgactcgccaatcttatgtaggcagtatcggatgctaggttctagttcctcaacacgttcacgacacaaaacttggttttctaggtctccatacttcccaagttcctcatacacagccctagtgtgtcagcaataaagtaaaaaacctcgttacaaactgaagtagcctattaaactaaaatccactcataccatcagtaacaccatccaaaatcaacgtactttgcaaaaggtttaattttcaacgggaaaatcactaacagcgttgatggagaaagatgtaacaaaaataaacatacattttcagtgaggacaccaaattatgtttctatctgaaatccagtttcttactatgaattgtatgcaacacttataaaaaaactgacatgtttcattcaagatgaaggattcacctggcacttttgaagtttttcaaggctatctcccaattttggtcttgttcaaataacaaattccctttcataaaggaggcatacgcctgaaaattcaaattcaatgattaagcatataaaaatatgtgtacacctgaatatattccatatttttgtcctaccatgtacgcaacagttatgtcaacacatatcatgctaacaatcatagctatagacatagagaacaatgctaaaaactctataaatttagccattatgctcattcacaaacctcagcttctaaagaagttctcgagtctcctttagttgcacacaactgtgcaaaaagtgtagcccacttaactgccttcctaagcctaccaatcaaatagattcgtctggcgtgcatttggaccatctggcagctgtctcttttccatggcatggctccaagctctctccgccgtataaagaactagatgaagaaatctatttaaattcagaaaaccagaaccattaagcaaaggaaaattccaaacatctccaagttatgagtttgctacataaaccataaaaccagaagaaaacacaaaattttaaagaccagccggcctaaagtaatacgcctcacattatgtacattttaaagaaaaaaattaagggaattgaataaaatctttaatccaagccttagaatgcatcacaaattttaaccaagagcttaatcattccaacaaaaaaaaaaaaaattagaatgcattatcaaatatgggggaaagaaacatcacaagatatcataactacatttattcttatcttggcttagccataaatacctaaatgaccaatatcttaaacgaaaagataattcatttgaacatatttggtcaaagatttaaacagcaagacacacctcacttcagttacagtggattcagttaacagtcgccggttgtatttcccacggccatgagtgaacttcaacgatttatacagcctcctcagccgagccgtacaatacctcctatgaataatcaatgccattcaccccattacacaattataccaacatcaaattggaagcataccaagtctaaagatgacgctgatgacaaattacaagtaatagtaacaagaaattacactccaaatactaaaatctttcaacggaacaataaagtgaaactaaaagctcatatataccgatagcgtgtgtagtctccatgcctcaatccatgctgcatctgagcagatttcaatagctgcaacactgtaaacataaaaaaaaaaaaaacaatacacaaatcaattgaattataatttgcaaaagcatttcgttactctaagcaaaaagggggaaattccgaaatgtaagcaattagtacattgaaaaagaaactgagaaagaaggaggacaaagagaaaagggaaatgagatttgagaacgaaccattgatagagaatt

SEQ ID NO: 184216 - DNA, 2745 bp, Cannabis indica
caagtttgtacttgtcacacgtgacaaataaaatgatgacatgactgcttaaccagttgccacattagtgctatgtcaatgccacatgtgtaattaatttagaaaaaaaaataatttcctaaatttatttacataattttcttaatcattaattaatttttaaaagtgcataaatttttattattttaatgttaaaattatacacgcaatgctcatacagtaattaggtaaacaactatgttatcattttatttgccacgtgtaactaaacttgacagaataaccaatttataatactgtgaataattcaagaatcattcgtaacgatctgatcgtccatggggtacaataatacatacgtcataggagcgaaaatgttaaatagcaaaaaaaaaaaaaaatgaagggacaagattgatcaaaatcttgatgagacaaacaaaacccatcaaacggctattaaaaatttgaatagcggttggggggatgagatggggtcaacataaaatagtgtctataaaataaagatcaaatcttttttcaaaagcataggcatgcccagatgatcccacctaaagactcatccacttgtcatgatatggttggttctccataccacttggagtatagaaagtaaaaaatttctaagtcaaaacacactttcaataacataacataaccaaacaaaacaaccatagttgtattgtatagtatttgttgtctaccattctctgtctatttactcaaaacatgtgagtgtgacacttggctttggctttttttgcattacttattttcactctcaaagttgccatttttcaacttcttataatatttctcttctatctctcaactctctctttggtgcatttattgagtttccactagattttgaatgaatattttgctcattcataaacttcacaagaatcttacttcatcaccttcttcttcttcttccattttggcagatcagatctaaagttacacatcaaaactcatcacattcaaattcaaaggtaaaagctttatgagtctctttttttgttagttttcttcatatacatttgtagttgttttttttttttttggatataaattttctttctttttgattgctttgactttgattcttagtaaattttgttggatacttgtttatcttttctaaattgtcattatatattttttttggtagagtaaagaagaagaagaagaagaattgacaataatgtcataaactttgttagattttttagctcttttgctctaaacatttgtagtgtttttccttcactttctcatcaaaccttgctgcattcttttcttctctttctttctggattttcttgaattttggtagtcttttttgataaattttctatctttttcatttctttgagtttaattcatagtgaactttcttgggtactagttaattttctctgaagtgtcacattctttttggtagttgtttttcttagcaactctaatattcatgactttttttgtttatttttggataaactttcaatctttttgatttctttgactttgattcttagtgaattttgttgggtacttgttagtttttctaaagtgacatttttttggtagagttaagaaagaagaagaagaagaagaatttacaataatgccccaagagagtagtaactcaaattcatcacttttcacttcaccatgtaaaaatttgagagggttaaaaggtccaactatctctaacaatgagacctcatatgcatacactgaagaaatcatcaatgattatgaattggctcaaagaaaagctgaagaagcaggtaccaacaaacacttctcccatcaaatatgactcttgctttttctttttctttttgcttttttccaagttatattacatcaaagttttgttttttatttatttattattatatctttattaagagaattgttttaggcttattgtcatgattaagaagtataatcttttgaatttttgttaatggactagtcttgatttttttctttttatgattatgtggacctcttaaatgttggtaatggtgggtccaatttgaccccaactaagatatattttacaaaaacaaaaaattaaagggaaacatttaacaatgtggttagacttagacctaccacaatttgtatcacttttttttttatttatttattttttgtaagtgggttataaataaattttattatgctttgatggttatgattgtgtcaaccatttcaaaacctaaatttctaaaaatgttatattaattatttaatgttgtgagtgtatgtatacatgtatagtgacactaattaaaagacaattatgaaattgtttttttttctctcaccaaacaaaatggatagatataaactacctattaagagtgttttgacataaggcatggcttgacagagatgaacacatgtaaacaattattgtgtgatttgagctaaccataatgcaaaattatcagacatttaagagatgtgaaagtgtcccatttttgagacattattacttcccatattggcttaggaaaatggcccatgtttaagacataattgcatgcacacatagcgcccttttgtcatacttattaaccacaatgtgagcctatatttagtcctttgggtgtctttgtctcaagcattcatgggttttaagactgttccaggcccagctctgggcataggcgtgctaggcctgtgcctaagtccacctag

SEQ ID NO: 184217 - DNA, 3508 bp, Cannabis indica
aattttttgtgattatatttagccaaattaattcagcttagtgctttcacttttaacaattttcttagatgagttaaagaaaaatcgcattaacacaacttagtacaaatattaatttttgagtattcttctattcctagacattttgccataatttaccgtttccttctttgtccaacttgtttatggttggagaaagaaattgagattttatcaaaattcttgggcaagaatcttaaagaatgttcccacaattcggtgccactgcggagactttgagcaaggcctcaacaatggtgtttcgaatcggcacggatgcccacctatacgacgatccagaagatgtcaacatacctcctctcctcgacagcaaattcgactcggaaaaatgcgaagctctaaagcgcttgctcgctctcatcgctcagggcttcgatgtctccaatttctttcctcaggtctgctcgattaataaatactgtcgaattttattcatgagatcctctttggctgcttactaaagaaaatcatgaaattgatgtgaaaattgcaggttgttaaaaacgtggcgtctcagtctttggaagtaaagaagctggtttacttgtacttgttgcattatgctgaaaagtatgctatgttgcacactgtaatttctgaaccactgcctaaaatttcataatattcttactacaacattaactatcccattttgtcgaacaagactagatatttcaatttaatttatacttcttacatgaaaattcatttcttattatttttatatgttcgagttgtctttgttttagttaataatgggggtcttcttttgcaaattaggcgcccaaatgaggcattgctatccataaattatttccagaaagatttaggggatccaaacccattggtgagggcatgggcgcttcgtacaatggcaggaatcagactccatctcattgcgcctattgttctggttgcagttggcaaatgtgcaagagacccatctgtgtatgtgcgaaaatgtgcagcaaatgcccttcccaaactgcatgatttgcgcctagaggaaaacacagtgacgattgaagaggtatggctggcttttatttctattttcttttgataggataggagtagtgatatgtggatccaaaatatgcagccaaaaattatacacacccgtgtcacatcactgtatttagcgttctggttcatattttgagtgcacatatcattacactttttgatagctatagttatataacaaaccttatatattttagttttaaaaatgcttggatgattatcacttatcgaaatagattgtgttcaaattttatgttgtatctcttaaaatataccagagatactattttataatcatagtttttcttcactagatgcagttttacagaaaccaagctgtctatgcaatcacactttttttcaaaaggcctatactcgtttcttagcaaaaataaaatgaaaagagtttaacaatgctcagttttcttgcagattgtagggatactgctaaatgatcattcccctagtgttgttggagctgctgctgcagcatttgcttctgtttgtccaaataatttgcctctggctggaagaaactttcaaagattatgtgaaattctgcctgatgttgaagaatggggccagataatcttaattggggttcttttgcgctatgttattgcaagacatggacttgtaaaggaatcagttatgttttctttgcaccattcagagaattgtaaatctgaaaatggtagcttggagtcagagatgaagttcccgttggcagaagacagtaattatgaatctgaattagcacacatgatctcccactgctatattgaaggaccggacaaatatttatcaagattaagtgacatgaataaagatttttccgaaatcagatggcagtgtgttacatctgttagaagtaatgaagatgtaaagctccttctgcagtgtaccgcaccattgttatggagccataatagtgcagtattactagccgctgctggggtacactggattatggcatcaagggaggatgttaaggggattgttaagccactattgtttgtcctaagatcatccattgcctcaaattatgtggtacatacatacatttccttaacttcattactgtagattaatttacatgtgggtctatttgtgttttgtacattatttccttcttgatctattgtgttttatgtagttgagtttcatttcttagcagtatgttcaatgttgttgtggattgcttcttcctagttaatttgttttatattataaatcttcccgactttaaacagactttgtaaagtattgttcttaaatgttgaacacaagaaaagctgattggtgattctcaatgtgcaagttgtaaaattagatattgtattgttgctactattatgctttttgctgtttacatacattgcttccttttttctggtacactttataaagcatttttcttaaatgttgcactttttttttaatgttccacctgagaaaagctgattggtgattttcactgtgcaagctgtaagatcattagatattgtactgctgcttctaatatgtttcttggtttcttttaacctacatgttttcatttctcttggtgcatgttttatcggtctgtcagtttggaaattttggacaccttcattggccagtaatcctataaagatcttgttattctcagtgttctttaatatttccattattttaattgtggacattgatagtgaatgtcgtttattggtttactcttcaggtcctttgcaacattcgagtgtttgccaaagcaatcccctctctctttgctccctactttgaagactttttcttatgctcttcagattcttatcatataaaagcgttgaagctggacatactggcttctattgcaaccgattcatcaatttcacaaatatataaagaattccaggtaagtatttttatctccaaccccatgagaaagtattccatgtaggatgtgtatactcatagatgcaagcatgccttagtatattttgctgatttattatgatacacactgatcaggaaaatcacagaaggcagacaaattcactatttttttttattatttttttataaactagggctggtattgtaccaagaacgcgagagataaactagtcatttccagaccacacacataccccctaaaatttcttagactgtttccaataaattttcgttacattcctctcttctattccacatcagcacaaacatacaataaactagtaaaagagtcattaaacagagactaaaagctaactcagttatttgttcaaaagaaaaaaaagctaactgagttatataaatagacccccaactcacatacggtctaattctaaggccactttaactaacaaatacgaatctagttctaaaactcctaaatcgtagttgatgagaaatgctttgcttgattttgagagtatct

SEQ ID NO: 184218 - DNA, 4719 bp, Cannabis indica
aaaaaaaaaaaaaattggctatgatgtgatcgtccacgtaattacaaaagagaaaaatgtagtagcaacattgtggacaaatatgtggaagtttgtagaggaaaatgcaggtattactaataaaacttatggcatcaaacactataaccacataacactctaactctataattgattagtaatttttatgtttttattaaattaaaatgtatccaacctaatattgaaaatgttaaatatttttgttgctaaggatcttaagtaaaaattagaaatgttatttagagcaaatgtacataaaatagttactgaatacagctattaattttattttttattaatagagatctgcaaatctaataataataacaaaacatgtatttatttcaaattcaattaaaaaaaaaaaacttgaaagaattgaatctaaaatctgaatttcctaaaccttcatcctaaaatttgaaaaggcttctaagaagggtgagccgtagaaactacaatgggacttctaacgcggtggtttccatcagaccaagtcaactttccaaagacataacctttcaaatggtatcccttgtttttaagggtaactctgaagcttttctcctcagaacgacgcctgaataccaaacttttgggctcaaccgtcactgacactcccaccggttccagcacaagggccgagtatgttcctatggaccccacgttctttactcgccgtgtcacggtcactgaatcggaaagctccggcaccgttatggatgggtagttgaaattcaaaacgctgacgtttttgggacacctgtacggttgctgggtgaaaagcttaagctgagtctggttgtacccgctagcgcagagaaaatctaggtagtcttcggttctcaagtcgtacaccaaccccgggtccatggctctgtttggtctgatatgacctccgccgtagctgaatggggttcctttctctttcgaagcttcttgcatgggattaactgtgttgtctctggttcttgctatggaatattaagactgaaaatcagagaaagaaatgggaaaagggtatctttgaaaaatgagaattagtaataatttataccagttgtgaagatggctgatcgaatagcggctgggctccaaaaggggtggaggcttttgagaaggcctgcgactccggagacgtgagggcaagccatggatgtgcctgattctgtgttgaatgggattcttctgttgtcaaaatctagacccgttgggcttgtgtcttcactgtatgcagctatgatgtttactccaggggcagttacatcaggctgaagcatgaagatgaaatatgtttaagtacaaccattagtaaaaattgatcaaattttgatatgggtttatggagttcatttaaatcaaaccttgagaatctcaggagtgatagtgttggggcctctggaagagaaagaagccatgaatggagcaggctttgtgtttatttgtgtattcgggggctggagcttggcttgtggattgctgtttgtaacaacgtgaaaagagtttacaaagtgtttgactaaagagaccgaaaaaaaaagaggaagaactcggttttatatataccttgtggaattgatgtaggagaaaacagattgaccgtctttgaaagttatttgggatgcgggaaggaaatgagcgtcggcaatgagttcatttccactgagatgatcattgcagagtatgagtccaactcctccggctagagcaacctgttgacccttgtcaactcttggagtctcaccccttagacaagccacaatctttcccttcaccttggtagggtctagtgttcctggcttacaaagtattctgcataaagagagagaagtctcatattattaagggtctattttcgaaatgcgaaaaaagttacatataaaactattaggaaatgcaggtgttcttacgcgtcagaatcagtggcattggatgctgtagcttgtgccccattgattagtgggtagaatttgtcttctggtaaaggtacggaaaggcttgttccctggtattacaaaaacaaatgtataatcctaaacatgttttataattatgagtaggtaaggtttcagcaagagaaaagcaatgaaatgaaccttgaggcgtaaaccattttggagttcaacaaaagcttggaactctctatccaaagtactagctcccactgtaatcaaccaaggtgcaacgtttgaaacacttcctggatctggccctgaatttccagccgaggtaacaactacaatgccatgcttgacagcatggaatgttgcaacagctattccatcgtcaaagtagtcagccgggtctccaccaagtgaaattgaaatgacatcaaccctgtcatttatggcatgatccatagctgccatgatgtcagcatcgaagcactcgccttcatcgattgggggccagcaaaccttgtaggttgcaactcgagccataggggaaccacctttagctgtcccatttccggaaccataaacactggctccagcgacgaagttcccacctgctgtggacagagtgtgagttccatgaccatcatggtcaagtgcactcttgtaggaggagttgagattccctgcataggcctcatatcctttgttgaagtaccttgctcctataagcttcctgcactcaccaaatatgaaacatagtgttatgtttgtaatttgtggtatttagaacaaacgacaatgttaacatctgcataattcataaaagtaagattctttatccacctgataattgattttaatctaagcatgaatcaaacattgcaaggatgaacagaaaaaccaatgagaatcaaggactaatacaaacactgtttatatttgcatgatgagtagataaaaaagaggtaacctgttacctgttacaaaagaatccatctgtatttgtccgactcttctgacagattcccctccacttccctggaatgggtccatatcctttgtcgttaaagctctgtgatttgggccaaacacctacactcaaaagagaaaaagaaaagttagaaattgttttgttacaattcaatggtccaccaccatgataataattcaaaaaaagatgaaacaaaaatattttaaaaaaaaaaccagatgaatttttttctgtactagctaatcataaaaagaacttatctctacagtttgaaaatctctcctctttctagtttatacaactgaaaaaatataagaaagtagataccacactatgtgaaataatgattctgtctatgtagtgggttcttggtcaaaactcatatcctttgatccatgcagattacagaatcacaaagatatggtataattaaaaagatcatgattataatgtcgccatacattacaatgtagttataattaattataaacaaaaaaacaaagaaggtgcagagaatgtaaacctgtatcaagatttgctataattgtatttcttccaaatttggctttattccacaatgacatttgaggaacatcaccattctcattttcaagcctcataaaaccccatgatcttgtagtatgaagttttttccctttgtttaagaaaaccgataccacttctgggtgctctgcatttcatcaaaatatttgatataaatctcaacacttcagtactatataatataacatatgacatatatatgtataaatgtattacttgcaatttcagctgcctcttcctcttcgagaatggcggcaaagccatttatatgcctttggtacgagtaaaagattgactctgttgccttctctttactgtaattaatgaataaaaagaatgtgtaaatatataaaaagaaaacaaaaacaaaatcatgggcacgtataaaataacgaataatgtataccttcccagaaaagaagcaagaaaattataatgagaatcagtcactcgatcaagaacgggctgtgtaactttagagccatgtgcatgtgatcctaaatatactatataagactttaaaacaaaacaaataaaaagaaggttagtaatagtttgagtgtgagggtggaacaaagaagttgattggtgagaataaaagagcaaaaaaatcagtgaaacattcttactttcttgatggcaagagccggtggtacttggaagagagaaaaaagcaggagtaactggacgataattattgaagactttagtgatgaccacatttttgtggttttgtcagtataatttggcttttatttttcaagtactagtcgtcgaaagtgatacactttctctgcttttgatgattataaaatataaaacactgctattctattctctcacaaaattatttagcacagataatcttcagtataataactataataaacctttaattttgtttccgctttacataaataaaaccactgttttaacttttttatagatgcttcaaaaaaaaaaaaaaaacttttttatagaactataattttggaaatagtcgtaggatgataacaagatctttctggttaaactctcatccagagagaaaatcgctgtatctgttagtttaaaaaaaatatcaagactttttatttgttttacttatttatatttattattataattgttcagcaatttatatttaattacccaatatactaaattttttagtagtaaaactttttcaatgttttttattattattattattatgaaaaacaa

SEQ ID NO: 184219 - DNA, 3824 bp, Cannabis indica
ttattaattagttcaattagctaggtagatcgatcgatcgctgatttctcttcgtcttcaatatatatacataattggatccttgttcaaatatatacatatatatctcaaatcatatgcaccatcaatactgatcatcatccatatcgatccatatacctttgattatatatatatatattatatatacatatgttatgttaggggtcaataatatttgttcgtcttcggagcccttttcttgcttaatggagaataatatcaatagcaatatcattggcagcagcaacaacaataataagaggaagagaagacccgcaggaactccaggttataaatttgtactttatgtttgtatttgtattggtgataatatatatatatatatatatgtatgtattataatatatttatgatgatggaacatgtatatatatatttataattaacaatttatggtgttataattaaataaatttagatccggatgcggaagtagtgtcactgtcgccgaagacgctactggaatcagaccggtatgtgtgtgagatctgcaatcaagggttccagagagaccagaacctgcagatgcacaggcgtaggcacaaggtgccatggaagctgctgaagagggaaaccccagcgggagtggtgaggaagagggtgttcgtgtgtcctgaaccgacttgtctccaccacgacccctgccatgccctgggcgacctcgttggtataaagaaacactttcggagaaagcacagtaaccacaagcagtgggtctgtcagcgttgctccaaggcttacgctgttcactctgatttcaaggcccatctcaagacctgcggcacccgcggccactcttgcgactgcggccgagttttctccaggtaaatttaatttaacttttattatttctttttatatttattaattaattaattaattaaataatctctttactctctttctctctctatctatcttatcgactcatcatcactactactactctacatcatcatcatcatcatcatctcatatattcatcaactaatatatattatgtttttcattgactgatggaaccttaatccccgcacaattaattagttgtttttttaacacgtatatactcccctactatataaatatatgtataccactttcctttttaatctagtcagatgaacacatttccccaaatcactacttttagtgattattatttataaattaattaattaggtccattttcttaaatttttcagcctttttattgattgatcatttctttcgccatccctatctttctataaatatataaacatgtagatgtgtatatacgtacatagcccatatgttcttttttttttcagtgaatcatagcccatatgtttctttgctggtttatataaatgggagatatgaataaaatatatgtatatatagctagctacccaccagcttttttctctcctttacagctttatatttaattacaaatatgatgatcacacacttactttttattaaattttattctgttaagtgtatcatcctttttccaaattcattatatctatctcactatttatattgatcatacaaacacaatatttacttacttgtaaacattccaaagtagctaggttttcacaaatatacacatagtacgtaatgtttttgataagtaacatgttatatatatataaatgattataacttcgttacacatatatttatagagtggagagcttcatcgaacaccaagatgcatgcaccatggggcgtctgaggtcagaatcacatactttgcaaccagcagcatgcttgtcccgaacagcttcaagtcccagtccttcaagcaccgacaccaatttggctgtgcccatcaatactactactactactagtattaacaataataatccttcagaaacaacgacaactactactactgctcctgccctagtaatcctcacaagtagtagtacccgttctcctactcaaaatccaatactatccaaaaccaccagcactcctaatcaacgcttccacaacttagaccttcagctctccaccacaaccgtttcaaatcctgaaaaccacccaatactattatcccctaataataagacagaccccaacagtacccatgatcgagaaattaatcatcagtactctactcagttgcaactctcaataggttcatcagattttggtgggaaaagaaccataatagtaacaataataatgttgaatcgaatgctaataataataataatcacaaaagctccccaagagagagcatgatgtactactactactaatactactgtggagaagacgaggttgatgaaagaagaagcgagagagcagctgagagtggcgatggcggagaaatgctatgccgaggaggctaggcagcaagcgaaacggcagattgagttggctgagaaagaatttgctaatgcaaagaggattagacaacaggcgcaatcggaattggataaggcacaagctcttaaggaacacgccatgaagcaactcaactctactcttctccaactcacttgccatgcttgtaagcaccactttcataataatagtaatactaataataatagtaatgcaagaactactctctcttacatcatagccagtactacctcctcggattgtgctcaaacgcttgacaataacgatcgtaatactactcatctttttgcaagatcagataatcatcgtcttggaaaatcggccactattaataacccatcgtaggtttttcatttttttgcccttttagctctacgattatatatcatatgttgatgacctttttttcttttcttttttaatcttttttggttatttaatttctatatttttacagtaatcatcatgaaatgtgggtataatttgtagtagttgatcgatcgagtgtacgtactgtacttctcttgtatccatctctagcaagtgcttcatatatatatatgtatatcaactctatgatattgtttaattaattagctcattacttcatgatatatccgtataaaatattccttcacatatatagctcatccatacatatatttatataggtctcgtgatgatcatatatattatatattttgtgtatcttcttacagagattaataacgtgtaaatatattttctgcaaatatgagatcagtttgctttatcgtacgctgtttggatgaataaagtaaattagctaggcttttcatgtatacatatttatatatatacacacgtaactttgtataaatactatacttggttaaggaatctggttcccaaactagtgcaatcaataaaaagatcaacaacacccaccagaattactactttacatgcattatagaataatatataacataaatacctagctaaaatttgaaatatatacataataataaatttgaaattgagagaaagagataaggtggggaataggggttgcagaggggaggcagagagagcagggagtcaaacataaatgtgaatttagtggaaaaagcaaccaaaagaaaaagaaaagaaaatcagggtgatgaaggcatatgagaatgcatggttttcagtgccaattaactcagacaactacgtatcagtactctcttacactagctagtccaccaccaccactactaccactatcaaacatattaaactctctggcctagctcaagtcacaataatgaaatcaaactacctatgatctctctaactctactctacatcactacttcataaacacatatatagatttagatagactaataagtaataat

SEQ ID NO: 184220 - DNA, 6197 bp, Cannabis indica
aataacaatacagtagattaggcaatgtagagcttaatattatttacaagaatggttcttatcacgtgattcaaaatctgtttggaattcttttatacatcttttaacacttgcgttatgcctagtttggtttattttcttcaataagctgatgaaaagtagtctaaacttgtagatttcttgagggattattgaaccattatattggtcgttacactttatctctgcctgagctccatatttacttggatcactctggatcttcactgttaaatcaacaatcacaccaagtaaagcatgtggaaaagaaaagggagcataataaaactaatgttgaaattccttctgacaagaagaggacacgtaagaatctctcaaaagcatgcacaagttcagattcaaatgagaaactccggcaacccactattattgatgtttataggaaagcaggagctataacaagccaagatgtgccaaatgaaacttcttctggtttatcttctaaggagaggtcaactgagtcatcagagcagcgacctcatgactctaatgagcctgttgttatagacatttcttcagttgcaaaggctcttgaaggccagcgatccaaattcaggtgtctcctggttcaatgcttttccattttgactctttcaaaggtatgcatgcttgcgcagttgtgcagtactctctaaagtctaaactacaaaaataaccatatttgctctgtttggtgcatagcattttaaataattcatttgttgagatacaaactgtaaatcttaactttgaaaataactttgtgtttttcttctagatatcaaaaataaggttattattatttcaacatactgtattaagtttatagtgatgagttttaaaagtattttttccgaaataacttttgagaattgaagctgtaagtattgacacttagtttgatatatgaaataagaaaaataagtcgggtttagagcttgtgaccctaagttgttagggaggctttaagctcgtttcattaagctgtaggtattgcgagaacttattaggtggttttagaagctttcaggacctatctcgtgttggtagataagattcaagttttgcattattgttgttagttgtttctcttatgaaaagcaatgatttttgagttgaagattatggaatttatttaatgtttcttttctgatgcagggtcaagattcttgttgctctgatcccgctgctgaggtaactactaattggacagggatatggttgttgttgatctaatttttattgttaagaaaatattgcaaagttaaagaactaactcttttaatcttcaatggatgctagttaccactatatctgtaccttctgcgtgatcttcattacaagctggattacttctcccccagaaaactattctccggtagagtttttagtgctccagttgggttcaccaggatgacaatcagtcaatttttgagcaaaattacaccagtgtttccatttcttaagagacatttggatagtgcgatttgtctacttaaagaaggtaggcaaattaaattatgatgactggacaacgatcacagtatatatatccttgatcattgaacatttcttctgtaggtgatgaaaactgtcaagaacattggaagactcaatttacttttgctgggaacccagatattccaattttcgaactttcaaaatcttcaatgtctactatggtattcaaagaaatacttcattgttttcgtgaggtgaaatttcttcctttcactctaagctgatattgatcagcatgtccagctaattgagacgcccaatctttaacacccagaactaacaccaaaattgttcattattacagataataaacttgccagatatactgatgaataaagaaattcttttataccttcttgaagccttccagcttggcaagataccagaacatttcttttcgagcatgcaattgacacttctccctgggacagctgaatacttatatgttggggcttatttatttgttgaaagtgtcctcgacgaaggtttattattttgctttgctgcatagtatgtttcatggagcttcttcattctcttacattgaagtgttgaaccgcctttccaatgacatctgatttgtgcagcatgctgtttctcctttatgctagcctccgagtctattcttactctagaattaattgttacctcattccggaaattccttgataagctcagggaggaaaatggtaatcaaatgcattcaggaatccagggggcacttgatttattaaggaccaaacttggcagttctgctgagaagcttttgaagcataattgggagagtgaacatcttgagaacggttggaagaacaaagtaataccattttgttataatgtttgtgcctttttacatttttctttctttctttctgctaaacacttctgattcaactaccaagtgatggagacaatagaggtgttattcatgacctttacactgtttttagggtgaaatggtacaaaagatacttcacatttacttggaaagtagcgattccacttctgctctgctagatgagatagctcaatctattttaacacaggtgcattgatttttaattttttctttctttaatttgttgtttactgaaatgattacttagtatttaaatctatctgtttcttgtcaatacgagtatttctcaatattacgaagctgtttaacaataggtacttggttactttctttacttttgacaatatagttccttgtagtaggttcctgagtgtgggctagaatgaaaaagttatccaattctgggtttaaagatgacagttgcctcaggttctgaagagacactttcaattttcagaggactaagaattaatttgtattcaacccatgggttgctctcgtggtaaggatggggtgttggaaagtgctgataggcattgttccaaggttctaaatcccctagactcaaaaacttggggccactgggaggtctatcagttgaaatgtcctaaaactaaaataaatagatatataaattataatcgtagcttattttaccttaacccaaaccagatactgataatccaatttgcttttctttgttaggaacttgtatctgaaaatgcagaagaagaaaataatccgggtttttcgactttaaattccacaacattcattgtatggtacagggtactggtaagctgtattagtttttcttttcttatattttgtggtacagtttcttctttggcatatttactgaatgtagttctatttgcagcacgaaaggaatttgactgttcttaacagattggtgagttgaggatttttcattgatccaaatattttataagtgctaatggatatgtacttattccgtgaacatttaactggtgctatattgttttcccccttaggttaaggaagtcattttccttgctaaatctagagcttctgctcaacatgaaaccatcatagaactattggccaacctacaacattctgtaaatgtggtggtatcgttagtttccctttgcaggacgtctaacaaggttattaaaaagattctcaagttccttgtgcaacatgttttgttttcatttttatatatatttatttatataatcctgtgtgggttattttgtttttaatttttatatatacaactaggctgttttttctttatggtgaaatgcttataaggctagttaatgtttatgttccatcatgatggaacagatgactgtgcacgctatggctgttaaatatggtgggaaatttgttgattccttcttgaaaggttgccacttgaactttgaccttgtggtatgcaacaagatactattgccaattttctcgcgtcttatagtggatttttttcccatccagtttttgatttcttgcgagctcaatttgaaggtcataaggagtgcataatccaaatggtaagatatgacacatcatgtaaaatttatatgttagactttaagctgatatctgtaatgaatcaggtgaaagagcttcagaaggccacaagaactatacagaccctttgttcagaggcaaaagttagtgttttcatccctttgtcttttggcactgatttacgatttcattcttgatgatctaatctatttgtgatagggtttgaaacaaactgttatacgagcaaaattccagcaacgaaaaggtctatggaacgctatttgttccatgtcaaggctcttctatatacaacacccagtgggtgtaaattttggatgggtaggtcttttttcatttgcatttctgaatgtgcatgtagatgaagctctcccttaatatttctggatgatcttgatttatcgattcggagttttctggttgctggaaattggtcccaacagttcatgtcacctcaatcctaatctttttaagaaattttaaaatggaatccattggttagaaaagatgcttttttgattatataacataatgatttcaaaatgatgtaaacaatatatgttctcgaaacaattcattttcctttccatattaaatataagtttaattagaaaaaatttaaacaaattttaaatgtaatccattctaattatggtaaggtaattttagatatgaactatataaattattatttctttttcttttggaattgtttatagatcaataataataataataaaaacattatggtcaaactgcattaactagtttggctgcttcaacctctctaaaagcaatataagtatatcgtaaagtttatgggagcattaggaaatttctatggctgtcacagaaggtcattaaagaactttaatgccatcttgattattgtgttttgctaatttttttattgatgtttgggcttttgtcatttttctaacttgtgttaacatcatgttgctaattttgacaggaaacctaaaacataaagacttaacgggacagatagtgagttcacaagcatatgtggatgatccaggtgacagtgacacattagatccaacagaagctgttaacaaaaatacacctatcagtgctgctagtgaagatgaagccgaaactgaacgataactggtggtccacatcacaacataagagagattgaacgaagaaagctacaatgatctagtgagtcctcaaatttttcaagttcaatgctcacgacgttttgcgctgtcaatgaataaaattgctgatggacagagttgcaacttgcaatgcttcatgggaacactataataacaataaaaatatatattgattatgaaatgtatacagagataaaactatattacacctttcaaccttccacaaccaccaattttattaaattataatttataacaaatacaatgctcatatatccttttttttttcaacccttatgcaggaacactataaattttctaggatactgattacagaagctaccacacaccccgagctattgaggtgggaaggaagaaatgatagaaacccctaataaatgaaaacattgacgttgcaaattaaacacatgcaataggaagaaacggccagatccttcccaaccttggaccctacaggggaaaaaaaataaaatgactggttttcatttggtctcagtacttgttattgaagagcgctttctgactactacaacttcgcttattgttcatatccttaaccagtttgcggtttttatgtggttatgtatatagatagagtgactagaaatggacattcaaggcttgatttgatagcccagtatttatatatatatatatgtattcaaacacggtacatactcaaatcttggtggaatggttgaagaactgttacccttttcggttaaagagcgtacggcagatcatattatgatgttacctgcaattgaaaaaaaattgttctatcaactatcaacgcatcttcataaaagcgttaggacattaattctaaaaaagtaaaatactacaataatgtcttaaaaagtatattaaatttagtagtactaaaaattgtaaaaattttaacatatacaatttttttttatttactataatataaataattcattatttattataaaatttcacattttttatttataatattattataatttttgcaatacttttttttacatatatttcataatttattataaggctattataataataattatttttttttt

SEQ ID NO: 184221 - DNA, 904 bp, Cannabis indica
tattactttaccgttggaattgcaaacttctttaatgtgatatacaatttcatataatatgtagttaggaggattagggatataaatatatttatttatattattgtgtttgttagaatgacaaccagttcatcccccattatacatctgatgcctttattttctacctatttattttgctttatttgtttaacttactatgttaatcattattgaagaatgctccaatgatatagttttttctctctaatgaacattattctaggcaagaacagaaaatgtcagataatatgaaaaggggttaagaaaaaagatactcttaataatataagtggtgggtttatatttaacttttgtttctttttaatctttttctttaatagaggtcaggtattgaaaccgagttggcaatgctacaatctttttaatttttaatacaacaggtagtactaggttagtattctgctagcttagcatgttagcttttatggtaaaaccagaatttctaattaatgtctgctcttaatgtaattaattcttgtaatactctgccaaatgatagagttagttatgcacatagctgttattgtacagtagagtagtaggaaaaactatagctggtttgtatgtttaaattttggaaaacattcgatttatagttgttatgctgccaaaatttaataaaaaatttagaaaaaaatgattaagtttactagaggcataaaaaagcataatgcataataaaatggcataggacattataaaatagcatagaattaattttcaattcttgctcattcgtttactatagatagtgatcgataagacttaaatgacattgaatcgttgtgatcctgctttctgcactggtctccgagctcttttggcaatggcttcacaacac

SEQ ID NO: 184222 - DNA, 3165 bp, Cannabis indica
atttactaatttttccattgcatttggccccttataactccttttccacatttttttgtgaaattcagggtgctgaacttgcagctgatgaagggaaaagtgcagctgctttggcagcttgcaggacattagccgaagaactaactgaacagcggtttcctgcccctcgcatccttgcattcaaggtttttcttctaaaccttaaaagtgtttgttagttattggtttagactagtgtatggaaattaagacaagctcttctttatggacgttgtacaggagggaagctctcaggccagatactttgtttctcgtctcataccggcacacagggatcctccatatgaacaggtgagaagagtgagagaaaggaaatagtgttaattcttatgccttgatcccctaaataaagtgcacggttttccctttaacacattcaactgaaatgagtgttgttatacattgcaggaggcaagattcccgcagttacgctccttaacaatagagcagcggacaaagctgaaaagcagctttattcattttgatgatcccagcttgtgcgagtggttgcgcagcctgaaggtagtgccgccagagcctagctagctagcaagatgcctcaaaagatggtctttttttgatacaacagagcttgatagttgatgaggagggagtctccacagttgcttcttacaatcactgctggagtcttaagacccttctttgtgtttccaatgctttttattttttttccctttatatataaaagggggaaactgttccccagttggtcatgttaagtgaaagagtagccaagttatacacaatattgggaagtagggaaccgagaatagtgacttgaccacattttttttctttttctttttctagactcgaggagtgttggtaaatggtaatcttaatatttattgatcaattacaaatttcatttttgaacagagtggattcatttgaaatttgcttactccagtttcattttttctctttcaaagttagctattgataatttgatattattaaaacatgagcataacaagtaaataaatggctgctattgaattattaaaagttgcaaacatgcaatggtgaccgtcggatcagaggcttaatgtttataaatttataaattatccaaataataatacttttataaaattaaaagtgctttctatttaaggtccttgaaaatcggaaagaaactcaagtttggattacattcgaagccgtttttgtttatcttttccagcttggaaagtttttaactttaaagtttcaactagagaaagagtcagagtcagtcacatattggcttacacgcacacaccttatctcccccacacacactgctctgttcttcgctttcttcacaaaacccagaaacaacacatagtacaacgctacctttcgccccttacttctttctcattcaaacttctgctgtacaattcattcttcttctcttctatttttagctcaacaatggtgacacccttgtataagccgcctctggccaatcagtacccgtctgtttcacctctctgcaccgactgttctcatattctcaacgacttctgtcgtaaacctcaaatgggtcagtccattttcgctccgaaatttagtcaagttttcctctttcctcccaaaacgtcgaaactcgggagtggtaaaaggcatcatcaaatgcgagcttttgcttcgttgggaggactcttaggtgggattttcaaagggactgacactggggaatccaccaggcagcagtacgcttctattgtcactgcaactaacaggttcgaaactgaggtgtctgctctgtctgattcggagctgagggagaagacttcggcgttcaaagagcgagctcagcggggcgaatctttggattctcttttgcctgtaagcttagcctttttcaatagtgatatgactacaaatctcatggtaatatgcttttattttacaatttgagttgaattgcaggaagcatttgctgttgtaagagaggcttccaaacgagttttaggccttcgtccctttgatgtccaactaataggtactaataagtaatacccatgcgatagtgtatttataagaatatgttttcgtttgattgttgattgatcatattccatttaagtaacttggttattaactgatcattactacgttgagcacccctgaaactggcccccatattcctagttcgcttccagtttccctcatgagtaagctgaaataggtgttttatgtcatctgttttgggtcatctctgaagggtcaaatcaatctttctttacaactcataatgtgttatcactaaggaaaatccactgtgttcaattcaaattgtggttgtggagtcatcttgctgaatttcagaccacttaatgagtcatatatgttaaatttgtggggaaagaaacacactggctttatcaagaaagtattattagtactttgtcacagagtcatcttgctatatttcagatcacccaataagtcttcagtattaaatttcacattagtttcactgtggatattcttaaaaatacacacttcatatctagcaatgacctttatcctgtctttgttggagttctacatctctgtctttaatcacagtatttttgcttatatcaaagatctgcatgtctatattcgatgggcttattacagtcctatatttttctttgtttttttttattcgttaggtggtatggttcttcacaagggagaaatagctgaaatgaaaaccggtgaaggaaagaccctggtagctattttaccagcttatttgaatgcattaactggaaaaggtgttcatgttgtcactgtcaatgattatctggctcgaagagattgcgagtgggttggtcaggttcctcgctttcttggattgaaggttggcctaattcaacgtatgtctcattctaatgcacatcttatactccgctttttgtacctttgttcttgttactattacttgtaagttgtaattggataggttatgaaaggatcctagccatttggagatgtcatctctctaccttactagaaatgactagtataaatagttttttgctatctctcgtttgagtcacacacattctctcctatacttgtaaagtgacacttcaaactcta

SEQ ID NO: 184223 - DNA, 3643 bp, Cannabis indica
ccctaacaccaatttggacacagcttttctcattgttaaaagccaaggattgaatggctccaccagtgttcaacatgttgacaaggcctataggtgcaaagtggacagacttcttttccaaaagagttacgggtgaaactgtaataagctcaaaattgaagggctctaatgaaatttccacattctcagagagctgagaaaggagaagcttcttggcttgagaaaagtacataacaaacactccaactccatcaatggaaattgggttctttccacttttccattcgatgtcattggcattgaacttagaggtcaccgcatgggaacactgagaggcacattggttacgcctagtctctctgcaccaacctcctccttggcaattaaatgctccaacaaccccagtgtactgtaccaaaaccaagcaaaaataagtacattaataatatcccaaattagaaaaagaaggttttggttaattttggtttgtagttaattaattaccttgttgaggttccaaattttgagcatggttttgccatcgtgaagagggtcctcaaagagagagtcacgagtggggagagcatagtaatgacacctgagaattgagccatcgggcaaaacaagcttcttaagcaaatcaaagttgtgctttccaactgagtcactcacataaataggaccaccagagatggccctagaggcggcgtggaaggcagcacatgggtgagttgattggaacatgtcccaatctgggtgtatgaaatttcccatccacagactattataagcacagtgaaccatgtggcacccttgaagccaaaatgtaccatttggatcaccagatggatcggtgcaccaaaagtcatcccctgtttaacaaacacaccaacaaattcattattaatatcatactaccatatatatacatacaaacatgtaaatgaatattgtatacttgatttcttcttcttcttatttgagattgtgtatgtattcaataattattacgtaccaacgcgaccgaggcagatggcctctgttcctaggaacatgaagtcgttgcagtgttccatgcttgcaattacgccgttgcccttaaagtgtttattaactgaggatgtcaaggctttaaagtatgctttagcaagctccactcgccccccatagttctcacacaacatctccaacagctgttcaaatcaaacacatgaaaatgttattataataattaataatgattaggtcaaaatatttctgttgaaaagtaaaagtaaaaagtaagtaaaaaaagggccaaaaaactatgacacatatatataacgtgccgaccaaacttataattagatgaaaagcatgcggacaaacaaggtcaaagcaacagaaataactgttaaatctactaaataataagctaagataaactaatattaacatcaaccaagttcaatttgagtgagcacagtcaattaattaacatatatagcgagtgtatagcacgacaagatatttttatatatttattaataaagataaaaaatttaacttacatggatgacgtcaaccttgactccatcaatcccaactgcttccagatgagagtgaatcccttcatacatctcatcaaccttctccggcggaaccagtccaatcccagtgctgacaatcttatcgacggccaaatcttccatagtcatctccaagcccggagataatttgggcttcacaatatgggcctctggcagaccaggaacattgggcctaatcccaccccaataaccacaaagcgcatgccacacgtatacataatcaacgctcttgtagtcttccttaaggtccttaataaaggcacccatgcccttatcaaggggtttcttaggggacacgtaatctctgaacttatggttctcttgaaacttcaagagcctacaaggcatttgttccccggccacagtttggttcataccctcctgagtcggtgggtccgagtcatgaccgatcgattgccagccatcgtcgattaagaccaacccaggtggacagccaccgtccaccagtcccttcacgccttccagaatcccctgagggtgcaccgtaaggtaaaatgcgtcccacgtgcaccaaccgaatttgtccacgattccagggggagttttctcctccaataaccgaaacgtccccaggtggacccgcactaccttcatcgcctccttcactagattaaacggatcttctccagcgtggaggtagaggatgcttttgaactccgatgacgtggctttggtcgagccgctctcgacgcaaacgtcaacgaaatcgttgtcgtttgggcctggctggattgaggcccgaaatgggccttctatgagtgggagaatgaggacgtaaggccggcccaattccgacgagttctccagtatcaccatctgcgtctcgtgctcgaggtcccggcctttggacccggcccagtgggtggtccaccagaccttgaaccggaatatgctcatgaatcgaatgtccttgagcttccccacgggggccacgtggcggctgctcgcgctgtcggtgtcgaagccaaggaagcaaccgacggttgagattgagtcgtcgttaatggcggtgtgaggcgaaggtgttgccgtgacgttatccggtacttctgagagtatgacgtggccgttgactgtgagatttgacccatcaatggaaaatggtgatgggttcttggacccatcagctagaggagcaacgtcggaggctgctttgctcaagtttggagccatggtggtcgaaacagagtgaaacagagaaagttacctgtatggaagaaagagagagaattgtggtttttctgggtatgattgaatgggtttatataaagagaaaaaataataattaatgaattggagaaagtactacgatgataatactaatgtactagaatgatcagtgagaattaatggagaatcagaaaaagattctgtatagaaaaaaagatatgaaagaatctataaacattgaacatataattgagatgaataagaaaaagagagtaatgaaatgaaatcgagttagagttttatggattagtggttttgattaatttggatttggagcttctccaaatatatataggcaaagttagtagggaagcttcgtgaaaagaaggatatgatatagagtttttaatagttggtttgaaatttgaatttttgttattaatatatgattatttttcatacacaaaatctctgagataattatttattgcttttaattaggaataattatttaaattatctttttctttttttggttaaatagttgctttcacttggacaaaaataaataaatgattaatgcaagctctttgatcgcatgggggtgttctttactaaatgacttaataatactcacttttttttttggtaaattaataatactcactttttatgtaaaaaaatacaaatatatattgtattatatgaatatacactactagaatatatgaaaaattaaaatcaaatgcagtcgatccattgacagtgccgtttgtgttttttgtcatgtagtattaaaaattgaatgtgcattttaaattataaaacaatatctttgaagaagtaatatgttatttttattt

SEQ ID NO: 184224 - DNA, 4024 bp, Cannabis indica
gggtccccgcgattacccatcccggcggtataaatttctatctctagtatttaatactcctatctttttgctgtttgaaattttaattcatcagatttctttttttccaaacaaaaaaatagtaataagtaagaagttacttaaaattaagaattttgaaatgataaacaaaaatttgattgccaaattaaattggtggtgaattccaaaaaaacatcaatgatacacactaaatcaaagaaacttttctcgttatcataaaaaaaaactttagttcttaatatttggatgatttaattttgatttttaaaattaaaatgaatgaaatagtgacatgtatatagtcacaagtatatattttttttattttttaaaatcaaagttaaaacatcaaaatattaaaaactaaacagtttttttttaagacgatacattatctcttttatatatgtatttgctaaatgaaaattttgttttcttttttgtaatttcataataaataaagattattttggtaattcaattagtataagtccattaacaataacattcttatttttattaaagatagataatttagatatttttttaaacaaattatttttatttagtttgaatcagaacagaaaatatcttttttttgaaagacggttaaattcctaaataaaactaataacacttaaattaaattaaattatataaataaataaaataaaataactattatagttgtgagtcattaacacacacctttctctatctttctcactcgtttttcttatatacacatatatacatatacatacacggtcgtcctcaatccaaatctcgccaccggagcggtgaatattttcaaacttccgattccgatctgtgaaatgctcctttgatctccgccatctcgtcgctccacgctcatttgccaataatggtgatctacagctcagtaactcctggccaggtttctttctttgatttcgcttttattcgtagatcttgattcactcctcttaatttctgaattgcattttttttctttgttcttggaatgataatgcttgcgttggagttgatagaagagtgtttgttgttgttgttgttgtttgaattatgcaggtttcgtttttgcttggacttgtgcctgtgattgtggcttggatttatgctgagattttggagtacaagaagacttctgtctctcctaaagcgtgagttcaactcttgaattgttcagctatgtactataagtctatgtatctctcattcaaattcggatttgaacttttaatgtgtaattttattaacttggctttgttcttaagcaaacaaggatgaaaaaactatactttttttaggtttttatttctaatttgattgccttgagtcatttttaagcaagtaatggataaaaaaaagtgtttccttttcctttttgagttgtttttctctattattgataatttggctaccttgattctgtttttaagaaaataagggaaaaaaaacttacaattttgctctcattggagttgctttgttgatttgattacttcgaatatgttttcaagtgaaagaatgaggaagaaaaaacttaaatttttgttctcattgaggttgctcttctacacagtaggcattctgacatccctttggaggtggtggtaaaagagccaattaaggatgatgatagagctgttctgttggaggaaggaaagctccaggcagcctctcctaaagctcggatattgtcttcgtcatcttctattgtgaggtgtgttgagggaatttgtttttgaaaatcttgagtgtgtgaagtggttatcacattctgttatcttatgttgtttgtaaaatttgtgtaggttccttttgatggaggagagtttcttgttagaaaatcgattgacacttcgagcaatgtaagtagagtgtacgatcactccaattgcgaattactttttattctgtggttagattgttgatattgaatcattcacttcctgttgtggcttgcagatctgaattcggtgcctttttagtatattattatgtgtgtgatcgtacagacttcttcaactcatcagagaaggtagtcattggaacttgtaggatgacccattgaacatttattggaccatgtttgttgtgaaaattttcaatatagtgaagatgctttgtgaactctacttgcatactcagtttactgaccctggtataccagaccaaatatttttcaagggctatagttgaatattctgttattcctagtatgaagtttctacaaaagatgtataataatttgtatttgtaaacatattttgcttaacaaatctgcaatgtgttgctgaaaattttatggtacaccccatgattgtgattgtttattttaaaatttatctccttttatatctgatcatttgttctgatgagatttatcttggtttatcatctaattgtgcagagttacaatcgggatatttttctgtttctatacttccttctcatcatagtttcagcaatgacttctttcaagatacataatgacaagtcaccggttacagggaaatcaatactttatttgaataggcatcaaaccgaagagtggaaaggttggatgcaggtttgtttctctttctctagggcttatgtcctgttttggcaacaaatatcatgctttctatttattcaaacatgtattgcccataccaaataaatagtcttgagatcataagcacgctgaaaggaattttcattgattagtgacacctactttttggagcttgttctgtcattccagtatcaagaaaaatattttatgtgtcagagtgcaaaaaattattgagtaatacggatacgatgtgtaggtattctgatattgtatacatccaatatttggagagttatcttacaacttttctcttacaggtctatttttgatgtaccattactttgctgccaaagaaatctataatgcaatcagagtatttattgctgcatatgtctggatgactggatttggaaacttttcatactattatgtgcgcaaggattttagcatggcaagatttgcacaggtatgcaaatagaagtcttaagattaatcgttttagttatgtagtgtactccaaactaatgtttatactattcttgttgaacagatgatgtggcgccttaatttcttggttttcttttgctgcgttgtcctaaacaacagttacatgctgtactacatttgccccatgcacaccctattcacccttatggtttatggggctcttggtattctgaacaaacataatgagaagggttcagtcatggcgataaaaatcatctcttgctttttggtggtcatcatagtatgggaaatacctggagtgtttgaactgatctggagcccattaactttccttcttggttagtaacttcatcttgaagatttgtaagtcaaaatgttgcagattgctgatccaaacccttcaaacttgcaggttataaagacccagcagcgaaattgcagtattccccattgcgtgagtggtattttaggtcaggccttgaccgatacatatggataattggaatgatatatgcttactaccatccaactgtaagcttcatgagactcatacattttatttttctaaattgcaatacatattgtactagagtaatggtcctgttggaatgaacacgcagctaattggctttattatttgtaggttgaaaggtggatggagaaattggaggaagctgacgtgaagaaaagattatcaatcaaaggggctattacttttgtagccttaacggtattttaactaataatttgacattcacaattctttgatgttcagttctaatgtgctggcctttgaatttgtagatggggtatctatggtttgagtatatatacaagctggacaagcttacatacaataatatcatccgtatacttcatggattccgatcacgtatgtatacatttcctaagtgatataacaattttaaagcctaagctgctgtctaa

SEQ ID NO: 184225 - DNA, 843 bp, Cannabis indica
acttttttttagtttttttttttttttttttctgttttccttcattatattacatgtttagttgcattattagtttaacacaaatgtacatttgatgattaattaatcaattaattagtttttttatttctcttgtaaagtatatgttatgtacgttatcatgtgacactagttgaccatataaactaaactaaaatgtgctaaaaataacgatattctcacttaaaatattaggaataataaggtgacaattttttttagtaactaatcacattaattttagttgaaattcactgttgacaaagaaagttacgctaaacacttattttgttggacaatcaatcaaatgcttctacctaattggactaatgaatgccaacgagaagaattaactttccacatgttcggtagaagattcttttttgtgggccttgttggccacccgccgtgaccttgggttttcagaaaatcctactcgggggacttgtagcttggtagtccaccaggtgttgccaccgttgagtttggaaccctaagcactgttagtgataagtgcgaagaaggtgaaaatggcatcaagtcatcaagccccttatgctccgagtgatagatgtgctacaatgttcgaggcaacaaagagttgtatgctgcgttcggaaaggatgaatcactctagattcaaaatttattgattctctttcccaattggttagaccataggcacacaatgatttactttacgggcaagatttttgggtgcatatcattaaccatgtactaatggtaacaacatataataattaaagaactctctcaagttgtaacttgtgacagtcagtagtc

SEQ ID NO: 184226 - DNA, 1051 bp, Cannabis indica
gtgaaatggagttctacagattcataaaaaaatcgtcactatgagaagtacctcgtccagaagaaattctcggaagaagtttcctttatcagaaagaaggaatcccaaagctgcccttgtttggacaggctcctgttgagatagatttggtagcattaatgggaatgtattttctgttgtacgttgcatcaggccgagttcggccatatcaccattcagatcctctccacctccacttttagcagccgttatgaaattctcaaaggcttgcataacatcaatgaatctttctgcatcgaaaactccagatttcccgtatattgtatagcgtaaagcattccttagacgtggagattcatcggttaggagcctctgatagtgaaaggaaggcgttagaaaacaatacataataattttcagttattcagcaaaacagtatttgcacaaaaacatgccctgatctaagtatgtcatcagacaaattacccatcaaaataatatttgcattttgcacaaaaacatgcccatcattgtctaatttcaatgtggcaaagtaaaaagattgcctaagcatatttgtaagatcaattacctgtgcaatgtatggataggcctcatctacaatcgcaaattcaggatttccaactaaagctatgccttccagcaccccaattgccctgattatgagggcaaaataagggggtatccgaaacggatagtcaaatgttatctgagccaagtctgctgccagctcctggaaattgatatttttagcacctccaccttcaagtgcctgatcaaaaaccttggccaggacaggcaaaatgggttccaaattaacaccttctggaatgaaaccaagtttaacaaagtctctgactatggctccataatcacgatgtataagatgagcaattgcttcgatcattccatacttctgatcgtccgttaattttgtgacaagtcctattataggaaaatcaaacgtatcataaacaagtcttcttaataaaataaagcatcaatctactcaaaagaacattcttcaata

SEQ ID NO: 184227 - DNA, 2348 bp, Cannabis indica
cacgagttactcaagaattggatttgcgatcttatcttcagatcttggtccatacacactggattttacctcaagtggtcgtcatatggctgttggtggaaggaagggccacctggccattgttgacatgaagaatatgaatctaactaaggaattgcaggtatatccttcaaaagtcaagatgtcgttgagtagttttttatgtttttcgtcttatgaatgtgggataactaatatattcgttatatttttgtccctcaacggtgaaaggattagggaccctttgtcctttttatgtctggctgtttacttagtattaaagtgccttccactatttgaaaaaccctgcccttgtatctcctttcattcactagggtgcttgtgttttgtaaatttaggtttgatagcacttaattgccaattgttttttcaggttagggaaacagtacgcgatgtggtcttcctgcacaatgaattgttctttgcagcagcccagaaaaagtaagagcttcatattagtgtttgttatctttgtactcaccacttgttgattgacaaataccgtctgttacatgatctagtcattaatgttatagatactattttgaagaatattaaaattggatccagttttctttgaactgaactgttattcccaattttatatttatgaactggaaacagtgccacattttgctaaaagctgcatatcgagtgatttcacttgagtgctcttgggccgtcatttatctttactgagtaatttggttttggttactaggtttcattagaacgatgaaagtatactttaagcattgtgtgggatcatttggataatttagttattgatgttaaattattgacaggtatacctacatttataaccgggatggaacagagcttcattgcttgaaggtaagttctgttcaacaactcaagggtgctcaatctggtgttcattctctttaactattatttttcaacctaataatcattatattttatatgctgtaggatcatggctcagttttaaggcttcaatttttgaagaaccacttcctcttggcatcaataaacaaattcggacaacttcattatcaggatgtaaccatgggtgagatggtaggtaattacaggactgggttaggccgaactgatgtgatgcaggtgaatcctttcaatgccgttgttgctttgggtcattcgggtggtactgttagcatgtggaagcctacaagttctgctcctcttcttaagattttgtgtcaccgtgggcctgtctcagctctggcgttccaccccaatgggcaaatcatggccacagcaggaaaagagaagaaaattaaaatttgggacttgaggaaacttgataaagagctccaagatatacagggccatgcaaagaccttggatttcagtcagaaaggtttgcttgctcgtggaaccggatctcatgtacaagttcttagagatttgtctggaactcaagactacagcagatacatgaaccattctatagtaaaaggataccaaataggaaaagtgttgtttagaccgtatgaagatgttttgggcgtagggcactcgatgggctggtctagcattctcgttccaggttccggggaacccaactttgattcttgggttgctaatccattcgaaacatccaaacagcgaagagagaaggaagttcgctctcttcttgacaagctccctcctgaaacaatcatgttggatcccacaacattggttcagtgaggcctccaaagaaaaaaaatctaacgaaacaggagaaagaggctgagatggaggctgctattgaagctgccaaagacaccgagttcaagtacaaaacaaaaggaaagaataagccaagtaaaagagtgaagaagaaactcgaggtaatctccaaagccaagaggcctttcttggatgaacaaatgaaagaggaagaacagatagctagaaagaagcagagaccaagtgaagaagctgtactaccggtttctttacagcggtttgctcgaaagaacgcatcaacttgattgcaaaccagtcctttcctattaatggtttttcctcatgttcactagttcaaagtattttttgtttacctctcatttttgatttattaggtaaaatgtattctaaaaattttgttacgtcaaaagagtgaatgagaaagtgagattcttcccttctgcgtgttttcttattctttttcgttattgtctgctaagttttatcgccttttccctgttttacttgtttgaaattaattaaagtggaaattacctgtagtatggatttttattaaatgtttagataaatatggataaattttaatt

SEQ ID NO: 184228 - DNA, 2107 bp, Cannabis indica
ttggaacttgagagtcaaataaaggagaaaatccttatcttaaagtctttagaggatctagattttgtatgcaaatggtaagcacaattcgaattgttatagatttgactactagattgaatatttcagagtagtcaaaaccaatttgctgatgaaatcccttagcaacaagccttgctttgaatctgtcaactgagccatcaccattgtatttcactctaagaacccatttgcagccaatgggtgttctattaggagagagtttgaccaagacccaagttttgtttctgattagagcatgaaactcatgattcaaagaaagcctttggttttctaattcatgctttgagtcttgtagtcattggatgaatagagatggcctgactagtggaagttactcgtagttctgttgcagcatgggaagtatgtgtaacaactgcatctaaaataacagcattagtagtaattggggcaacagtgatatgaacatatgatgttgctgtgagttttggtaaattggttttgtacaaaactggaatattgactagattagatggagaagatgaactaccacttgagttggaagaattatttaacaaggactgtgactcatgagtagtaggttcagttagaggaaatatgggtactttaggttgagacacatgctggaagcacagatgacaaaggtggcacgcctgaagagagggaaggaagaataatagagtctttatgatgaagagactcagcataaggaaaactgagttcatgaaacacaatatccctagaaatatatagccttttatccttagacatgcatttgaaacccatactatacctaagaaaaacacaaggaatggacctatattgaagtttgtttctgctatagggtcttagattagggtagcataagcaacaaaaaacttttaaggtagtgtaatctggtggtgtgaaacaatttctcaagagaagaaatgttttgtattgttttagtaggcattctattgatgagatactttgcatatatgtaggcttcatcccaaaagaacaagagtagggatgctttggctacctgtctcaactatatgcctatgtttcctttcaaccacctcattttattcatgtgtgtgaggacatgctaatttgtggataataccacactgttcaagtgcatttgtaaaggctctaaattctcctccccaatcatattgtaaagttttgattttgaaacctaattgttgctcaatttgagttttgaactttataaatgtaggcaatgcttcatctgtggttcttagcatgcaaatctcggtgtacctagaataggcatccacaaaacatatataatatctataaccatttgtagagttaatgggtggagttcctcatagatcacaatgtaaaagttgtaatggctcatgaaacgttgttgtagaaaaataaaaaaggtaacttgtgatgtttaccaagacaacacaacaaactgaacaaaaatttgaattgatctattttatttgatactggtatattattgcaagaactcagatttaattttacaattctagcagtagggtggccaagcttattgtgccatgcacatagaaaaattagaattggaagaatacaactgatgattgagacagtaagaatcaaagaaactgttcaacttggaagtggtattagaagaagcctttactcgtgtgatatatataagtgctagtgtttatcatgtttggaagagccaaaatgaaactttatggaactacaaattgtcgatggtcacaattataattagagatataaaaagaaatccatcttcgtaatgaaaatacgatgatcctagtatatgcatgtttctcaatctcacagatacacctattacttagataataattaaggaacaaataaggtagtgattcatcagcaaaaccagtcttttgtttgaagctgccataaggcaggaagctgaagaataaaacgatgcttggacacatttaacctaccccacacctcgaatttccatgaaatagagatactagcaggaccaaaaaaattataccctgagataatgcaatattattaattgagacaaattgatttaaatctattt

SEQ ID NO: 184229 - DNA, 3227 bp, Cannabis indica
attaatttgtgaatcttaaataattctatgttagtgaagtttgaatgaagaatggagatacgtacgcatgatgtttttttttaatgaggatttctatttggtatctaaggtctaaaataataacactaatggcatgcattatgttattatattgtggtaattttcaccttaagatagtatttttgtatttttcttttttgattaaggtaaaaagggtaaatcatgacgataaataatgtccgttgatttattaattgttaaccatgtattgatatttgccacaaaattaaagagaagggctaaatgacacctaataccaaacactacaacaaaatgtgtcgtattattaattgtaattagtgtataataatatcaggtctccataatttgattgaataaataatcaatgtgacatatatatatattaagatgggcatgattttataaggtacctaataacaagaaataacgataccacatatgttttaagggagcagcatcgtctcataaggtaaacgacatataatttgcgttagtgcatgaatgatgaaacggatttctaattaattatataataaagctacaagtatcgatcttattctaataaaccacacgtacgacatgatttatataaggaagtatagctgaagacgagacacatttttttctccctctgcacatgcagagaaaacgacaacattatttttctcttgctcctcattcctcttttttcctcttttatgaaaaaactaaaacaagaaacaaatataataggaagatagattaatgaacaaaatatttaaacaagaaaagaaaatataagaaataaatgagcaactacgcctttaaaattattcattcattttacaatattgtgaggggaacttgtaaagttttcaaagatatatattatctaaacttaaaagaagggataatacagatttaaattgtagtagtaacatatcatacattgatcatcaattaccacaatagattattaatcaataatatgatatgatctaattaattatcatcagctttttaattcaaaactttgacgatcttcatgttgatcatcatgttcttgcagccctgcaacgtagtctacgatatcttcgccggccttatcgccacgatgtgcttcgacggcgagcttggatacaccggtgaaggcaattatagcgaccacgaatagagttgtggaggcgaacaagggcccaaagtaggccattatcgttgtcaaccgaggcgccgcgtataacactaatgaaatcactaccgaaaccgaaattgctatggccaagtggtatttgtactgaacaagctgtggtgggatttccatatatatggcttctcttgatgacttgatcagtaacttataatctgaaaatgaaattataataaagagagagacagagagagaaagattaattgggattaatattatcgtgtgttgttatgcatatatctcttttttcttttttctttctatagtttttctctttgtttggagaataataatataatgtagataaaaaaaaataaaaattaatagacaaagtttgctttctccatgtgtacatgttattactattttttcttgttttgtttttttgttaggacaattttgcttccctaaagtatcctcacttcgcttttgacctatagcttctttaattacataattaccctcctactaataacataaatttctaatcatggtttttgtggttgaaacgtaagtccaaactgtaccaacactctttcaattattttcagttttgtctatcattatttattggatttggaaccccattgatacaaaaattagttgcattttattattttgtgatccaaatgtgtctgaggctaattggttggttgtgacaaaattggagggtatattagtcatttatgtcagacactaagaaaatgcattgaggtagatgctttgtccatttctttgattggtcggttactttgaaccttttaagcctttcagagtttcatcttttcaaatggaatgaatttcagttgattaggaaaggaatggcatcttttattatttcttctttgtggttatggatttcatgataaagataagctcatctaaaacattagcattcagaatcttaatcatatcttgcctatgttgattctttgtttagcctaaatatattatatattgaaacagagggataactttgttgagagggctttctttataagttggaatgaatttacagataattaataggaaaaatcaaattaaaaaagaaaaggagagaatttgttgagggttttcttgtcaattcctttttccactttgtgattcttgtctacataattcttttgtttttttaattgacaatagggttagttggcaaaattagaataaaatcgtctaattttagatttagtatatgtcaaaaatttatatttattatattttcaaaagatgattcttggtcattggtcatttggtcatttactaactactactattagaagaaggctgggcctcatctgaaagatttgcgcacataaatggcaagtccagtaaggtccttgcacttgcacagtcatgatacgggcccaaacgttgacgctgggctttaaacagaatgtgatgaaaaaggaaaaatcaaatgaaaagaggagaacacgattacaaatacaaatggataaaagcacatttattgcactataattattattcttaatttttgttttgattacatgtatatgtatgtttagtcatatatattttttaaaaaaggtagaaagttttttttttcgtaattataataaataacgaaattatatatcataaacaatttttctattttattatttttagaaaatattaataaaaatatattttttttttctatatgtataaaattagtaatagaaatatatatatatatattttttaaatatgtataaaaataataaaagaaaaataaaataatatatttttagtgagaattactttatatatctatttttttttaatttttttttcttcaaatttacggtttatgttacttcggtaatttttatgtagacttttgttgtgatttaagttactatgttagttgctatatgagttgttatatagatatccaaaaaaaaaatataaaaaaaaaaataactttaaaagtagtaaaaataaaaaaattcttaatattttttattagatttttttgaaaatatgtgcaggg

SEQ ID NO: 184230 - DNA, 4801 bp, Cannabis indica
aagttggaatggattgtaccacagctttcaatagcacctcctttcccccaacagaaaatattttctcattccaggcatgtagaagtttccaaactttttctttgatgttgctaaaaagctcctgcttgtcccgtctagagtaagagggtaatcccagatatcgttcatggcactcagttattggcatgtggagtgtttgagctaaaaaagctctgggctgcttaagaagtgtttggtgagaaagaaatgacagacttgtcattgtttagtacttgccttgaagcttatgatatgtatcaagagacctttgatcgatattgcagattgttacattagttgacaaacaataaactatcatccacaagagcatgtgagacaccgagggcgagttactagtcaatctaagtcctttcaacattccagcttgttcttccgcttgcaaaagtctagaaagaacctcagaatatataagaaacaagtacggagatagagggtcgccttgactcaagcctcagtaaggtttgacatgaccaacaacctcaccattaagtgagaacaagaaagagcttgtggatatacacctcataatcagtgatgtccaagaacaatcaaaccccatcttaatcatgtttgcctctagatactgccattcgaccctgtcaaatgctttactcatgtccaactttagagccggatacccaattctaccttgcaatctgtgccttagatgatgaatgagctcaaatgcaattaagatgttatctgtgattagtctatttgagagaaatgctgattgtatttcagatatgacaaaaggaagtactttcttgaatctgatgacaattgtcttggagataagtttgtaaatgacattacacaaacttatgggatgatattcactcattgaagctgggttggacactttggggatcaatgtgatgattgacttgttgagctctgtcaagtcatggccatcattaaggacaccaagaacaaggttagtaacagatggaactacaatattccaatagtgtttgtagaacattgcagacattccatcacaatcgggactcttatcggggctcatagatttaagtgcatcatacacatcattgcttgtaaaaggggttgttaaagactggttcatatcttgtgtaatagttgttggaacagcagagaggatatcttgcaaagcgtgagggtcaacaccatcagaggcaaataagcttacataatagctacagtcgcatctgtcgtatctgccttagaagtgactgtaattccgtgagagttcaccaaagatttgatgacatttttttatttcctggaggaggcatgagcatgaaaaaaaattagtcttctggtcactgcattgaagccaatccacccttgatcgttgatgccaataagtctcttcttgttcgagcaattcatctaggatagcttcagattttttttcaattcaaacattgttgaatcatttttagttgctgcattattcagcagagaaacattctgctgcattttggaaattacttttttttttttttctagattttccaaactttctaacatgccattgttgcaaagcattagtacaggaatgcaagtttttcaaaaattggtctgttccaccattagaaaattctgaccaatgtgcacgaatgatagaggcagcttctggttcattcagccagattttttcaaatctgaatcttgttttcctagattgtctttcctagtttgatgagaaataattgacacaaacagctatggccctatgatccgatgagtagtaatccaaatgagacgttgtcattggtttaaaagtggagttccaatgatcattggtgaaacaccagtccaaatgctctttaagagcattagcattatttatacccttaatccaagtgaacttgtctccttcaaaaggctgctggtgcaaagagcaggtgtcaaaagtctctcaaaaatcatccatttgtttttcattacgcagtccacccccaagtttgtcttaatttgaaagtatctcattataatcaccaatgaccatccaagggagaagaggagcaacatctttaaatcttttcaaaagagtccaagttgtatgtcggttttctacagaaggatccccataaaaatccgtaaagtggcatttagaaccattagagacaaccatgtaaccatcaaagatatttgtattaaaatattgcaaagttacatcgacatcatctttccaaagtaacataagaccaccactaaaacctactccagggacatcaagtccatgattaaaatgtaaaagatttctaatgcgagaaatagaattagtagctaactttgtttccatcataaaaagtacattgggggtttgctctttgacaggcaaacggagtttgcgaatggctctcgggttccccgatccgcgagtattccaactaatgaacttcatggctgattgcgggactggaaaccagccgccgcatttttgtctaaagcaccatcagaatccatagagtcaatagaaacatggtggtgaagttcatcttcaagtgacaagggtgaagttgaaacacttggcgagttggctcgacacctttttaagagtttgtcttagagaaatgccttcattctgtcgtttggattgcaaattcggattgacattttcctggttgtttaatgtgtcactagccaaagtggaaacagatgtggaggaaatcaaaaagggggaagtgtgattataactcaatggattattaattgagtgaacatccacagaattaattaatgggggtaagtggaaaaacagttgtttgtgtgaaatgtggagaccatcggggtgtatatggcagatagatctgtgaagttgtttaggtgatcttttgtggatgctacagcagtcttgtggggagtcttgttacatgcaatttgaggagaacacattgatgaatggttaagttgtgaaggtacaaaagagacagatggctgttgaagattcatgttgggaatagtgattgaacctccttggttatgatttctgttaatcaaagaaatatggccaccaatattgtttacatttggatcagcaacagtagtatgagaagattcaccacaatgaaaatttcgtggctggggcattcctctaaggttcaattggggaatagcagaagtaaaactttttttggcgagacgagtcaacaaaggccaagcattgcctttagaaaaatctgtcctataacgatcataacttgaagtcggaagaggagatcccttgatgtaaggttgatattcaaggtcaggttccactccattgtcgagttttaccagataaacatggcacttgttataagggtgaccgattataccacaccccatgcaatactcaggcagccgttcatagcggaaatctacccaaaatttatcctgaatatgcgataaagaaatcatccttcccctttttaaaggcttggaaacatcaattttaactcgtattcgtaagaagggtccccaaccttcatttaaagaatcttcaaaaacatcaacatactctccaattatgttgccaatggcagcagccagggactgtgttttactaaggaacggtagtcgataaatttgcacccaaaaaggagtgaatttgagatcttccgaagtgaaatttttaccaacttctggagtatgcaacacaatgtgatggttttgaaagtggaatggttcacgatcaaggactctaattttgtcaccctcacaaccgaaagttaataaaaacatgtctgaagattatgatactttgacaggaaatctaccatcacagtgttcagccatttggttccgcaatgtggataaccaaaccttcttttttgtcaaaacctttgcatacagaaccagatcaacagatgctttagagacagcttcagaatcatgaaattcaaaaactgcttcttcatctttagtcagggaaattttcgctttcattttacaaggggatccattttcaacagagaaagagtgatagaaacaaacagaatttcaaaaggaaacaattggtagtgttcgaaacaccaaaacaaaacagagtaactaccaaaaactaggttgtaaactgctaagggtaaaacatgtttgaataaaataattgtaaaaccataatgaacattaactgcctcagagcacaagagacaggcaaacgctcataaattattttttattaatttttttttactcattaatacatttaatataattaaaaagtaattttatgtaaatatgttttcaaatgtgtatatttaaaattaatttttttttgccctttaaataatctgctccagtgatctttaatacgataaagtaaattttaactgcgaatttatgtctgaagaaatctatgtattcaatcttttaacaccaaccatgctagcaaaaatgactagaacatgacaacaaaaaaatcacccaaatataaaaagacaacgatattttgcagagacaaatatatgtttaacgaagttcatgctgcaaagacctattctttcaataactaacgaaggctattctcaagtctggagtctaaaggtgaccaaataaaaaaaaaaaaaggcaatatagatgagatcgttggactagccatcaatggcatcaccatatatactatcagcaagctgccatacttgaagagtattatcgtcggctacacttgaaatgacccatggctcttctttgttccaagagaaatctgatatcttcgcagtatgaccaccatgagagaacaagagctccggaggcccgatcatcaccatct

SEQ ID NO: 184231 - DNA, 7063 bp, Cannabis indica
ctttttcactaaacaccaccagacaccatacaacacacctcctaacactcacccctcactttcagacccaaaggagcaatctccacattgaatcccattggaaatttcagaaatccatatggggttctcgggggttatcccgggcgtcgtttggactcctcctcttgctttccgctgtgaataaggatccgtattccatgtcggggtcggctccgtcgtcgaaaaagtcgagccagtggtccttgttgtctccggcatgggttcggagtgatggtcttttggggcgaggagggttgaagaaagagagtttgaggaattgggtgtggggaattgaaggtgggttatggagaaatggggagaaagatttgggaagaagaggaagaggagtaattgaggccatgaatgagtgaatgaagctatgctgttatttttcagttgatgaaacttggaaagtcgttagttagtatcagatgattttgagtgtgtggaggctatgctgattggataagtgggacctttcttttttctcaatttttttttttaggaaatttatattttaataaaattctacaatacactcgattgaaatatgtgaatgatgtaccattatttatttcagtaactaaaaaatattagaaaattttaagatagactgtcttaaaataggtgtattgatacaacctttaactattttggtatttataaaaaaaatttagtctattttttttttttttttataatcagataggtattttatacgcgtgtaaaataaacggtttaaacattaatttctatattgtaaaactacaatatatgaaaatgtgttccattatctcctctctccctccccaacacaggggacaagagacctcctcaataagcattctctgagtaagaagggcacgaatgggcaagacatttgagagaatgcttcaccaaagaaccttgtgatgttctaaaactatagagttctgtagtttgttccatgataccggagcaacattacataaaagagcctgatccaaagcttgaatcagataagcagacttagtcgaaaacaatccatttggctctttcgtctaaactcatttatctttcccttaaccatggatcgtcccactttgattgcacctttaaagtttgagattaattaaatgtaaatattgcatgcaatttaggtgtgttactaaaaacgacaaggtcaatgagaaaacgacctgtcgtttcgaagcagcaaacgtgtaatcatgtctttaatgttatacagttggactagggagtaaaggatagtagctcagttgtttattattgtatatccacgtggcagcttcttagtggtcaaaagccaccctacatctttactttatttccctttctctttattaattttctttttctggatcagacattttctttcgattttctcacactttctcactggattttctcaccccttctccttgactgactccatcttcaatcatcaccagcagacgctcccacccacccacaatcctcacaatgtcgggcccaccgagactccgatcgaccaacatcgccgacaccgagtctcgaccggtcctcgtaccggccgggaacaacaacaacaacactgccgccgccagacccgccgatgctcgaaaacccgcaccgaagaagccggaaaagccatcgcaagagatggagaagaagaaagctttgcccaattccgcgtcgcaatgtgttaaggttccgactattttgaagcggcaacaaggggctgacctccaccatcgccaccattcactgctcaattcgtctatgaatgcgtcgttttcgtcggaagcttcgtcttctgattcttcatctaacagtggaaggacttcgagacgcggtgttgcgcctctgagacggaagcaattggggatgaagactgctgctgctgagagaattgagactgaaagggctccggtcagtaaggttgctggtaatgtggtatcttcggattctaatgattgcttggatagcaagaaacggtgcgcttggattacttccaacacaggtaaagattgtgcttttaatctcactttttatagtttaatgtttggttgatgagaaattaggggtgccttcgatcgaaattaggaatattcttttgttgggctttcctttttcaaattcaattcgctttattctgactttacaaatggacctgacctttgagtgttgttaagttacaacttacaacgatttctccaaaagggttaaggattgaatgatttagtttatgcatttcaataattaacttttgaagttctacatatggaaaataaattattgtctttggcttttttaagtaaatggaaagactttcatcaaaaaaaaaaaaggtaaaatggaaagactgtttatgatattaatggcaatgggagtgtattgaaacctgtgtgtattgatacagccttctcaaaattcataagatgatgatgaaggaaacaatgtaccatgttggctgaacttagatgacaagaggccttgtaaaggatgacactgcataaaattgtttaataactcataagagtctgatatgtttcttgaggcattgacctggcttttaataattgaaatggaattgaaactgaagtatagtataggagtaagcatcttttcaaaaactggtgaagattctgttttcatacttaggtgatgctctgttgagttcttgttctttcctttataatttaggttacttggggttttttttcccccttgtaatgctttcaaatgttagcatttataacttttctcaaatgtcaagtttttaatttcttttggtctgttcaaatagatcaatgctatattgcttttcatgatgaggaatggggagtaccggtccacgatgacaagtaagtaatttcataaccatgctcatacgaattttattttacttctgtagatattaatttttcttttgtaacttaccactggctggttgttctttgccaaatttaggaaactgtttgaacttctcagcttgtctggtgctttggctgaacttacatggcctgccattctcaacaaaagacatttatttaggtatcttcaagctttcgaattctatgaaatttcatccacattatgcctgcagttgccacataaaatttctagctaaaagttttataatctgactgtgagttatacaccagatgcttacaggagtctcgaaaagtctttgactaatatgtgaaacgtatctctacacagggaagtctttttggactttgacccgattgccatttcgaaattgaatgagaaaaagattatttctcctgggagccctgccagaactttactatcagaactaaaactgcgagccatgattgacaatgcacgtcaaatttgtaaggtagacaaagattatatgatttttatgttaaaagtttcttaatcaaatagtatttaaactcttaagcaaatgaagctttggattacctatgcaacagacattttacctaacatctcataactgacttgtactatggaacaaaacaggcagagagattgctgaaattgctatttttccattattaattggttcatgtatctgttatgatgttaggtaattgaagaatttgggtcctttgacaagtacatatggagttttgtaattcacaaaccgataattagccaattccgttaccctcgccaagttccagtcaagacacccaaagcagaggtcataagcaaggaccttgtaagaaggggtttccgaagtgtaggtcccactgttgtgtacacattcatgcaagttgctggactgacaaatgatcatcttactagttgcttccgtttccaagagtgtgctggaacaatagaggcaggggaaaaagatggcgcggtcaagtgtaagaccagctcaaatatccatatcgagccaactgattttgaagaacttacaagagctgtggaagagttggtgagacgtacagaagaagagttgtaaatgatttaatttgaccgaggctttcggtatgatgtacttttggggtgttgaggacgtgtttgtgctgtacaaaagctttgaacatataaaaatactttaggatcactttgcttttttttttcttctctttttatctttgaatacaatgaaagtagttattaatgttcatggatatgttattctcaactactttgtatcttttcttcctagtccaataacaacttgtacttttcttatccttttgctcgaacaaattgacaagttgcaggttgcataatcaattggtacttcccaagccttagtttacccgctattgactaagactgatattctaccatttggtcaccaacctcagagtacctgttttctagtatccaattgtctaatttttcttctctacatattaatgatggattttacgtgtcttgagactaaatatctaaactttgcaaggttatgcagatatttagttcaattatataaacccccaagtgtgagagttgtattagaattagtcgcatagtggaacaaggaacaagtagctttatttaggaaggttacttaattgacttttccttctgattttgtaatggactattcattcaatttatagttctatcacatgtgatgccaatctatttgcaagtttagatatttttactaggccacttgactaaatttttgactttgaagagtatgacaagacaatgagaaaaagacttgaagagaaaacaatggttacctcagaatatgcagataaacaaaataacttgaatagtgaagaaactcatattgaagtataattattaattatccttctattcattgatatattttgtaagaatgcaaaaagcaatactctatagctgaatctaacttttgaattgactgtgtaagagtcatccaaattacaattccagttttggaagacaaataaatctatctagccactcatgaggttttgagtagatgaaacaaaagtaaggtgtctaaatccttttcctatttcccggtgtttgtatttacaaaagtagaaaaacatcctaagctgttcaaagacagtcttcataagaaggaatccattcagtgttgacttctcattatatttattcagctggatttctgttgatagattcttcctgagatggctgcagccaatgctgcagtgaaattgggatcttttgtcaaagatgaagccatctgatccaccaagaattttctaacatcaggcgattcagttcttgctggttttgcactcttggtattatcattaccagactttggttttgtaaaatcaagagtaatattaggtccaacagatgaactaatggcgttcgtcgaacaaggaaccgaactgagagccatgcctcggttctgtcctgatgttgcctccatttgagatggttggggtggttatgttcaccttcatatgttgccactaaaatagattgatcatctacacttctttgaacctgaaaaagataaacatttaaccaaacttagtatatgcaaaaaatacattataggagaaaataaatgtcattaaaagaatcccatatgagttttaaattaattacctctttttgacagggcagcttggagcaaaggagcatttgaagtaagctctaggagaagggttatctctagtgaccttttggccatatttcctccactgatatccatcttttacaatctgcatatcacagattatgataattcatcaatacaaatccaaagtctcattttatgtgtatgattttatggggcagtaataagtttgtgttcttaccaggcttgtatcagttgcttcagtccttacacaagtcttccaaactttagctttaatgggttcttcttcccttggtttcttgcaagactcctcatcagttgaactgctctcagaatttccattagttgtgatgatgttgttactgttattgttactactttcagattttctcttctttgaagggctaagctccttttcaactgggttcttgttcatatactcagccaattgatttcttaaagagttgtaattctcacacatcatagttaacatctctgtaagcttcttgttttcagcactaaccctattcaattcttcaaccagagcactagtattctgaggataaaaacacatgaaacccatttagaattaacataaaatcaaaaatcaagactttcatattttgaaagagtacaaactacaaacctcttgtttggcaccaagtttcattccaaagtcaataaatttgctttccaactcttttttctgaaagaaaataaaaataaaaacttgagtcaaaaattcaatcaaacaccttctgggcaagatcaaaaactcaaaaggaattatccacaacataccggaggaggaggaggaggaggaagagcagcatcatagaggtctctgctataattaggcttacaattcagatccaaagaagtatcaacataagaagaataatccataatagccttagaagaaattgagttaacccaaaccaagttgctacttttgctaagtgtctcaaattgacaaagcaaatcaagcatatataataaaaaaaaccaatctttcttctttcttatccacaaaaacaaatatctaagcaaaacccagatcaagttttccacgaatttgtctcaaatgaatgaaatataaactatatatatacaaagctgtgaactttgaggaaacttggtcgaaatagaaagagagagagagagaaattattaataattaataataaaaaataaataaaactaaagaaagctggcacgaggctttttcttgtgtactaaaaattagttaaatttgatatataaattttctctctctcttttcaagttgattgtttggtgtgcggaccattaagagaggaagaagacttctattagtctttatgtcggtaatggttgaaattcatgcacaaaattcaagtcaagccaccattgaactaacctgttttctttttataataataattaaaaggattggctattatatacacgtggctacatatatttcatacgtagtaaaatcatgatttttaataaaaaaaaataagtgttcat

SEQ ID NO: 184232 - DNA, 3335 bp, Cannabis indica
tatggtattagcctcgagaatgagaactgtgtgtagaattctcagaaaaactcattccaagaattaaatactcctagaactagcttaaagtaccattactgagttgtttccgacaaggttgtcaagaatatcaaacaccgcacatcaccaataattttctggatatcaagttgcatcttaaaatacttgatgtatgtcactgaatcttctcgcccggtatacatcttccataccggcatcttgaacttagacgagggcaaggcattaatatatgccgagaattgtgatccccttgacctgtctaattttaaggtctaaaagttttgggcaagctaggcccttgatcatgttccttatttgatccaattgtgcttgcacagaatgatccgttggtcgattggcccttcttgaatgggctacaaccctgaatgtgttagggtttggctggccactcctggaaggctggactagccttggccagccagccccattacaggcggctcttgatggtcaactagccctatgctaggtagggtttggccactgttttcccctaattagttggtgcaacctgtacgttgacaggagatactgtttaatccatacttatgaaattataaactgtaaaccgcacaacaaaaggttttaaacgtacatgcagtttatgcagtgtggttagattttgacgttattctcattgtccaattaaatcacaaaatataccaaagcaatacacagtcaggttcaataaccagagtttgcaaacaatacaatttgactagtatgtcatgaagacagcgcctcaaaatttcaatgtcaacaaatgtgaactttttctttaattgaccgaagcaaagtgagaagctaaacaacaaatgaagaggaaaaaataatggcataaagcaagggtagaacattacgaatagccctaccatgtcaacaacataggacaaattaatctcttgcagagcctttaaaattttaatgttgtttcaagaacatctttctctacagaatggcaaggtcctttcttggaagaccacccgctacctatatctcatgaagaatatgaaaaggcctcagtaaactgcaaagcatttacccctttgaggccaactaaccgctggccacaatgtcatgtattgcactactaatgctgatatcgtcagatcggacggccaatttcattgcgacctcctttgtactatcgatcccaaaggacaaacgaaccaacaccttcacgttgcctatgtaaacaccagatagtagacatgtgtgcgacctcgagttgttgggaacaacttcagagccctgaaacaaagttaaaaaaaatataagacaaagaaattaacagcttcttgaaagcaagctagaaatgataaggttcttattttcacactgtcgtatgggaggcatatatgaatagacagagatactaagggggtcattacaagcgtaatattgaatgtgtcaataagttaacccccttttttttgggcaagtcaggaaaatgactatttggtagttaaaagaagcagaaaaaagttttccttgtacacattctatcagtagtcttttccatttttatttttaaagacagatcacatgtctaagaatgacctcccaaatttattagagagcctcacttatggcagatgaaggtaacttatcacataaaacattaggaaaacttacataaatacataaaacctgtctctaaccacataaagcaagcactagtatcttactgtagaatgccccaatctctactaagatcttggaaagaaaagaccctcaaaagcacacttaacgtgatatttttaaagattaaatattagctgaaatagcaaactaattcatccactaatcttatctctctactaaatcctttgtacaaaacacatccatcccctaatgtctcaaaacccttcttttcagttgacagttgacaccctaccaaacactcaaaaacaatattttcatgccggactggaatgtctcaattatttacatattccaaaagccaatatattttattcatcatttctcagttattgcatatacaacgcacttactggatgtgaccgaccaccctataccctatagcctgaagcagtctgatacttataaagacttttgtcttttcagaggatattactagtgtaccttataacatgttacatagcaaaaaaagaactgatgggaaatacaattaacttacctcacaaggctgcattcccagaaggctgatgactgcattcacagcttcagttaggctctctctagggccaagaccatattcatccacctgctcgctgtcaggatccatgctttcccatgcattcctgaaattggagactggtactttcaacacgtaatctgccgcaacaacctcaaggtcctccagctggtactcatcttctacaccatcttcatcagcctcacctgtgctaggatcaacctggaaaatccagaaaactagtatgcatgaaaaacacattatatatagccttcttcagaattcattccaccttgtttaaaaatccctaacctttgtggttgattttctagtaagcagtggccatagaatataatatgcagtaaatcattcatgctaggtacgtgttaaaattagaatatatggccaaagacattagaatacagatgattcagcacttaaagtctagaccttcttcaaataagactatgcagttgctacaacaacgttgttctttcacatattttcaaaattgacaacagaaaccaaaccgtgtgtcagcacacagctcaaatcatatttactctctacaacctatataaatatttatcctatatatggttttaaccatataaaataacaagtaaacatataaagagatgcaaggcaatgtcaaagatgaaaggaaagaactagatacctctttaacaataaatctcaacatgtttgaaaattttccaactgcagagactccttcaggcttttcaaatgccacaaaggtctgtccaggtgtatcataaggaagagctctaagaggctttgatgctacttcagtgaaatcctcggcttccgaagcatccactaaaacagtgacctgccaacaggtcggaagatacattttaaggatctaattaccagtcacaaaaagaacaaggatgtttccttttctaatttagtaattacattttccagtaattgctctgggattgtattggtgcagttatactggaacacaacatggctgtcaaaaatatgcttaacaacattaactgcgtattcagtttctgcttccgtcaactccacaggtggcgaggactggtaacaataataaacacac

SEQ ID NO: 184233 - DNA, 2817 bp, Cannabis indica
aaaccgacgcctaatctatacgaatattaaaaactatcgcctatagtgtagtatagacgacgatttttaacactcagttaatttttttagcgatagtctaaaaaaaaaaagcatttttcaaaccgtcgcgaattctgccttttgtagtagtgaaggacttttgtctaatttcattcaattttactatttcaatgattgtttatgtactaaaccatgatctccagactttaatatctaccaaatcatacccctcgaactttgacatgtactaaattatgttccttgaattttcatccatgttagacttttttactaaaattggaaaaaagccttaaatccaacaattttaatagttcaggggacatttttaacgatcttaaaagttcaagggacataatttggtacatgtcaaagtttagggggcaaaaatcctaattaatcttttatttactagaaaagtaaataaataaaaacttaccagcaaccttgaacagctcttgaattgagtcaggtaggattattagcttcccatattgttgttgttgatgttgatgatgatgatggataataactcttttcttcattgtagtgtcacatattatgttcttctcttttggtcctttgaaataataatcattctcaatattattcattttatatcccaagctagtttcttccccatcattcatcttctgtacaaggaaaaaaatatcaaagacaagtaaaatattgataccgaataaggtcggttttaagattgggtaggccttcagaaaaaattattgtgccctttatactattaaaaaatacgtataattttaaaggcaaaaaagtatttttggcccctgaatcgggtgggtcctaagtacggacctactccatcttaatccaagcccgaactttaccaaaactcatgaaattatttcctattgcatgtaatatttgagtatagttagtgagtggacatatcactcataaattgaattgctttaccataatgaaattattcatgatgatgttcccatcttcaacatttgcttgtatgatattcatcaatggtgttatgttgagcaataatatttgagcaagctctgttgttctaactgtaaacggttgtggtttgtaacataaaactccaatttctccaaatgtgtctcctgcatgtgcttttccaataacctatgaagccacatatagaatgttagggttaggtatcgttctcggttaaagggagataggtttgcacttacggtccacctatttagaggcccttaaaaggtttttttttcttataaaaaacacttttttaaaaagggttcaataatatttttttggctatttaggatttttaccctccgaactatgatatatgtattcttgtgcccctgaacttttcaggctgttacaaatggtttttgaactattcacaatattgtaaattagtcctcaagttttgtcacacgtgacaaacaaaatgatgacatgactgtttaaccaattgtcacatcaacgctacgtgtataatttaactacattaagaaaaataaaaaattatgcatttttaaaaaaatattaaattaaaaatcaattcatgattaaaaaaattacgtaaaattaaattataaaaataaattattttttaaaaaaaattaattacacacgtaacattcattgacgcgacaactagctaagcaacaatgtcattattttgtttgccacatgtaataaaacttgacagaataatcaatttataatactgtgaatagtttataaaccattttcaacgaactaaaaaattgagaactaaaaatccctaatagcctattttttttctacttaaaatccacccaatcttagaaccgaccataattttgtttttataaatgcaattaactaggccatatagtcatgattgtattaaatatgttgaccgaggttttcagcaactaattaaatagtaaaatgagaagagctgaagaaagtttaatgcatgtaatttttacgtggttggtgcattaatgagtcttagtccacgagtcattgttatttatgagagtgtttgactttcttcagctcttctcattctactatttaattggttgccgaaaatctcgatcaacaaaataaatacaaaataatttatttactccacataattatgtatttgataaaaatatattttgtgaataacaactacacttacttgatcttggccaggagtagtatttgatatgaaatcctgcaggtgtagccatgatattttcaagtaaaaattttatgttagaaattaaagattattatttaaattaggattattttgtgaatccatgcaggactgaaactaaattgattaacttactacagatcctgaaactagtatatatagataagttggagcctcattttgcaaaataacatcttctttagctgggaagtactctacctccatctctgaaatcttttaattaaaataaaacaaatattattatctcgtaaataaatatttataaccgaataaatatcaaaataaatgtgcaattagttatttaaatgttgatttagttattcataatcataggcgaactcacatatatctcgatcatttttaatcgggaaaaaatgtatatatatttgattagttataacatatatttataattatatataacatgtataaatagtatatcatgtttggtataattattaaaccatcttacacatattaaaagttaaaacctggttaatatttaaaatttactctttagtacttcaattttaattctagatccattactgttcttaataatttattttttt

SEQ ID NO: 184234 - DNA, 4489 bp, Cannabis indica
tgatatgacatacaatatcttcaattttttcatcttcttctgtacaagaatcatcttcttcttccgaatcatcctctgctgatctgaattcattaattccttccacatttgggtcttcatccttctccaattcctcaaaatgatcttccccgactataggctcaaatactacctcgctgtcaaaagaaatggattttcttttcctaaggtatactttcagctttctttcactgatggcttcctcctcacgtagaacttgttccgattcttgtatcactgagttcgaacttattcttcctctagcattgaagtcttcccataaattaatatctgcacttctaaactcttctcttctcttcggtctaactatcttgagaataccttcaaaaatgatgtttatattatccatagtagcttttacttgtcttgaagaaggcacccgaacttgcttttggtccagtaaaatagtaaaagggcccaagtgtttgtaattaaattggcccatgtcacttctcatcacctccaatcccattaaaggggcaatctccctcaccggcccacttaaaatctggcccatactaacctttggccccaaacactccaaataattaatatttggccactccctaacacatatacggcccatctccctaaaaatatgtccctggccccttttattaaatgacttaatcattaattgattaaatccaattgaatccaggcccatcttcccaaggcccaacaacctctttggaacacatagagggtttgtcccactaacaccattaatccacgtgtcataagggtggagaagaatcatcacatctggtgctttatccacatacttaccacataaattttgaaataaccgaccaaaaattctcttaagagtcacttcttctttctttttggcttttccaacacaaggcacatcaatgaagaccgaacggcactcctcctcaaaactctcagtcgtaccacttaaatgtccttcttcgtgtcctacggcctccacagcagcttttctctgcacactaaatgacttttcgacttcgcctgcttcgggagtcgaactctcattaaatgcgttaagattacagcagctatccacctcgagaattgatgtgacatcaattgcctgcccccacccagtcttctcgacttctttctcaatgcagttggactccaccagcgtttgattctccgacatctgagcaccatcttcgttctgaacattaatggcctcgccgtccttcattacctccgtatatcgatcagcccctgcatcgtccctcgtcgttccctcaatcagaccctcttcaaacccctcatcatcattttcgatcaaccgacacatagccgtatcttgaaaccagagagtgctgaaccctccattaaatctgtagtttctatcattgagtttgaaaaatttcaaaaccagatgaagattgtcaattgttactgctaagatctcaggaataaaaccatcggagtgtccctccaatttcaatcttaagtggggcaaaaaattcatttcagtcgtctccttatcaacgtctaataggcctccgcatagagcaccaatcttcctcatcgttttcatcctccagaggcttatgggaagcccttcgatcccaatccaagatcccctacaatcaatcttcacatctttgctctgtttttcgagcgaccaattgacaaaggtcactactgcacacgcacctgccactttcttctgttttaacttcagcaattcctccttttcattttcatccttgcaccatataattgtcctatcatcaaacaactgacttacttcgagttttttccccaattccatagataaattaaagaaaatacaactccaagaactttcactgttgtctctgaacataataaccgccaacttccagtctttagtgcattgtttaggacttaaatattctgtgaaatttttctggttgagccgctttgctggaaaattatttttaaaccaaaatcctggcttgaaagatggtaaaaaatcccattcaccaagattgccatatttcatattcctctgttgcttctggtgtcgtccactctcttccctggctttgcttccatatttttgtggtgctacctctttatccactgactgttttaccacattagcccatgaagctttattgcttgccacagggatatcttctattctccccatgggctttcttctcaataagctactaagacaatcttcgaactccctccagcctctcgcttccttttcttcaggtacgatcaccatctttaccatgttgtttctcagtacagagatcttaagaaatacacccttcgtattctggaagacctccaagaagcagctgattgtatagttccgaaaggatcttttgaatgagttccgctgccttccatcttttttctgtatctcctccaaattttccagaatccaagcagctgcatcaattgttacagctatctcgaatcctgctattctagtcctctcgcaaattctcaccattccaccatcattggataatgttagcatgaacactttgtgttcagttctgaagctccaatacctatgtggccttggactaacagactcagaacacttctcacctccaaaaccagtggggtcatggatgtttttcttcccatgaccagtggggccacggtgccgggacgaccaatacttgtcatggccaagaaggccattgaaggatcgtacgtgcatgagttctctcaaaagtaggagagagaagagagcattttaaatatttagaacacagtacactacatgaatcttcagaactccttgttaagtaaaccagtagcttctgttgtggagaaactgaagccctatttactgtgagaaggaagaaagttggctcaagagattgttttagtgtacagcagcaaacatggcatacaagtccatggttaggattctatgcttgctacttggttcaaatgattcacttgatagtttagttctcaaattctcaatggttaaaggagtttctaacaatgctgtcataatagaggatgtggtcttgattctcttgagcaaaagtaatctacataattacaactgcagtacgcataaaaagagataaatatatacataatattttctgttagaacgatgcaaataccatcgaatgagtagtgaatgaagttacctctattggagccagattctgcttttgaaatttactcttcttgtaggctatcaccatgcaaccccaccgatacggagcagcccatattttaccatcaggatcaatacacccatcatggttcctgcgtagatatacctgagattcttttagcaaaaagcttattgtggataacaataatgacaataataatgataataatctcatgtgaagttataccaataatattgaagagcaagcttgcttttaaacttggacaactaaaaaaagacatacgtgtcaaagttgaataacattccaactctgtcttatttgcatatcttaatgttgactgtcttttatcccacttttttttaaaatctataacaagacaaaaggataagcatgacatagactagatcaactagaaataagacttacacataatatacaaatattatatatacatatatatatatatgtatgtatggatgcatacttatctggagcatgcatgatgtaactcaaaatttcaataataatttagatgaatatgctactcagaaaagaagaggagacgagattcttttcttactttccattgggtgcttagccctttaaaccagtcttgatcttctaccccttctaggggctcaagtagagacttcttaatagcataactgagccatgagtcaccaacactaaccatatcagctgccacaacagatgacgacccaacattaccattgtcaaagactgttgctagattagaaaagatgccctcaagatttccgtgatacttcaattgaaattttaatctctttccttgggcttgcataaactccttcatgtcaaaaagaaattaaaatgacaaactatattaactattaatgtactcagaaacatggctagcagcagagtagatgtaagcacaaaatagtaaactgaaaagataaacaaaaaccaactgttttgaggtactcaagttaggaactacttgcaacagagatttattcaaactgaagagaaagaggcattttacatatgttcaaattgaagaaaaggagagttgctactgaccttaatccatgaaggaggtacagagccacgtagagcagaaattttcaaaggtacagtcaaagcatacgttttggatttccaagttttgaatgcttcttccaactttttatcatctaaattttccacaatatcaactattttcagctcttgattatctgctctgcgtcacaagatatacagttacagttatatcaaccaagccctaacaaaaaaagacggcacccagtatctagagagagagagagaga

SEQ ID NO: 184235 - DNA, 4274 bp, Cannabis indica
taaaatttgtacttgtgcagattaaaagttgatttgagagaaataagaatttttattaaaagacaaataagccactagtccattacatcaccatagatcgctaaaaaaacaaaaacaacaaaaagcaaaccatgcagtttacaaatagtaaacgatttaattcaatctacacaaatttatatatattttaaaaaaattataagcactaactaatattttaatgtaaaaaataataatttaaaaatcttatacatttcatataaatatattttaaaatgcaatagatcaaatgtggatattccaatattatttataagaaaatataatatttcttcaaatttcatcgcactttaaagattaaaactaagctaaacttcgtttcttctacatccccagcaagtgtcatagacggattactaacacataacacaggtcaatgcaaattagcaggctcaaaaagtcatatgatatggaaagaatgaattttgtatatattgaaatgaatcataaattgcacaaagggagaatcctttatttggaaaattgaatttatgatatataatatatataacaatgattaaattcatggcagaatctacttccaacattgggctagctggacaatgaacttctttcacaacagctcctagaccccttgcctgtgttgcagttgagctcaacagctcaaaaaattggtatcagtctcggctaccagattttcactaggactctttcatcagatatgctactacgaagcccaaaaccgcaccagcaacaaccttaacaaatgaattcaaacaacatcaattagtgtcaactaccaaaggacagaatacatagaatattaagattcagagtttccaataaaacgtttcaattattttatgctgtacgacaatgaaagaaagttcagttcgctacttctccatccttgatcaaagcattcaagattgacaattctgttgactcataaccacaagcatagactttaagtgcaaatatcaggaatcaagatcaagggtcatggccaagttgcacttatagaaacatttcacatacaaacccatccaacataacagaagcataaaaacaagtaagcaagaaatgattgggttttggtaattgttgagtttgagaatttgtgaaagaaagaagtaattctcattaattgaaaacagagagtacaagttgtgattatatacagtgtagcttaggctagctaattacaattagcaactagctagctaaagtttaacagaaaataacagagaaaaagaaccaaggggacaactaactcctaaccaacttactgtaacagtcccctcaaactaagtgttgttggaaagaactcttagtttgtcccttaaaaaaggaaaacgggaactggatataggtttggttaggcaatcagccagttgtgcagtagcaggaacatgttggacttgaatctgtttattgatgaccttgtctcatacaaaataaaggtcaatctcaatatgctttgttcgagcatgcaaaactggatgagcagctaacatcactgtgctaaggttgtcacaccatatggaaggaactagagtggagttgaaatgaagttcctgtagtaaagattgaatccaggagatttctgtgacaacagccaagcttcaaaattatgcccctgttgaagacctggagattctttttggactaccatgagacaaggttatccccaaagaatatgcaatttccagtggtggatcttcaatcatctggatccaaggcccctttgaaatgagatgatttgtgtagctgcaaaccatagtcaagagtccttgccagataccttagaatcctcttaacagcaacccagtgagactgaagaggattgtgcataaattggcagaccttgtggacactaaaggcagtatctggccttgtgataacagcatactggagagctctcacaatggacctatgcagagttggatcctcaacaggatcacttccaaagttagacaacctttgcacggtaaatcttgaaggtatttttgctgagataagaatagaccatcattagtgtgaatgacctgaatgcccaagaagtagtcaacagtgccaagatctttgagagcaaatgtttgatatagcttattaattaagtctgaaacaaccaaatcattgcttctaatgacaagaatgtcatctacatagactagtatataagtgcaactattggatgtggcttgaacaaacaaagaatgatctgttttggcaaagatgaatccaaggccaatgagagcagcagataatttgtcaaagcaggccttgggggcctgctttaagccatacaaggctttgttaagtttacacacaacagtaggattttgaggatccacataacctggaggttgagtcatatagatcttttcatcaagatcaccatttaagaatgcattgtccacatctagttgtcttattttccacctttttgtaatggcaattctgagaacccctttgattgtgacaggttttaccactggactaaaggtctcattgaaatcaaaaccaagttgttggtggtaaccttttgctactaacttggctttgtacctagaaatggatccatctgcatattcttttattctgtacacccacttgcaccttgttgcagctctaccaggtgtaagaggaagtaacactcaagttccatttttcttgagagcataatattcagtgtccatagctgcactccatttagcattcttcaaagcttcattaacagaggtaggttcaagagaagccaattagaacttttggtttatgaattcctaacttcgtcctggtagtcataggatgagtgttacgtgtagtgatagctaaaacaagagcaatagtattagtaggcaatgtggcaacaagattagttggcacagatataggaggagcaatagtattagtaggcaatgtggcaacaagattagttggcacagatacaagtgtagtatgatcagatgagaaattgtgagacacaggagaggaaaatgactcagagttatgaggcagagtttgagtactagaggcaagagtaagacgggtgttttggtgagcctaatatggtataggatcactgttttgactagaggtgtgtggggtaacaaaagcactaggttgtggtggattaaaaaaatgaaattgagctggtaagggagcagtggaagaagagataggtggttggccaagaatagtgaaaaggggagacacagatgatgagagtttagattcaacaacaacttttgagaatggaaaacctaactcatcaaataagacatccctagaaatgtaaagtctaccatcttttgctaagcacttatacccttaatgagttccaaaacacacaaggttgagatctatactgaagtttattcttgttacatggtcttagatttggttaacataaataccaaaacactcttagcatagagtaatgaggcttagtatgaaatcaaacctcaagtggagaaagaaaattcaattgaggagagggcattctatggatcaagaaggctgcagaaatgcatgcctcagtccaatactgtaatggaagagtagagttagagcactctctatgatatatttatgttttctctcaactaccccattctgctcatgtgtgtgaggacataaaagtttgtgaattataactctgattaattaagcaagtaagcaaaagacctgtattcaccctagtccgattgaataacttttatcttgtgtcctagctataattcaacttgtgttttagaaatggtaaaggtaggtagggcctcatctttggttctcaataaataaatccatgtatgcctagagaaggcatctaaaaagctaatatagtacctatacccagtaggagaatcgatgggagcaagtccccataagtcaatatgtatgagagatatagacagtagtaaaattaggaaaaggcaacttatgatgtttccccaaacaacaagcaacacacaaatcaggtaaaagaaaatttgttttattgcttttgagtggaatattacaagaggaaagagcaacttttacaattttggttgctcgatggcctaacctattgtgccataatgaaaaatcacaagaagaaggagacaaaacatgaatgttacagtgtgtagtggccaaactggtttctgtggactgactggggcaagtagtggaagtggaagtggtgtcttgaacaagattgagttgatttggatcgaacttgtaaagccctttaacaagcttcc

SEQ ID NO: 184236 - DNA, 4823 bp, Cannabis indica
aaaattactaattagccttcaaattttaaaaatgaattctctatcaaattatttatgtaaaaaaaatcaactgagtacgattcttattttttttttttaatttccttttatcaaaagaggaaaaagaaaaatctcactattttgtgtacagaaatattaaaaggaataaattaatagtgagaaataagttaagaaaaaaggaaaaaaacaattggcgtttccgtcgcacgaaatgagggaaacttctataagacagcattttgccattccttctcttcttcttctttcttctttcttttccttttctctttctctctctaaaaagctaaagaaaagctagtgctaatcaaccatggcctcctcttcctcggaggaactgaagcaagaaccgcaacaaccgccggtcccggtcaaggaatgtgtgcacaagaccaaactgattcaattcctgggccgtaccactcccatcgtcctccaaaacgacaatggcccttgccctctcctcgccatatgtattttctttttcttccctctctatgtaaatatataggaatctgtattgctagggtttggttgatctgttgaacttgtttggttgccgagaagcgggaaatgaggagattgaggaattggattttggtgttgaataattggagaaatggttgaattaggagaggttgtaatcagttggattttcctgaaatggatcattcgcattctcggcttagagttatcttttcttggtgtccaaacattgaatttgcaatgttcttaactcatggacttgtacgggaaattgctttgtttctaggttttggcggtgttgaactgcttcaaatatttttgatttgtgttgtttatctttttgaatcttgaacaactgtgcttatttgttgttgttgatgccttattataaattcgttattagaaaattgtattctaatgaaaggagagtctgcaagaagttaccaaaaaattgtattgggcattctttatattgaaacttgagcatgtttttgtggtacagagctttatgtagtagcactgtttcaatgattatgtagtttcagtgttatttggccctttgtagcaatcaagtattggaaaattaagttctcttacactatcatactttgtgttttggggtccctacaggtaatattcttctgctcaagaacaacttgactttgagtccagatgtgaccgaagtttcgcaggagaaactgctgtctcttgttgcagaacgattaattgattcaaatagtaatatcgatgtaatactaaaagttataacttgcatttttgtcataagtgttgtgtttttagcttttcattgaaattcaccacgtttatggttacaatgttgtagaataaagatgagggctatgctgagaatcaacagcagaacattgctgatgctattgatctgcttcctcgacttgcaacagggattgatgtaaatataaaattcaggaggttaaatataaacgtcctttctttaccttatggtttcttgtcatttgatatttacttggtctaatcaagatttatgtgatgattgcagaataagtgatttcgagttcacacgagaatgtgccatatttgatttgttggatattccactttatcatggttggatagttgatccccaggtttggtctttcacttttgttatatgttacctatctatttgattacatactaaaaagtacttgttccacattttaatttggttatatcaaattctatgatattttcttgtaattttttaagaaacattttccaacagatacatataaagtacttatgtacacaactttttttgggtattgtcttgccggcctttctcattcaatgaatttaaaaatttctcagtacttattgcatgtgctctcagtacttattccttgttcaattcttggatctctaggtattgaggttcttaggagcaccaagtgtgtctatgattgaaaagaaaataaacttctatcttgctgttgtccatgacagtatccttgctcttatactttataagtattcatcgggcactgggttttcttgttttaaattacattttttcattgccttccgtctgtttgaaagccaaaaatgcctaacatcatctttcgtgtttcgaccttcacataacttcaaaggcataatcagtcaggcactttacatgattttaatgaagtgtttttaactgttgatatattgttatctttttagatagattagatagcgcaatagatctgaaagtgaaaagtagtgatctgttgaatatctacatctggctgttgttccttccctctcttttttcttgcaatgaaaaacggcactttgatgcacaggcactttaacagtttcaattctgttaatattcttaatttttagttgtcttttatgattatatcttatttaggaatttggacattttgttttgtatgcaaataaactcagatttgttgattaatcaaatgaaaattaaaagttcacttatctcattttgagaaatgcattgttgctgtttgtttgcatttaacctgtcactatgttcctggccccacttcccttgataattgtattcttgagttactatggtttttttttggcttgatattacattcatgcatgtttttcaggattatgaaactgccaatgccattggatcaaagtcatataatacactgatggaggagcttgtggcccttgaaacacgaaatgagagagaatacaaaaattctcctgaagaagattgcgttgattttgctgcagcaacagcagcaactctgggtgtcccttctccatgcctttctaaagctagatcttttgatgattctccacatttagactccgatcaagaaaatgcaagaaaaggggaccttgaagaggaagcagagttgttgagagctttaaaaatgtcagagtctgaactgctgccttcactggatgattctcttgtagctgataataataaaggacctgtgtctttcagttcagatgaaagcacacatgtccagatgattgtgcctgtaggttctgtagatatgttagagcagcatgttttcgaaaataacattttccataatccagacttatctatatcagctgactgcaatgcctccaggaatggaagtgatgagttagtgtgttttgggagtactccagattatgctttgtatccattttcaaaggcaaatggagaaaatagtagcgatctccaaacatatgtcaaaccagaagggcattctcctatcattgatgaagttgaaaagagcagtgttgacacactggtccaaattcaaaattctgtctctctttcacctggaatttgcactccatctgcagatgagcatcatgcaaatattccacaaagcagtgaaataagcgataacatattaaattctaccatagatattcacaagattgcagataagacagttgaatgctgctcagcagaattatcatctttaccagtgccgaatgcagatgtgcattcagattcatccagtgataggatgcaacagcttgacacatcagaagctttgacttcaagtgtcgatgggagtgagcccatttatgaaggggaagaatgtattttggatcctgcaactgcaatttttgaagacagggagccaatttatgaaggtgaagtggtcctcgctaatcaaggtgacaaagacaccgtagactctaggccaaaggatgaaattactccccaagcaggttagcaaggcttactgttggctaactagtagagttttttgaagattgattactatttatgtaactggcagatatattcatttacaagatgttctgaacaagtttctgtctttgtttggcttcaggtgaactaattaggagttttttgaagagcaatgctagtcaattgactttctacgggtacttacaatttaaacttctaactcctcattttatgtatgtatagatagactttctgtttttctgggctgatgtccaagttttctcatccttttccattttgatttactttttttttcttaattgtttgtgcagccttttctgcttacaagatggtcttaaagagcgtgagctgtgtgtctttttccgtaataatcacttcagcaccatgtttaaggtcagttgattacacttttcttcatatactgaaaaaacctaatgtatcaatttatgaattagatgagaaacacttcctttggtccttagattgtgctatattgcctctaaatgtcttgagagtagtatttactgtttttgtactttttctagtttaaaggggagctttatcttttggctacggaccaagggtacataaatcagcctgacttggtatgggagaagctaaatgaggtaatatatagtttcctcttataaatggttctcgttgatcaagttttggtagtgtagtagtcaccgattacagtcttagacgaaatacgattgaaatgcagtaacatttctcatgcaataaatttgtagaaagtattttgaatagataggagaactgcttggtgctttgtttttcagtatgggccacatgtaatgcctttttgtttgacatttataggaagagcgtagttacttgttatattatgtttattatggttgagaggaaagcttttaacaaacttgtgctgctttgggctatgctcggaatgtaggataaaataaaataacattatgtccttattttaatactttggtccataaatttacgtctagatgtttgccacaaaattgcattaccttttgtggaaatagaaaaagaatatgaaaattgcattgtgttcctgaaaagtttgatatttgttggtagt

SEQ ID NO: 184237 - DNA, 1461 bp, Cannabis indica
cttattatagatactccctacaggagtctatgttcaacatgcaatgattaacatgtaacagtctcatgaagcaaatattgctctcatggtataaatcccatgaacatagtctcttgccgccagtgtttattgatgctatactgctcttgctggtgctgatctgtgggcatgggcgctctctgctaaaataacatggtgattcataccttatcataaaacactacatccattggtttgtttgttctacacttagattcagtcttctgtaatgtataaaccaaagagtctctcttctgatgtctgtgtccttgactgcatgttattttctaataaccttgttgatctagtttcttacactccttactcaacgaaagatgaacaaacatctatatttacaacttggatgatacattgtgttctaacttttctttctttttattaaaaggggtgaatgctgacgatgttcgagtcacggttgccgctcctgcagctcgtggagaagctaataatgaacttttggagtttatgggaaaagtatactttcgataccagttcatcctttgctccctcctagtcctactctctctttctcattcaaaatttagcctcactttatttggtttcatacaggtgttgggtctgagattgagccagatgactcttcaaagaggatggaataacaaatcaaaactacttgtggtgagtagaacaatattatttagtaaattttggaccatatagcatataactagttactcatcgtttccatacaacaaatcatattattacttcaggttgaggatttatctgcaagacaagtgtacgagaagcttctggaggctgtgcaaccatgaagaagctatgtaactctcatcttttttgttccaatttgttgaattgactgatagttatatacatttgtgttctttccctggcaataaagacttcaaaaccagggatttaactactgactctacttgttagtgttccggttgaccagctttcgtttggcttggcttgttcaagtgtagtaaaaacaacattgtttggctaaaggtgcaaatgtaactaaagaagctataaaaattcagagcatattgtaaactttggccaaatttggtattaaaagttgttttttctattatgtttttgagaattggtataaaaatagataatgtatatttagctcacttttggtcatggaagttacaaccctcatcatcaccttatactattagtgcaccagaagacttcatagacaaattttgtgaaatatttgttgcccgtagtaatgagattctattggtaagaatttaactatctctaatttcatttctctatttctctctatatgttcatctatcataaaaaaaacccatttattaatgaaaaatacataaagcactatttttttttttagggtaaatactatttttggatcctatgttttgcaaaagttat

SEQ ID NO: 184238 - DNA, 5707 bp, Cannabis indica
tcctgttcatttgtcctcaacatcacaactttctataggcaccacgagttttgtaagggtgagtatcatcacacgtaatcccagccctaccatttctgtattattcttcctttttttctccgcttactttttaaggcagtttcctttgtattgctttcaaaatgcgctaaacggtttcgctgcttcccgttcccgctatttaactacaaacgaaaagcacgcttcacgaccaaccccacattctgggccccaataacctacaacacgtcactcaatcctacggttgtgattatccaacgtatatacttgacgattaggagaatagtactatagtcatctcgtacaactggtttcagtggattatttcttcatcatcgtcttcacttgccgttattttacaaagctaacagttacctttgtccctgtcacagaccgttaggtgctgccacctgttctttctctatctctctctctataaatagctttctctcgagtcttgattcccatcgaagtttttctctttagcttggaaactaagaaaacgaaaatggagcgatcggtttctctctccttcctctctatactgctactgattatctctcccctgtcttcggcgagcttcaacgatggaatgagcttcgccaagtccagcttcccgtctggacaggctcagaagttcatcagggacctcaatctgttcccccaacgcgatgtcaatctcgtcgacggtactgattcgcttgatcagtcgaagaggctcgtcgagaagagcttcaggatgcccaaccttgctgactctggtggtgtctctgtcgaggaccttggccaccatgctggttactataagattgaacattcttatgatgctaggtatgcttttttgttcccttaattgatagattgttgagataaatttaaccgataactttttttttctgtcactttctcttcaatttaagtgggctcgactcgatcgctctcttttatctgcatgttagggtttgataatgattgggtcctgacctcctattgcgaggtgaagtggttttgagaaggaattgggtgatttagttagatggttagagagatgattatttatgagtgtcacatgtactagtttttacaccatacgtatgtgtattatcgtatactgttgacttcaggaaaaaaattaataataactcttactgttgcaactactgtactttaggatgttctaccttttcttcgagtcacgcagcagcaagaaggatcctgttgtaatctggctaacaggaggtccagggtgcagcagtgagttggctgtgttttatgaaaatggtcctttcaatattgcagacaacttgtctcttgtttggaacccatacggttgggataaggttttcttagcccccttttcttcttttgtttaatatatccgttgtaatttggattattttaagtgatataatgctcggtgcttttgaattgctcttgctatattgtatgtccttttgcctgttgagcatattaagtggccttaatatacataaaacacacacacacacacatatgtacgtatatgttatggtaaagttgcattgccatagagctttgtgtcttgtactagtcgtatttcagttttacaatattgcaatgcgtttgttattcctctatttgttccctaaagagtttaccttctcatgtgtttcaattttcaggcatccaatcttttgtatgttgaccaacctactgggactggttttagttacagttctgatagacgtgatattcgtcacaacgaagaaggcgtcagtaatgacctgtatgacttcttacaggtatattttctaaccctttccgtttcagcttatatctatatttatgggaagtttttccaactttatgatctatttataattgtcactgatcagtactttttaagtgatcattcctaatgtcattcaaatactgtaaactcccttttctttaatgacaaaactacctttgattaatatacaaaatactgtaaattctgagttaaaaaaaaataaaaaatgacaatggattgtaaatccataattttgtagacatttttcatcttttctcactgagctgtgagaattaaagccattgttaagtcattaaatttaatatatgtttctgtggtaatactgatgttgtctagcatgcttttttgtaccgtttcaggctttttttgctgaacatcctcatttagcagataatgacttctacattactggtgagtcatatgctgggcactacatacctgcttttgctgctcgagtccaccgtggaaacaaagttaacgaaggaatacatattaacttaaaggtattgctaatatttccaaccttatggtactgttttttattcataatgtatctctaatatttgcaaccttgtggtctgttttttatgcataatttatattttcttttgaaaaaacgctttaatgggtgaaaaattattgacagggatttgccattggcaatggacttacagatcctgcaattcagtacaaggcttacacagattatgcactagacaatggcataataacgaaatctgattataaccatatcaacttgttggttcaaccttgtgaacttgcaataaagctttgtggtaagaaaacgaacaacagtctttctcttttgtttgatcctttttttccctcgatttattgagatctgcttatgagaattcattaatatattatatttgtgcatacctgattgtttatgtgtgcatgttttaggtactgatggtacagtgtcttgcatggcttcttattttgtttgcaatctcgtcttcagtagcatcctagcacgtgctggaaatataaatgtaagaaattcatatcttttataatctacttaaatatttgatcacaagttagtagttagtaaatttctaaggtaagtaagtttttttttttgctcatatctcaagagaaaagttttttcataaaagcttaagtttgaaaagttatttctttttccattctacagtactatgacatcaggaagaaatgtgtgggaagtctttgctatgacttctcaaatatggagaaattcttgaaccagaaacctgtgagggatgcacttggtgttggggaaatagaatttgtgtcatgtagtcgaaccgtttatgaggccatgttgttggactggatgaggaatctcgaagtaggtattcctgctcttcttgaagatggagtgaagttgcttatatacgccggagaatatgatcttatctgcaactggcttggtaggattttggatttcttttatcatagtacaagacatcgatttaatcattatagggaacttctctgctcgttaaatgtgatgataaccttttaatataatatataaattgatatgaacaacagggaattcaagatgggttcatgcaatggaatggtctggtcagaaagagtttggagcctcttctgaagttcctttcttagttgatggatcagaagctggagttctaaaaagccatggacctctcagtttcctcaaggtctgtttcactttcatctgctcacgcactaacacacacacacacatcattgtgaatacacgttttaacttaaattttttaaatcaattaaagcaaatagaagctgacttagttggttggcttggattatgaaaaatcaaacaggtacatgacgcaggccatatggttcccatggaccagccgaaggctgcattggagatgctgattaggtggactcggggcaatctttctgaaattgcagtggagccggacaatttggttgctcagatgtgatatcatctctgggtggtgtattttgttaagcactgtttaaagacttcggaatgctttagaggaatagcgaaatatgttcaaagctgtttcttaatgtggttgtaaatatttccgaaacccctgaatggtagtgggacatgatagttacaggaacaataacaataatgtactagaggtttatttccattcatgatacatggcactctttagtttttctagtcctgtcgtggctttgtccctttaacttggtattaatgtttttcgtttatctggaactgaaatgcctttaaagtttaacgaatttcctggtttcggttgtttgatgggagattgagaaaagggcaataatttggctctcctacgtagatgtaattcgtgttttggaaactggatccataatataggtagtgatgtatttatatctacataatgaaaattaagatatgcatttgtacttttttaatgatgtgtgtctaatgatttatgcacaaatttgatgttgggaagaaatttcagccaattgctttatttgttctatttgttcgattgtattcacaaatttgatgtgtgtgcatgaaaaagttgagcaaggattttcgagtaatatcatgcaataatgaaatgatcataaaaaatatataacattaaatgacacaaaaacagtaaacataaggaaaactgtaaaacaacaatattattaagggatatttgctgccaaattccctcaacatttacaattattaactctaataaaaaaaaaatggcaccaagaaggtacaggtcaaacataatggtagcataaagtacttacttaatagtaactgaaatgaaatgataaaaagggatatttatccaacgttatcatattggtcagtttagtagctggatagaaagtttgagttgttcatcttcaccctccctcatggcttcttctcttacattctctctaattcagactctgaattctcgtacccctcctctgatttccgtctcgccaattccttttcgaacgccacacatttcaacaggttcttccaccttagcaaaaaatgctcatcaccacttcaacttcaagaacaaacaccttacaaggacatcttccgaaggtaaacttacccttttcaagtttctcgattttatcatcttttgagcttctatctttctctggaatggaatcttacgacatgggttttctttggattaaagtgtaaaagcctttatggatcctattctttatctgggaatgtttttaaggaaccttaccaaacaacagtacatttttcatcatggatttatgtttcttcacactgttctattctatgttctcccttttcgttgtctctagctgattctcctaaatttaatttattgtatttagttatttcgatgctaattctgttcatgaaattcatcatcatacatacaggtacagaaggtccacttgaagtagctgaagaatcaaaatttgttcctttaaatgccgaagatgcacaatacggtccacctgtaagttctggttagtttctttccatgtgtctttagcttttctgttcacccatcaaacaaacttttgttttgcaaataaactccattatatttaagatttcctttcaagttttggctgtctaaaacctatagtacactaatcttgaaatatacctgagacaagaattaacttttcttgatttataggctttgttattgctgggttttgaagtggaagaaattgggaaggtgagtcattgttgttttatatatatatatatatacctagtttttagtttggtttatcctttgtatatatcttttcttcctttctttgatgtacatatactaattctttttaaaagatcagatcttttaagagttggttcagtaaatctaagttatgcctcacctcata

SEQ ID NO: 184239 - DNA, 1673 bp, Cannabis indica
tatttatgaaaattctccataaatatgtggtatattaaataccataaaaaatcttataaatactatatttttgtaattttattattaatttccatatttgatgtaattttatcttaattgatttgcttgattcttttataccaaaactcacattacattagtataagaacaggaatataacacaattacacgaatcaccaaccctaatttgcacgtcttacatactgagaaaggattcccaccctcctttcaccaagccattgatcttgggttcatcattactcctcttagcataaaacatttaactagtgttctggtctcacttgttgaccaataaattttttttacacatcataccacattaagagggaaaaaagatacagagaaaacgagtgaaccatactagccctactatgacctggataagaatataaaatatttaagaatttctgttttattttatttgttaaagagcaaaatagtatttagtccattcaatttcaaaacgacctttggagctgtccaaaagcctaccacagcaacaactggttttttcaacgctatatattataggctatttcttcctttctcagtttctctctcatattttcaagaataagattcgtgtcattaatcttccaaaaagaaagaaaaaaatcaaggaaggaaggtgcgaagtagtggtggatctgagataaatatggttatgcaattgggaattagtagtacctatacaaacccaactcaccatggtattcgtaaaggccttttaccaccaacaatatcatattgttcactgtcaacgtctttgaaatactccttttctaattccttaccactgttcaagaaaacttcattatctcttgcctccagtcatagtaatacagtccaaaacgatgtcgttagagacctaataacaacatcaacaagaggaaaacgacaatatgggattgtgcaggcttcaacggccaacgttggagcttgggatggttggaagcctgaaaaggcttcctcttctccttcggttagtgacatcctttggccctccgcaggtaattataatcaattattattattatttgaaataaattggtagatttttcttggaattaattgaatgtgaaaattgttaagcgtaagagctagctagcacgaggagtagggtgtttcaatgataatgcaaacaatgcagcttgttgttgtttataagtacattatcttcttcgtgtgtgtgtttttttttaataggcgggtccaagttccaacatagtacatgtcatgcttaaattttgattggactgattaataatatcttatgatagtaaaagtcgcaataaatatgtataaaaatacaagaataaaagcaaatattgagcatgattttatgctgaattaagggctgaattttcttcattctttatgactgatgagttgaatagatatttatatatataatatatgtgaataatgtaataggggcatttgcggcaatggcgttattaggaaagttggaccagttattggcacctaaaggtgtttctatgacgattgctcctttgggagctgtttgtgctgtcttattcgcctcaccatcttctcctgctgctagggtaacttctcattattaattccttcctttcataatctcaaactaactctaaactcttaactct

SEQ ID NO: 184240 - DNA, 1514 bp, Cannabis indica
tctctctctctctcttgtcttcactatggttcttgctatctccctctttagtctcttaaactgaggatggcggtttattatgatatgagagagaggagaaggataaggctttgcttttatgattttattcaatttgtctaccaaagcagtgaatgtaaaaagaggtaagttcagataatattctgctcgtgcaaaagacatttaagaagagattattgagaatgaaaacctgggaccaaatgtgcatacatgatttgtttttgactatatgctgtataaagtgatgaagcattgattaagatgcaaagctaaaggtaccatgttaataatatttggtttaaaggttgtgaaagcataatattatagtcacctttgtgttcaaccataattcagattttattacccgttttattctgaactgtgggacccaagggccctatccctttgttaaagagctctgtcttacagttgttatgaggaagagagctctatctaaccatgtgaagtataaggtcaatgagaagggttaaaactactttttaataccttataatcatatcatggttaagtactggacaatctctcatctgtgaactaaaaaaaaaaaaaaaaaaatctgggaagctgcctgtcaaagcaatcaagtaagccacatgggaattataaggtcaacatcatatggcaacactccagtttctcagtgtttttgtaatatcaaagtcaatcaatatatctcgtgaaaacaatgatcttgtttagtgaaaagaggaaaagaggaaaagttaagagtgaagtaagaagcttggtgcatttataagaattaacaacatggtccccgaagtgggaagaggtaggtaccagagctttgttgattggcacaataaagcccaatcagatttatgaacatttaagtcactttcgaatagtagctgtgttaaaagtttctgaactactcaaatgttatttacttgaaaatgtaaatcaattgcaaatttcagagcaaaggcaaataatgtttttgcctctttgaataactgatgggaccagatagtgacttcaaatccccatgttaggaatcctcattcatgatcacgagcataattaaaggactggatttagccttggaaactcccaaacctcatgccaaattccaatgttaggccccccactaaatcaaataagacaagggtttgatcactgcattattgcatgtaggatatgccactctcaactttgtaaggcatttgttcacaattaaaaaaaaaaaaaaaaaaaaacttacattagacatttgaactttttattttttatttttttccttcttcaaaagattctacatttaggtcaacgccatgctacttgggtttgattatatgcactatgcaataggggtgttcaataaaatttacaaacagtccaacccgaataaactgcctaaaccaaaccgactaaaccgacaaaaaatacaacccgaaataatacaatgaagatccaaactgcccaatgattatatt

SEQ ID NO: 184241 - DNA, 3927 bp, Cannabis indica
taaataaaacataaaaaatgataatttttaaaaattcttcaattttttttataattatttaagaaatatcttattataaaacactatgtaaattattgaacaagataatgatttcttactatttctttctaaatttgttttgaaagagagaggacatctgtgacgatggaaaaatcatcggctctacatgcaattaaggcgaacatacggccattcttcaaagaacgacccgaatcgacttgagagcaaaacctcatccttaaactaattatttttttctttctaaattaatatatgagttatttattttttcaaaatcaacaatatgtaataaaatagtatatattttcttatttttagggctaagattagaagacttacattcgagatttcttcttctctttgtacctcaacttggcattttctctagcttcgaaatcgaaatcaggagaattcatagaagactcggctcctccaaagtacggggaaaggccgctgtccaatgattcaccacggttgttaccaccaccgtcactatcgacactaaattttgaaaccgaaagagacatgtttgaataagatggttgaactggacaaggcatatagttcatgcttgctagattagaattgttgtcaaaaattgaggaatccactgaagcatcctgcataggttacattaaacaacataattagtaacaaaaataatataataataacaatataagaaaataaattaatatttgcaaaatatataaactttgtagagctactgaagtaattcatttctaaaccacacaaataataataaaaatgtcaatattatactaatttttagtccaatagttgctctagtaattgtgtatgtcagaataatagtattgattagtattatatatatataaaattaatttttttttaaaaaaaaaaaactccagtaaatactttatttatattttttttacaagttttctctacatttatatactactatttatcttttaaatattttttaatataaactttctcaataatattttatatttaaaattgatgaaaaaagtttaaggaatataatattaaatgaatataaaaattagatttattattattatttaacaaaaaacaaaatatttttttaagtatattattattattataagggtttttaagtatattttttagtttttagagaaattattattgtcaaacaacaattatttattgtctaaccaaaaaatatactaaactaatttattaggcataatgcagcttaaaatccaaacaagagagatactttcgaaaatttagaaaataaaaacttttcttccaatcaagtttaaaagaaataaaaattgaagctaaaacacaaacctccatgattcttgagtgtggattatgaaatttatcaagagacaaacccttttccatagaagagtatgagtcatctttatcatcaagtaataaagctctgtttggatcttgatcaaatagttcttcaaagtttcgaaatgtcaaatccacatctggaatattaaaatcatccttccaaacaagttcttcacatactccaaggtcttccatattttgagtccataacttcaaagaaaaaaataacatagacatagacgaattatgagaaaaaaaatagattaaaaaattttattagatgccgaaatagataaaaagtctaccaaaactaataacaaacacattttataaaattatctccaatgcaagatgcatataatgtgctaaatttagcacaaaaaataaacaaatataatatttaacacatttgtaattgtactctaatgcacaataatatttcaaaaggtaaattgatctaaagaaagtaaatatcgttaatgactatccttaaattaaacatttaaaaaattattgatgcgaatattgtaaagaaaatatatttattaaaaaaataatatttattatgtgttaaatttagcataatattatattttatttgaaaaattaaatatatattttttaatttaataattatgctacaaaataataaaaaaaaggccctataaaattaaataaattagacttaattttttttatgacaattatgcttccgacatagcaaaaattctaagtttgtcactactaatcaaaacacccttgaattttttatacaataacataattaaatttttattaaaagttgaactgaacctgattactctgaactggacttctacattgccacaacaagggctctccaccattcaaaggaagaatcccaacatttgaagatgaaggagattgatcaggttttgaaaatggacatgggaaaggatcacatttcagctctcgaaaatcggtcccggtatcttgggagttcagtgaagtgttgttggaaaggttttcttcattgctttgttcttggccattagtattagtagttgttgttgttggtgaaggtttactcacttgagtgagttgaagcctttttaagtccataatttgttgcataataaaactactactgcttctctgcttttgatcttttatctacaaaaaataccatcaaaattataccaagaaacaaaaaagagtttattagtcttaagactgagccaagtggagcatagataagagttcgaatttgctttaaatgagttcgggttaaaaaaataaattggtcgtgttcaggttgacaaaattaatatgagattgactcgttaataatcattagtatattaatgagttgacatgttcatttccattcgaacaagatccagttataaataggttacatgtgacatgtcgtgtcaattcgtttataaatgaatcatattttacacgattattagatgggtcgagtttaaatcaaacatatacatttaatacataacgtgaacatgaattatcacccttattagacaacttaagtggtcaagagaagtgtgtgtttaagtggtaagaaatttaaactcaattaagtatcaaattttcaaaaatttctctaatcttatcaaattttttgcataccttaacttgttgattgaccacattggtatcaccagaggaatgtgaagaagaggccacaaaaacttgtttatcatcatcatcatcatcacttaatttaaaaccccacaaggctgcaaaatccttagcagaaggggatcccatgaagcttccgatggctcgcttttgaagcgctcccgaggcctcgtggagcgcggcggcatcacagatcccacaaacaaacatttgctgatctaaccactgaactctagatggcctaaatctgcaagaatcgcaaagtatcatcctcgaatgcctactcgaaagggcattcgcggaatgaactttcgcgtcgcagcagaggcagaggtgtgctgcatctgccttgcagtaaatcactggcctaaattctgtgcaaaattcacatattttttccattttctttttttctttctcactaattttctcaggaaagttttcaattttgcattccaagaaatttggaatttcaactccaaacactttttttcttcccaaactaactaaagctagtttaatcttacttcaattttcaaagatctgatataaggaagaagaaaaaaaaaagtcaatatttctgtgaaagcttctaaaagagattaagatgaaaaacaaaaggggtttcaaatcttaccttaactaatgaattagctcaaagtcttcaaataaaaatcaaatctttaacaattaaagaaactgaaatcttacctttctgattgtttcccgggaaaactggagaaggaaaaaaaaaagtggggatagatcatcaaactctgtattgtcctttcaagtaacccattaaaagataagcagaattttcccgagaaagggaaagaaaatccagttgtaaaatctgagagagcttttttttttctctctttatcttcgttgttt

SEQ ID NO: 184242 - DNA, 2358 bp, Cannabis indica
ttattttatgtatataaaatcttaaactgtaaaattatataaagttcagtacaattatatttttatatattctttttgtgtatttctaaaatagagaaaaggaaggaagtgaaaattctttctttttgggaaaatagattgaaaaaaactatttttttaatcttcctaggtttttagttatttaaactatttgttaattttttaaaaattcttaagaaaacgagttatgtaataatatttaaatcttatttttttggtaaattattcaaaatttgtaaaactttaatagaaaaaaaaaaggtgaaaaaagttcatattttatcaagatcatggcagaatagtattgcttaaaaaaaacaattattactttttttcgtaagaagaagaagaagaatctgaaccagaaagaagaagaagaagaaacgatcatcaatggcgacagctctggtataccaaatgttctcatcatcagctttactttcactaggcgtatatcacatggcttcctccactcgtctccacctcaaatccccccaatcctactccgccaaacccttccacccattcccaccttcctcctcctcctcctcctctcatccccgcctcaaacacctccagctctacctaatcctcgcatgtctactcctctccttcgctcacaacacaatctcctccttcgattccgatccactcctcaaaggccgaacccccgtccaccgcttcacctccctccaatccgctgcaatctccgccctgttcttcatcctaaccctaactctcctcctctccgattccttcccttcctttctccctcttccttccgatcttttcttcgcaatcgccgctgcactcttcttccttctctcctcactctccgcttcctccgcttcgctccaaacctccgatctccaagccaaatgcgattccgtctcggctcgtacttccgctttggcttcgattctctctataacgctagcttgtaaccctagactgtttgtcgctgatttagggctcggtgcgaccgtttgtctccacggattgtggatgcttcagactggtctctcgctgtacgttgaggcattcataccggaaggttgtcaccggttgttggacgttgttagcggcgttgaaggctccactaaatgcgatttgcaggaatcgagcttgagagctgcggcggttctggatctggcgtttttggttcatgtgctgtttgtttttgtgattgttatggtgacttatgctctggtttcgaagagtgttggggttaggagaatgggttcgtatgaagctttacctactgttagttctactactccacttgatcataatcacattcagatgaaatccatggctggtaaccaagcttagcctttctccccagaaattgaagaagtagaagaagaaagctatgaactttttgtttcaagtaagtgaagaagctttctttatttttttataactcaatttttgtattatatatgtgtgtgtgtgtctttaattcccagatttttgttttctgaacattccatatactaaagaactcttttgctttggaactgaatcttttgatatgtatatatatacatataatatttgctttatgactttagttctgagatttttattgctgaacattccattaacttttggataaagccatagatatcattgtcattaatgaatggtagctattattcttcactgtctttttcttatttcattatttggttttatgatgcaatgctagcaagccattgtttgttcttgtatactccgctttacatttcttagatgctgtcagccatcaatgtaggtgtagctgtgcattaaagaacaaacaatgtttctcattcatgaaatttttaatgcccattaaaaaaacaaaatatgtgatgctatttggtttgtttgtatagaaaatttgtactaaaaggcacaccaccaccggagatgtgatgctgttgcgattggtgttatttatagatatgtgataactattatgaatgcgctgttttatggtggtgctgggcagttggcactggtgcccaaatacatagatagcaatgctttgtttgtataaggtttgagtgttctagatagtaatgagcagttaatataatttactgatagcttagtagaaatttttataagttaatgttagatgggaagctagttgatatatatatatatgtatgggcacctctagaactatagtagtggattgttttttatcactacttatattggtattttggtagtttaattccaaataatttaagatatcaaaattggtatctgttgcatgtaaatataaatataaacatatgtacatatgaatatcaaaataagtatagc

SEQ ID NO: 184243 - DNA, 10707 bp, Cannabis indica
aaaagtgcaatatctcattccacctgggtctagtgattgtgccaacgtggacgacttagccagatatttttgatcttctaaatatctatttcacttttttaatctcaattcgctgctacccaggccaatttagacaattataattcctcattcagataaggcattttaaattaccgaaaataaccttgcgactagaacgaagtcaaccactctttatgtttgttagttagaaagagtcaaaagtaactaagcaacgcgcttccgcttttagggttgtttcagtaatttaaagttattgtaaatattaatcaccgactttggccctaacaaattttaattaattagtgtctaattattttgcttaacattaattaaaccaatagaaagagagatattggtgtacagctggtacggaagacgtggacaagcttggacaacacaacgttgccgttgccctcaatttaatgatcgacggttgattatcaagttgatccatttccgagcttatatcgtacggatgagaattcggggtcggttctttcttacattatttagttatttttaataaatatgataatttagtcatgagattgttgtgtgctttgttttagatactgagttgagattggtttgattagtgcctttcaattcatttattttttaatcttattagtggcttttaaagttagtgtaaaggtcagacaatttttcttttccttgtgaaataagaaattgtaagttttccaatgctccatattccaatgtattattaacaataataataaaaaagtcataaaaaaaaatactaagaccaaataaaaataattttttttaaaaaaataataataatattaaagtgtcttatgtgtcccaccagagttcaaaattgttcttgtccttggaactttaatctataaaagaaaattagacaaatctcattttgtatgaaataataaattaataattgactaatcctacacacattctcaccttgcactaaatcaaacacctttaaattctagtatccattaaccaaatgttcccttattaaactattctggctatttatacattagtacttaccgactatgatcaaatctaattttgttcaaattccctttgagaagaagctattgaccattcttttttttttatctctaaatccaaattctaacttgtgaggcctgccttgttttatattgggcttttcttctcttccaactatagtttgttgttccaagaagccgaggagcatttgggcctttcaaatccaatatccaaatagaactttttctttttgtaaaagaaatccaaatagtccaagtagtagaagtaacagctcctctggctcggaacttgagcaagagagagaaagggagagtgaagtggtagcagatgaaccatggctgccaccacatccatatctctatcaccaccagatttcatctccatgctccaccacaaaccttgtctatttcttaaaccccataagcaatccttctcacccataaccactttctcatccaaaaagactcaaactttccacaacccacttctcaaaatcagaaaacaaaacaacccaatttggagaatttatgccacggccggtgaaattcctccattagaagccaccccacttgagacttctcagcaaattgtctcctccaccggggacgagctcactgccaacatcatttctgctcttctcatcattgcctttgttggtctatctattgtcacagtaggggtaagttttaattttcctccgagctgtattatagcatgaaaatgaaaatcaagttgtgattttgggctaaatttgtgattttgtgaagatggactcttatagctaagttgtaggtgttggtggatttggttttctggttcaggttatctacattggtgtgacggatttcttgcagaaaagggagagagataagtttgagaaagaagaggcagctaaatccaagaagggtggtaagaagaagaaggtaaaagcaagagctggtccaagaggattcggccaaaaaattgtagaggacgaagatttttaatgtaatgtgaatgtgatgattggtgtgggaaatgctccaagtaagctttttcattccgtttgtaacttgtaattgaagctttcccacttttaaattccttttcctagttcctacactttgagtatagtcaaaagtattttaaaaacaaattgttatgaaagttggaggatttggtttggcaaatttaagttgataacttagaagggtgaaggtgaactactagtgttcatttttgggaacattaatgatgaaaacgaggcctagtattagcaaatgatgatcatacaattttcggcttaaaactttgttttcggttgtttctttgtgtgataataatatggcttgtttcgcaatatttacaaggagtgaataatgatgttttataagacatcattcatgaccatatgcaacaatgaataataggataataaacttggttggcccgcaaagcctaatgttatataatatataccataaacttcaaataagtataacgcgaccccttcattaattttgtattttgtagtaaacatatgtatatgaaaatttatgatattcatggtattatattaataacatggtttgtgttggtatagtcgtatagatatatattttgtagtcggaagtgaagataaaagaaaagaaaacaatttaaagaaaaaaatacaagaagaaaagcatttgggaagataagaaaattgtgttatcaaaaagaaaagtcaatacgcatacattgaaaagaaactctggcctctctcacctaaaacataaacagctctccacattgaaatggaaacatttgtacagtcacgttaacgtaacaaactacctcaacatcttcttatcattttcttaatattttttttacacccttaaaaaaagaacttgtatagttgcttatctctgcagggtatctttatcagtgtgtgcgctccacatctgatgaaacctctgacctttgctcgatcgattctatgtataaactttttaaactacacaatgtacaattttgtttcagtacaagcaacatcttttttcttttatttccaaataggctctcaatacctgtcttgaaagataggtacacccattcttgctcctaactaccgggggaggacgacaacaagagggaatctcacactagcctcagttagctgtacaaacaactttctttcctaagccaccagtgcagcagggtgtggagactgagctgcaattctcctttctgtaaccaaaaacaatttagactatcaatttactagtgtgttggccaaaatggcatctatgaagcactactatattacatgttatgtgagaattaccgcatgcaataaaaatggtatatacccacaaatgtcaaataatttaaagaactcaaaagcttatgcattttaaaatttatgggaagaatgaatgtacctccagcagcaacaagtttctctacacgtgcaacaatatgcttcccataagtgtatttcttcaatgcattcaaatgaactttaatacgcgaaaggatcaactcgcgttgttggtcatcacaagtctccaataccttctgtacgacatagttggcaaactgatccttcatcattgcctgcattaacacagacagttgagtagagatggtcgagcatattcattgagaacggcaaaaaaagtagtcaggtacacatattgagacatgcaacaattaacatattaaactaataaatgcattatcttacaaccatattttgatttcattgttgatgttcctaatccagattcactatacaaatccaccatatatttaccaagttggtttcacatgccgagaagataaaagttatcccattcaatcttgattctcacaatacatgtagagttatactactaaattgtgtctaggtgtttccaaaactaaccacctgaaaaggatggtatacatattaacaggtattatacaattacaaacgggtcaaaatatgtaccttctactataaatttatcacaacttttatgcttgcacggttatgccaactaggctaaacaaaaagtaggtagaataacaatatcaatgtgacaaacctgaagaggctcattttcatcagtagagccaagcatttcatttactaataactcacgttcagcagggccaccaaatgttaaacatttttctacaacattagaggcaaacttctgttgactcattataactattttcccagctaattccttgatgatggcggaacgctcatgaggttttccatgctccagcacatgctgttaacagtaagtagaggttacaacacgaagcttatgagaaaacagtaagaatcatatcacagaaaaaaaaaactacagcaaaacaaaaccaaacagaagaactaaaaagttatttcccatctcctatacttcgatgactaaattgactttgcaagaagaattttcccgtaaagttgctcatacgaaatagaacatcaaaatacagtttaaaccaatctgtgaatattagagtaaatgagcattcatatcacaactaccagaggggaagataatgaacctgaacaacataatttccatactgatcttgagctaacatgctaacagctcctaaaatctcatccatcactttactctgtgttgttggatcctcacaatgctccaggactctctgccaaataaagaaatcagcataagcaaccaatttactgtctggtaaacaaaagatgaagtagaaaaagcttaggaacctgtatgacgcgacacccataagggtgagtggatagtgtaaccacttgatcataaaaggttgaaacaataaactgaattgcatcttcaggaacacattcaatacacttctggatcacatggttcccgttctgatcacgaacacagcgcatgatattaccatcaagctccttgaccattttaatcttctggtccaggtcaacaacttctattgcctgaaaaattagcataaggcagatcaggtaataaaattcatcaattttagctaaacatagcacaagcatcttatgaatcagatcagcaagtaaggatactaaccacaacatagttaccttgaagttaaactcttgaaaaaccaggatatacgaatgtcagaaaaaattataataaaaatattagcacataactgagctaatattaaactaatccaaacaaattctagcatatcatgcaggctgaagcacaggctacaccagaaacaacaaaatgttaacacccatcaattaaaataatctaccttttggatcacccgacagccatacatttgaaggcttagtgtcaggacatggccaaaaagcttgttcgctagctccctcctttggtgtgcaagcccatgctcgaaaaactgtatgaaaaacaccaattgtttttaatcttttgtaaaataattataccaattagaaaagcacagcactacaaaggaatgaataaatagaagtaccttctgaataacataattgccaaatacatcagtcatcaaagcaagagcttgaggcatgatttcctgataaaccatgttcttctcttctatggtggctgtttcaagtttttgttgaataaagcgactcccatattgatccgcactgttaatcaaatagagatgacataaccacctttggaacagtatcataaaattatactataaaattattaaagtacccacctgaactcaacaacatgtccagaaatttctgaaagttcaaatgatttggctttattactcttgaactcctccagcagtgaggatgcaaagctttcatccatgttacccccatccagatgccaagctcccatgacacccccaggcaagttcctcattccagaaggatacctcatattaagctcactatgcctcataggactaccaggaccaacaggagaatttggaacaggacttccaggataagacatgccaacaccatatgtagaattcccatagtaaccatgattattagaaccaccagacttcccacccaagggaacaccatactgagatttctgtggcgataagagagatagatatgctttttgaagttcaagtaaattaacataggaattacccaagtagctcctgtcagcagaaggatcattaagggcactaagctgtgctgcagcatactcagatgtcctcatgtactgaagatacataggatccacaaaaggggactgaagagcacctcctcccattggactccccattctaccaagattgtgtgaatcagatgcagcagctgctaggtttgtccagaagtcaaacctcctccaagcactcttgagtccattacaggagattgcacagctgaagccacagcaccgttatcataaaatggcggcacattaccactaccaagttggctagccatcatggatgctaatgcaggattcatagaatatccacccaacccataactagaaaacgatggatttgtaccatccaattgctgatatggagcatgtaaccacctccaccattgagggtggaagtaggagaccccttcaagtaagagttgcttgaagcagatttgtgaagatcgattggcttcctcatgtctgacccactcccattgctcttccctaagtcagaatacaaactttttgctgattgttgattagatgacatgtgcatctgcccagattcagacttcttgaggtagggatgttggccgttatgattctcaccaccttgtaagccaaagagataattctgatgactatcaacatcttgtctcatgtgtgatgagaaatgattctcatcatccatcacaccgtttgttgataagttcattccagacaaagcagctaccaaatctgcagactcgttagtgttagatgagacaccattaaaggagtttgggctagtaatgcctctcttctctgagacactagtcctccctccgccaataggtgtaagacaaggactgggagccctagcaacaagttggggatcaggagtagtgcttcgggacaaggaagcacctagagcagcagcataactatatgaagactgttgacccttactaccatttgcaccatcagaagtcctcatttcatgatgcaaatgtgccagatcagcttcagcagagtttacgttgtctacattttcctcaaaagcatttcggcttgcagggcgagaaggaagcccgccagcaggacttgctcgccccaagtcatcctgcattgacagcaaacttaaataagcatgatctaaaatacagtagaaagaaaaaaaaaataaagaatacactacaccataatgatagaattggaaaggaataaaatagcaaaattgcaattagtctttttcaaaaattcacatgaagaaccacacacgcacttcgactgcatgcaattttttgaatgccaatttatcaaattgatcagactcttttcaaagtacattagttagatgcacaaagggctacataaataaccttccaccaatttcttaaatcttaaatactaattaagatattcaaaatgtacctccccatagtaaattgtcttccgctacatgttttatttcagaggaaatacacacacacacacatcatgaagtttatttacagataagcttaccagtcaaaattcactcaatgtcaacaacatgactacacaagtgttgacaaagatctctgtgtaacaggaacaaaaacgttaatgggtgtaaattcctttaccagtttaatacctcaaagattggcccttttgaaaaggaccaaatccagtttaaataagccattaaaaaaaaaagcagtaatcgaatcattgtcataatttacataagataacttgactatggacaacaaaatgtcaagaatcaacaaagagtcaaaacatttttgctatttataaacaacagatgcatccgaataaaaataccaactttaactagacaccaatagataatctcacatgcgaccacatgtcattaataaattaccaatatttccagaaaaaaaaaattgcagtttgttgatgacaaaaaaatcatcagttaggcaataagcttgttaaaagcagccttcgatactcaggctatcatgaagaataaatgaatataataacataaaataagagtcaatatcagtatgaaaatacagttaaagattgagcaggaccatagaataaactgacctgaataatttcagcaaggctctttgtttgctcccaagtcctaaacccggtaaaccaatcagtccatcgccaccccactctcctgaggcacgtattttctccaactcaaactctccctcttgtttcgtcgagttgaaaccaggcggcatcgaaaacatcgatctaccgctgttatcatcagctctatttccttttcttctgtctccaatcccccccaaagctgagttccctcctttcaacctttgggaaaacctccaatcctcctttgaaagcaaaggaggtggtaaccgaggatttagattaacattcgtgtaatagtaggaaagataagctggatcagaccttagctcttcctcagagacaaaaccattgccattcttagctgcagacaactctgcaaaggcagcagcagcagctgcagcacccccacctccaccgccaaacaatcctcccacggcatttaaagagccctcaacagttggaggagctgatccacttctacacatattcagctcacgttcacgatcatcggaggagtcttgccgccgctgctcccggagcaacaaaccaatctccttctctagctcgtccccaaacgatccctcgttacctccaagcattggccttcttcccaattcagacagcattatctttaaagaaaacttttttacaataccataaatcaaacaaaacttaaatagttctaactaaacactacccacataaaaacaaatcagacccagattcctaaagtaaattccaaaggaaaaaaacttaaactttaaggaaaccccatatttacaaactaagaatttctccctcttacccgatcacggcccaaaaattatacaacacctttaagacaacccagaactccatacacccaaaagggaaaagaaaaaacagttgcaccacacaaaaactgtgtttcttcttcttctccaaaaatttccctaatcataaattattgaaacaattctttgcaacatgttctcatgttaaataaacagcctaaacaaaaaaaaaaaaacaacagaagtataacaagaaagatgaaaagggaagtgagaagtagcgagctgagatcaaaatagaagacaaaatgagaagatatatagagagatgagacacagaacgtagtaagggctatttttgggtttacaaactaaccagaccggcggcgattggttcttacaagaacccttagggttttttccaatttgaaggagaggattaaatacagtgatgtagttagaaagaaatgtaaataattttattttattttattttttgttattacaaaaattaaataagctaattgctcttattcagttcactatactttattaatattcctatgaaatagggtaattgaccaagtgataatagaccaatgttagtaataatataaaaatagaaaatagaaaattattttattttaattttgtgcatgtaaggtaaaaatccaaggctgacacgtaaactctttagattcggtgctacttatataaagggcaaaaaaatatttagtgaaggaaatcaactagatactagtacaggtaatccttttagtaaattatcccaactaccctttctattacattattttcatattagtgtaacattttttttctggttttcttgtccctttccctaatccaaatgatttaaatataaaaaaaaaaattgattttaaaatcctctaattgattccattcattagggttttgtatttgtattccattttatattttatctttttgcatgattttatttaggacataaaaagaggaatttaaacttggtatttcattgttcctactatattgattacaaatacaatggattatatgtgtgatttgtttgaagaatcccttcaaagtttccacaaatgatatcaccttcaattgtgacttaagaaaagttgatgaaccctaagaaccaaacaagttgattcttaataagattgtgtgtcgtgataaaattcaaaaagaaaattattaatggctctttgaaactggactataatagcatcaagaatggaaagaggaaggagttgaatggagagattctccaattcatgttcaggctaccttgaatgtgcttattcacagactatggtccatatgtggatgatttctagttgtaacgtcgcagcctgttagattaatctctttaaaagtgtggtttgacaaaactcctatttaggtgaaagtaaaaagtatccccttttcttttggaacctattcgatctaaataacttgagtttcaaagcagctatgatgtaatcttcctccccgtcaaggtcagcttaaccacaaggcaatttaaacaatagcctaaggcttcacaaaatttaagcctagattttaaaggtaatatacattgttttttatatatataatataggtgatatacattaaaaaagtatatgaaaaaagatttcttcattcaattaatttgaatattaatattcactattagtagtcaacattacaattcaattaat

SEQ ID NO: 184244 - DNA, 10129 bp, Cannabis indica
atctacctatctgccacgtatgaatccacgtgtcacaaactaataatgactcttgaaccttctcatgccaccgtcaaacttctccacaaccacgtgtcaaacccccacgtaccccaaaaaccaccacctctataaataaagttccacaaacctcgatcactacaatccatacataataaacccaattaatcccatcaataattttaatcatggcgagcgaggagtttcgtttggtgtcaccaaaaataagcaacgaaggaaaattaccaagaaaatacacagaagaagggcaaggagcgcagaagaacttgtctccaccattagagtggtacaatattcctcaagggactaagagcttggccttagtggttcaggacatagacgcacctgagccaagtgaccctattgtgccttgggttgtttgggtggtggccaacattccacccaccctcaagggcctccccgaggggttctccggtaaggaaggggaagccggagaagactatgcgtcggttcaagagggttataacgattccaaacttcctgggtggcgtggacctaaggtgcctcatagtgatgctcatcgctttgagtttaagctttatgctttggatgatctagttcatcttggcaacaaggtatacatatatattcctcatataaacatatatacttatatatttatatataaatatataactagttgatgttatgtatttttgtttttttttgaaatggggtttaaaattttgttcttttgaaatttttttaagtgagatatggtactcaattgttccattttcaattgatgagtggtgtgtataaagaatattcagttaattaataatatacttttaaagttaaataaaaaaaatacgattaaacttaaaatttcattacatcagatttaggatccgtataaatcgatctaatggatttaatttaattacaatctgatcccatacatactgagtttgaatattagataaattcaattttttttttttatgggaacaaagataaatttaaattaaatcaataaatatactagaaatactttatttagttggatgactataatttaatatataattagacttaaaaatattagatgtcatattttatatacaatatatatcaatataagttataaatatatatttattgttttagagttttggtaggtgatccttttttcgtatttcatatttggtaagtgatcttattgcaagtgttagggtgtttattttaaattatgaaaatttgggtaaatactgtatgtttttttttttaaaaaaattcccaatttaattttttaaaataatacaaaatagagctgattttaatttttgttaataataagcagataatttaaatttttgtctatccagctttagaaattggttttaagttattttcggttgtaaaatagagaaatatatatgtgtataatttctcaatgagcagtacacttttattaattattagttaaattagatgtataataaagaaatatatatgttcatagtttgttttttatttataaagttagaatttttttttttgaaattatatattcaaaaaatttgaaaaatgtgtaagcgccctattataattacatcagtttaattaaaaaaattaggatttaattgatttggttactggttttaatttatgagtgaagagattgaatgttttttgttttgtgtattatcattatggttattaattaggttacgaaggacaagctgttggaggcaatagaagggcatgtgttgggagaagctgaacttgttgcctattttttaaattaaaggatacatttcatttcttagcctttaataataataataataataataataataataataataattaatgtcttttatttgagatatatgtataataaattagattgaaatattatgattagaatcttaataacttacaatattttaaaatttatactttttttcacaatacatgttgttttaattaagctgagattgcatcaaactagtcgaaaagactaagagagagcaacccttacaaaaattgtcaagagaagtgatgaaccaagaaacatcttgttggctcacttgctttttcctactatgaacaattctgctatacatcatagtttcaattttttgtgaccactatattactccaaaaagcgttatttcaatttcatcaagtctccacatgtagtgcaccaaaagtatttaatacaataatttaagaaaaagataagtatcagaattaccgagttcgagctatgtgtaatattttatattttggttggaataacaatagttatattataacaatagttatatttttattaatgttagtttacaggttcagttttggacggattaggtctgttcctaaagtttagagttaaagacttaaaaaaaattcctttttaaagatacatattaattttaaaaaatactttatgtaaggctcaaaaatatatttttcttacggttcattattttaggaccaacttacaagattacaagaatatttcactttcacaaagattataagatgaattttctctctaacctttctctctctctccacccttacccaatgatctctctccaaccttacccaatgatgatatcactcaagctgtcaataatctgatacataataaattataaaggtgatactgatactatatataggtttgtattgttgctaaaattagctttgttaatatcattactaattaagtctttaaatcagttccaataacgttctttctaaacaaattatctggacgagttgattcggataggatcatattgagtgttctggactgactacgagatatgtggaagtacgttccaaattgatgacaagttatctaaaaaattttttatagatgacaagctatctggtaggactattcggactagcacaattttctgaacaagcaattcaaaatatcgccaagctttctgtaacttctttctagttgcaagttgaagttgcttgacaagttattattacatgttgttgttccctagcccattccaagctcagctgaatcttatcccaatcagctttaggcagtgctcaaatttactatttagtactaccttgataatcatatccgaaggattatcatcaatcggtactttgacaatcttcacaacttaataacttttctgatgaaatgaagctttatacttatgtactttgtacgtttgttttgcacacaatttttggttaattgaattacactttaactaacacaacacacattggtaactttctagttaagttttaactcttttatcaatctagtcaaccaaagtgcctccttgatcaacttccgttaaggccatatattcagtttcagttgtcgacagctccaccaccttttgatggtttactttccaactgattgttgtaccaaacatgttaaaaatacagccatttaatgaatgtcttgtatcaatacaccctgcataattagagttcacatacccattgataacatccaaaactttaattactctatgttttcatgccaaataccaatcccttgtcaacaaattcctttaagtatcttaagatccacttcagggcctcctaatgcttttgtctagggtttcccatgaatctactcaacattttaagtgtatatgctatgtctggtctagtacaaaccatgacatacatgacggagccaacatcaatggcatacgaaacgtttgacatttcagacctctccgtttcatctttaggcatctgagtaacactcaatttaaagtgctgtgtaagtggagtgcttactgcctttacattactcatttcaaacgtatccaatttttttttgatgtagctcttctgattcaagtacaatagcctccttccgctttttcttctaatgtccacgtctaagattctatttgtcggaccaaaatctttcatttcaaacctcttcttcagctgtagtttcaagtgtttgatctcatgcatactcttgctgaaaattagaatgtcatctacatacaccaacacatacaacacatctctttttctttctctgaaatatatgtagagatcaaacatatttctcttcagacctatcttgaccataaaattatcaaatctcttattccattatttgggagattgtttcaaaccgggactttcttaacaagcacaccgtgtgttctttttcaactttcaagatgtttcattaaaatttttctttcaaatgttatacgtgagatttttttattttatacgtgtatgaaataaaattgtttaaatattagacacagatatattttttttttaatttattttattccagaaaaatctattgctttggaccgtacaatacaatacaaaacctttcttcttcttcttgttgctctctttctctcttttctccactttccacaaaacgacacttaattcgttgtcgtttctctctgaggagaatattccaatccaaacacgatgaacaacgatacctctgttcctctagacagagacgatgacgtcgattgggagatgaggcccggcggcatgcttgttcagatgcgagaagacgaactccacgccgccgccgccaccgccaccggagctgctcctccttctcgtggtcctatgatcaaaatcactgtctaccatgacacggctcaccacgagctcttcgtccctgctcaatccacttttggtatattttatttaatttggtttttttttttttttattatattgagtattggtgtattgggatgatttgactttatgctttgctagggttttagaagcttaattttgatttagttgagtttacgaagctttttgtcacacaggggagaatttggttttttgttcatatgggaattttcattagtgtctaatttttcattagtgacttttgttacttgttttttatatgggttcttaatatttatggtttgagcttgtttgaattgattgtattttaggggatgtaaagaaggttcttttacataaaactggtttggagcccaatgagcagaaactcttatttaggggaaaagaaagggaggatgaggagcacttgcacatgtcaggggtaaaggataagtcaaaaattgtacttttagaggatcaagtaagcaaagaaaggaagcttgaggagatgaagaagagccttgagatagcaaaagcatctgaagctgttgctcaagtcagagctgaagttgacaagctcacagaaagggtaaattaatattcaattaccatatgaggttggaatttcagggagactcatttagtgtcttttaatagtttattctttattgtaggttgatgccttggaagtggctgtgattggtggaaccaaggttgaggggaaggaatttgatgtatcaacagagttgctcatgagacagttgctgaagttggatggtataaaagctgaaggagaagcgaaactgcagcggaaggctgaggtttgtacttattgtttcaaaatgctaagtttgttttcgtttaacttttgtttctgatcccatactgtggaaatctacacactcatcggttctctgttttctttgccagcaccttttggagtcattagttctctccaaaggggtgtgtagagaaagatttgttgagacagtgataattgacaataagtggctgcatttatagatactccatatctaaggatttctttcttatattatatggtagtacatggtacttatattgtactgtagaggagataatgaagatgctatgatactggtgttagattatatgttcgtattactctagtccttttgttttgccacccatgcctggggagtaggggttctgctagtaattgaaatattacttaaaatctagatttatcacaatggtgataaagggaaatatagttagttaccttctcaattcagttgtagaaacaagatgcatttcatgctattatggacataggagcatggaacacaagcatttaagcatttttcgatatttcttaatctactttgcatgatgatgcatttacatctatttatccgtctgcttcacttagcaattatgatttatgtgcattcttcatcatcatgttcatgataattattgttagacttagatttcattttttatgccttttctttgttaaagtagtgatgcatattatctacagaaggaatttgtctctaccagtttcttctgtataaaattagccagttttagtaccactgccttttttctcgtgtactatagtgaattgtgctgaaaccatgagtgaaagctaattttttgactcacgtgtctttttgttgaaattatactgtgtataattgtcattcttgttagttttgaagagcatttgggttgcctctttgatgcatttctaaatatagaacaatttaaaatatagctgctccaatggtggtataagctgtcttctaaatttagcatggtgggcatgatgcaaatcaacattaaatacttattcttttgccattattattattattattattattattatttttttctgtttctaattattatcgacattaaatgacaatatgacattttgtttttgacatttttcagtaaatactaaatgtcattaattgacccttgattttacaccaattttatatttgggtattttggaacacagctataaaattttacagttgtgccaaatatattattttatcgacttttgtgctaaatgtagcacaatatttgcatctctcattaaagattgtcttatgtttaggatattgcttcttgaattcctgggagcatgaaatagaggaagatgattctaatcttgtgatttccattgttttatcgtgtaaaagatgtagattgttttgcttaaagtataattgtttttaactattacagtagtggtcatgtcatgtcaactgcctctagtttatactattttagatatttcaagttccgttaaccctggtgatgtatattatcgccgaaagctgctttattatcaacttacatctccctttaacaggtacgtcgcgtccagaaatatgtggacgcactggacaacctgaagggaagaaatgctaatccaattaacaaccctagcaatgctgtatcagtaacaacccaatgggagacatttgagaatggtgtgggaagcttgagtgccccacccccgacgcagtctccaacaaaagtaaaccaagattgggaacggtttgattagtgctaagttatattcatgtgatctataaaaattattgtaggatgtatacacaccaattattatttgaataactttgattcttcaatcatagtgtgagtttggttgtggtacgaacttgtctagaaactataacgataattgctgtgctcgggaacaaatgaaattagcaggcattttattagtttttttgtgttccttttctgtgattaagctgcatatatatatatacataccatatgttttgctctcaatacgatatttgtaaatgttattatatgtatagattgtttcctctgaccttatcagcaagagcataggctttcttatagacaaagcctccaagcatcgagtaccctgaaatcttatagacaagatgagcttggaggattactagccccaacaagacttgcatagttgggcgctgtttcggagaccattttctatgtattgttagcttgttcatccaaccaggggccgcgtaaacgagagaggttctgagcattatacttggttattggaagagttccatggtttttctttttttggtctatattccctttttagtgatttgctgtatatttctctacttgggaaattcttcatgggattgagattgtggttataggttgtgaaggtttgaagtgaaagtgaagaggtgagatgaacattatatgagattctcaactatctatggattactttaccttctcttgcttgggttcttgaggctatgcgagttctatttcttggattggtcactgagattttacgaggggcaaaagtcagtcattcaaacaccattcttgttctctttttcttttaagaaaaaagccttattacattttcctaatgaaaccagagaggtacattattattattattaactgaaaattttcatttaattagattaatttagtctcaacaatgacaaaaatatcactcgaaatattagagtttacaaaaaaaaaaaaaaccaatcaacatttagttgagaagttcttgctaatttgatgaacaatttgattagagaataattaaagaattcaaaggatatttgcaatcttctacaacaccatcaaacatagatagcattaccttaagactaagaactgcttgcactaacactagataatcgatctcgacgctactgatcaatgagtaatctcatttcagccacgacaatatttctttcaaagttatagcttcatcaatctcatgaagtacaacaccctcctttaatcccgaaatactagccatcacaaaattgtgatgatctctaatcactccacgaatccaaacttatttcatctgcatcgatatttacttttaaattgtcaacatcgagtttgatctacagctcaacaccatctgcaagacaccaagtatccatcgatagaaaaaaaaactcgtattttaagcttttctccattaatcaagactttgaaagggttatattattaatgcatattgatattttctaaaataatttatgaatatcctaatatttatgtatttggtatcattataataataactttttaacttgcttcatccagttataggaatgaaatttgttttactgaaataattatataagctaccttttttttttggatatagtatgattaaattttttgagaatttacgatgtagatattcgtaatagtgtaagaattttctcgaactagaatagttcattatctaactgaaagacatgccttgtcaaaccatgaactacggaaataagcaagctacaatgaataaaactgtctctgaaaatttagacaataaaactatagcattctcaaatagcacaccaaaagagttagaatttcaacttataacactaaaatactacttgaaatatctcaaaataaatatcaaaaaataaattgtattaaaataactatctataaataaaataatatattaataaaatattaaaattttcggtctttataacttattcaattaagtaaaactaaacttaatgaaataaaacttaaaagaaactagctaaaagtattagttgtgaacaataatttaataaaattattcccaaaaaatttagacaatacaattataagacgaacaagtagcatgccaaacactataaactatcatgacaagttcctaaaatatctacaaaatagaataaaataataaaagataaattagcactcaaataataaatattaatataaccaataagaaaattctcaagaggacataattttattaaaattgaacttatctgcaaaggtgaagaattttaattcgatggttaaatggataatagtccaaaagacataactagttgcacaaatctcataatggatatgcccaaaacaatgacataacccagctgattacaaactaaaccaattataatcacaacaaagccaaacaacactttagaatgattgagaaaaaaaaataacaaggttaagacattattagtcgatttcaatgtactaaatattttttatacacctaatggccaatttgcccacttatggagacttttttgccttgtttatcctaagtattagttagtacattaaccaaaaataaagggaaaaatagagacaaaaaattctttgttgggttattaatataaaatgaagacttccattagttgggccacatagcatagagctagctgatcaattgtatttggttcactttttattcaacaaaaaattaaatagatatataagtatttcaattcatgataatggtttatttgataaatgtctaagaatactcccaatagttcctctaaaattagcttttctttaaaatgaggaacagaagaggagaaaaagtgtaaaaataatggtctaacaagcaggaccggtcctgagatgaatgagccacagacaaattttttttttt

SEQ ID NO: 184245 - DNA, 3268 bp, Cannabis indica
tctctctctcatctcaactctcaatctcatactgttcatttctctctgttgcacctgatcttgatctttctctctctcctttgatcagttccagcaagcgtaatttgtcctgtaagtcttttattttaaatatataatcttttaattttcatgggatgtgtttttatttgagtaatattgtgtttggttcttgggaaaggaggagagggtatgatggaaagattgagtcttttagtttgaagggtttttggatctgaagtttttgctgttcttttattatgtatgaatttgatttgattttatttgtttgtttcttgagaaaactgtggtggtggcttatttttttaatgttgaaaataattagcttaattttttaatggtggtcctagtttttttctgttcgtacaaaccagaacagggaaatttaatctgtttgtgataaaaatttcttctctttccttttcacctaaaaggaaatatgccataaagcaaagctgactgtttactttctaattctttgtaaagagaaagaaaatgaaatttgttttggttttggtttattgatgtatattgctttgtgggttcagttcttttttttttcaagagcaaaaactgtttggcatgaacaaaatgcagttactctctaaagatatgttttcaggaatatttacccgacaagattctttatatgtataaatttctgaaatagttaataaacaaagctggcttttcagttgttttctgctttaagagtgaactaagcttaagtcagataataagatatcatacttttgttctatattagcatattaaatgttcttaacatgaatggagcattgcattccttgtcttggttttcagttattgagtttgcattacttttttcttatggttttaatgtgttcttattcaatatatttgcaggatattagttaaatataaattgaagatcaatcatttgtggtggcatatcaaatattgaagtgaaatagaacaacatgctttggttgagtttgtcagttgatgtgtatcgtaaagttgtgcgcttgaacttatattgcagagttattctgtaaattaatcctttagaggtctttcgttttccaccttagtttagttgtcccttattctaccttccatgggatccgaacacgtttttgtatttgctcctgatatttataggattatctaagtagctgatagttcaaaccttcatttccattaaaatctttctgttagtttttttctcctttgattttaatccatccctttgtactagttctattagtgtttaatcttagtatctcactagcttggtctgataaaccatcgtttcgttgttcgctacttgcttccaatcgttcctcatactcaattcagcattttctgctccttttcaattgtgttttagctgttcgttatcctcctcccttagatttggccaattaaatcgcctagatttagtggttttcgtaaggttcaagcgtagttatggtgtgccaagcagcaagccaaacaagatttcgggcattgaaacatttgaatggaattgcaggaagaccaacgattatagttagagtaattgcatgctttcaacctttgcaggattgccaggtttgtacaaacacacctgtttcgattttagttctctgttaatattttcaatttgttgtataattgagttttgttaacctttttcttttgttatattattctccaggcagaatactttcgtcatttgcttaaacctgttacgtaaattggttccatatttaagtcattgtaccaagctggaagttagagtttttcattttcatttctttgtttcgtaaagacaatttcaaactgaaggaaaatcaatatcattaggtattcctctaacttgatcctttaaatattgtatttgatttagttcatgtttaaatgtttagctttctttttatgtctataggtgattgtttggttggatggttaaggccaaaggttcctggccttcttcgcataactcatctcagcaactccctgatttgatttgtatgagcacgttgcttgaaccaaggcaacaggaatgtttgccgtcacatacaaatcaatgcacgtgcaacttctccacacccgtggcattgccagggtctgccaatcctcatttgcagaattcaaagactgagcagaaaaatgaaggtcacgaccacgggtcacttcaatgtttgcccttggactttcctgccttacttcctaccccaaatccttgtgccaattatggtctcggaagaatggttatgcccaatgcgaaatattcagggccatgtcaaaaggggttccttattttcgatcagtctgagaatcaaacgaggctcttttataactacggttgccctcctatccataattatccaagtcttggcactgcaagactagcgtccgcatacgacgatttggacaaattgggacatgctgcccaaatggatagaaatgatcctaccaagaacatcttacacgaagcatctggtgaaaacgaaggcagtgagatgcacgaagacactgaagaaatcaatgctttactctactctgatgattacgaggaggaggaggatgagagtgacactggcgagtgtggtgatgatgatgatgaagtgacaagtcctgatcactctcctatgcaacttaaaaagggttatgtaaagcgaggtccaattgaggaagatgttgctagttctgatggttcaaggaaaaggcaaaaagtggttgatggtggttataataaatcatctccctcgtacactgccagttcaataaacttggatggatcacacggatatgacaatgatgcaaaatcaagctgtggtgatggtggcggccagattggattagagggatctgattgtactttgggaaacatgaggtccaaaaaggataagattcttcaagtgttgagagttcttgagagtataattcctggagtaaaaggcaaggacccattgttggtcattgatgaagctatagactacttgaggatagcaaagcttaaagccgaaactctaggagtaagctaccaataagttgttttgtgtgttagttactttccattcccttccattttagtaatacttgattatattaaagagtagaaagaaagaagaaagcaaaggtgaattgaaaaaagatgggtagcccaagaattctttggatgaatgattgatgaaatttgaaatgacttaggagagtagtagctttgttcccttggtggggtcctccccatcttttattt

SEQ ID NO: 184246 - DNA, 1490 bp, Cannabis indica
tcggtgatttcttcgatggtgttctacccctgccccagaacagcagggtttaagaggaagcaaatcatttccctgatgattaatttttcgttttctttttttttggtttgcttttgacctgtgcttgttttgttaggtgaatattgagtatggcttgagtatggtcatcactgtaacatagaagggcccctgtaattaagccatccatgttcaatatggttctttttaaaatgtttgtatgttaagctatatttataataagaggaacattcttccatcttcatttatgctatattatatataaaagtattcaccttgttctgtgtcatttaacttggtatttttcttttcacgtgaatctttgatatttttcctcacaggttacaacctccaagtttatctacttcttctttaagacgatgactttaagaagatactttgttgatgtcaaatgcttattggcctaatagtccatttaatgaatcttcaaacgtattggacgatgtgaaatctctattaggataatgctttcgaagtaagaagccaacttttcttattgtacgagtgtgactagacaaagtttcatcaaaaccaatggagacttgggaaaacttatctaaacctttttcctctttttaataatgggtttctgggtctcttaacttacctgatacggagttatcatagtcattaatttggtttctagttgggtcattagtcttgagactttgtcttgtataataaacatttcattatgaaaggtcaactagcataatctagtcttttaggcaaagtactttttttttcattttttggggtgcaaactctcatctctttagaaaaccaactaaccaccaaaacgacttatggcctgacaatcaaacctaatgagtaaatctttgagtttggggggccttggttggtcttctgctatatgctacaaatgggtcttgattttattttagccacaactatatatattggtatgtaattaaaaacaaatcacagacagcccaccaaaccaagcacaccaacaatgataccatattgtctaatcccaactgtaaaaaccatctaacaacataattttgatgagttatcagtttcagtaccagacatgggaacttctttgttagtacttgaatcaaccaagtggggttttgtagcttaatccatgttgttgggctatgagagaagtgagaaaatggtgtagaattgcctttttcaacacagctagactggtcctaatcctattaccaagcgattgagagaggtgtactattggataagactacataactaaacttgtactatatagcaaggtcacatacagaaatataatcatcttaaaccacagagcacagacagattcacgtgggattagaaataattagcacaatcatgtaacttttctttctctttttctgccaaactacaattatgtaacttggtaggtagattttcaattcaaataagtgatatgcttcatc

SEQ ID NO: 184247 - DNA, 3429 bp, Cannabis indica
tctttctctctttctctctctagctatctgtctagatctcaagatcaaccggcaattgaatttggtaactttactgatgtacatactatatgtgttctatatagatatatctataaagttagcttttttttgtttaaaaataaaatcatatggttgaggaggcagcagatgttgttgacagaagatagagagcacagatgaccgaatgcgtagcagcatctcactcctttgtgctctctattcttctgtcatcacctctcgatatcagcagatatagccatgtctctttctctctttctttctctccatatgaatctattattattgtaacacatatagaatacctaaattagaaaaaaagactgaaattgtttcttgatctgatcttctttcccctttccccctcttaatcactattatgtttcatgatttttcgaggcatgcaatttaatttgttttatttcatatatctctttttttttccatggaatcaatttcggaatttcattaactaattttttattgttttgttaataaataacgactctacaattcaaaacaactctactgcttgtgttttgattctgaacatattacaagtacaactgtttattgtagagtgaatgtcgtatttgacatattgtgttctttaatttctgttttaactgttggcggttttgtgtgtgtgaaagagaatgttaaaatatgatcctacttttgtatttcactcatttatactttgcatgtcaagttaaataaacaaattgtagttcaaggtagtatactatgtattgattgatcatttgcccagatcttctatatatttaagttgattatttcatggttcaagctagctatatcttgtggtgtgtttccattttgacatatgctaattattgattctagtacatgtgcatagggtgtatttcgctagggcatcgattataatttcaatatatattattgtataaatatatacttctttattaattaaatcatggctcttaatttgttatgtctacaagtttaaaaagttatatatgtgggtagttataatttttaattactatctatggcttgtttttgtagatttggtacatggtacaacttattttttttctcctaaatttattatgtgttatataagtttagttaggagacctgtcacaaattttgtagaaatttaggataatttagattgtcaaaataatttcatcaaaaaaaaataggttatcaaaataattaggataaaacttcttgtttaattattttggtatttttatgcatttataacaatctctttctttttgtcggctataacaaggtatttgaatctttatttagacattgtacataactatttgatattttcttaaatttgtgggagatacaatatatattgtatgtacaccatataccatataacaaaatagctagacgtgaagtacttattcatatattgtataaattaaaactatcaaattatacctatgtatataccaccactatatagtactggttatataaaataaaatatagggttgttattatgcatggtactataaatataataagcctatgtagctaataacattattcatcccattaactttagtgtagtaataagttttgttaaagatatagttcttttcttatatagactaaaccacaccaaattatcatttatatatttaattaccgaaactttagcaaggagttaaataagttagtagctactaataagtctaatataaatctcaaaatttactcacacatgagatcaatgttggagaaacaaacaattttctcttttttttccttctttttttggatatatttaataacaccaaactatcatttatttaattcctccattcaggctataggtcagagtttctgttgattggattttaacaccatatatatgcatgtaaatataagaattcgcatctttaaattgacatgcatgtggtacatatatatgttaaaatttgtggagtcatgcatatccatgtcaacacattctaaaattcactggctggtttgactaggttaagcttataattaacagttttttaaagcaaaggtagtgttgtgcttcgtgctgaagatagcaataagtttcacaaatagggtgctcttctctgttgaagtggccaaattactggttattaaaaaggggatggagcttcctcttctttttgaatttcaaagtcttccacaggtgatattaacaattcgagaagttgttagtaatcgaaagagttgaaggagtctgatatgtttaatcattgttctaagttcttccactatgttgcagctgggactcatatttcccatcatatattcagtatctcaatttattgcatgccttaaacaattgtcttatgtgtgttctcgcttctgtaattattgatgcaaatttgccgatccttatatgatgatctttgcttcgttcaataaagttgtggacattacatttaccattaaaccaacgatgcctcttctaacacaatagtatagtggtaagtaaatattatatttatttatatatcatgcttaatttctagaaagaattaactcatgatatatactttctaaaatatttatgaaaatgtgctccaatattttaatatactctcaatgtcgatttttcttcttaaattgctatgtgtatatgccgagagccatttttcttttcttttactagctactgaagttcaattactctcttcatcttttttttgtcccaaattgtctattttttcttaatttgacatctgattgacatcttattcactcatcattatttatttttcttcttatacataagattagatttgattagagagagtaatttgtccaatcttgatttaggtatgttggaaagctggataattaatccacctaatcacatctgtctattattatttatcccatccatccagtaaagtaggataaataatctcatacatgtaagtcttttttatctttttttaatcttaattttattaatatattttaaatttaataagaatttaaatggaagaattataacaaatttttttatcaaaacttattcttaaaattattgaaaatttataattttgaattatcatataaaagctttcaaaatttaaaataatattaattaaacaatagttatacttaaattgattataaaattgattataaaagaaacaatataacaataatattaaaaaaaaaataaactactagaaaatttatatcaatatcttagaaaattaatatttatattaaattagtgattgaattagtgtttagcataaataattttatgctgttcaaatatttttatgattgaatagcagagcatcttctattgggtgggataaagcttttcctctataggggccttgtgcagtagtgtttagcataaataatttt

SEQ ID NO: 184248 - DNA, 2788 bp, Cannabis indica
tgctccaatgtctttccaagcaggtctaaaaaaaccagcaccatacccatcgggcccaggcaactttgttttcggaatactaaaaaatgctttctctatttctttcctcataaacggtttaagaaaatctacttgctgctcgaagtttggacgatgtgcctgaccaatacactccttgttcaacttcaaatgggtgagacttttggtccccatgtacccacgaaagtgttccatgaagtgattaaccacatcagggaactcatcaataacatttccattctcatcaacataagaggttatacggttttccatcttccttttcttcaaactcgcatggaaaaatgaagtattctcatcacctttttgcaaccaattaatcttgcttcgctgtttaagaaagcttaaatacattttttcttgcattataaacctttcagcagcttggttttctccaaattgcatctcagaactactcgggttctcttgagcttggagtttgcctatttcaagttggctcctagcttcttgatatgacctaccgacatctccaatagactcccaattgaacttcttaagcttgtgtttgagcctcattagtttataataaatcccctcaatccagtagcttgcatcggcatcccccaattggtcttgacaatctctggaaactctacatggttggtctagaaattgtaaaacctaaagggtttcgtcccaatattctcagaagcactcattgacaccacacaagagcaatgatctgatatgacttcccacttgaaccgagccacaaaattaggaaacatatcagtcaaagcttcattagcaagagcatggtctatgcgagaataaattctgagcaagccttcttggttattggtccaagtgtagtttgaacctattgtcttgatggcctccacattggcactatcttgccaggaagacgagtcggcaatgtcagccaaggttatttgattacctcctgtgcgatcatcaagatagaatccaacattgaaatccccttgaatgagccaaggcttgaccagaaatcgaagcttcaaaagctccctccacaactctttcctctcttccatagtgttccaaccatacacaaaagtaacacaaaatgcatccttttgtctagaaagtttcacaaaacaatgaacaaattgagaactttcagctatcacaattactctcgcatacttcctccgccagattatcaataaccttccttctatggtgttgctagtaaagtaatcccaatttttaaatttattatccgtcatggcagccactttatttcccttaagctttgtttcaagtaaagccccaactccaattttattcatactacagaaatctacaaccttatcctgattttccaacttattaatacccctaacattccgacaagcaatattgtaactatccattagcaagtaaaatagtacctgtgtccccttcaaaaaccttcctagtatcctgatagtgaccatcagcttcctgtagaacatcaaaaaaatgttccctgacttatttgattttttgttcacatcagttcccttttcagtcaccttattagcccttgctgaaatcaatttctttggtctcacccactcatcttgtgtcccgccctcctattttttctcctccttagaatcggctacctttgaatggtcagtagttgaagttgataccgaagtattaactatttttgattaagccagatcttgacctttgcctttcttatccttctcttcttttccacaatccgccatgatatggccatagcccgaacaattcttacacttaacagagagccattggtactctactctttactcaactagctggccatgttcattcaggtaaggaatcgtgcgcgaggtggatcatccgtaatgtccatttcaacaagaactcttgcgaattgaactcaggtgcaatctttagtatgttggtccaccataatcggttttccaatcgtactaactaaagcactcaagttattatttccccaatattgcaacccaagatcgtggaggcgaatccaaagcggtacagtatgaattagtttcaccgtgttcaagtccgtcgaccatggcctaacaataactggtttcttgccaaattgaatcacccccgtttccagcaccttgtcttttgtagcttcatcattgaattttaccataaccaatccaattgtcattctaacaattttcattatacctagatgtccccagatgcgcttgatgaacccctcaaagactgccataggagggttagctccaagaaccatatagataactaccgatttccagttttctgcctgtctaaccacctcctcaggatctatacgagctatcctgactccattcctcactatcgactccgtatacatcagcttcaaatccctggaaaaaacccacccctttgataatgaggaccaatgattcttcgctgaagctaagaattgatcctgttccgcccctaactcattctcatcctcttttgcccaatcaaaccctgtcttaggtgtatgaaccattgaactcatctcaaaatcttgcgccctaactactgaatctggtgaatgaaccgcctctgctatcaacttgagaccatccatggaccctgtatcttccatctccaccactccttcctcgaccgcagttgccggagtcatagatcgaagtgctggcttcggaccgactcttttcttcttcgccatgggagaagaaacagagagaatcgcgagcttttaattggaaactttttttggttt

SEQ ID NO: 184249 - DNA, 2815 bp, Cannabis indica
aaaaaaaattaaaacatcgatatttattaaaaaaaaagtaagtttaatttatcaaaacatcaccaaatatgtagaaaaataggtgggcatgcactatatgcactcactttgcgattaatttgagccattttcttcatacatgaacacgttgctgttgaaaggtcatgatggtaatcatttgcgcttcaacaaaagaaagagtgtagtcgcttccttaaagtgtgttagtagccgatctgagagctcttcagttttcttatgaattctatgaaagagttcctcaataatctcacttccaaagtgtttgacaattataccctccatggctgcccttagatgcatagtaactgtcgatggagtgattttaatttccccattattaacacttgacatgggcttgtataactctattttctcaatgctaaaacatccatttctttctattatacctatcatttcatttggagaaacaatatagataggtaagttgaatgagtgcactttactttcactaataaatccctgcaaataaaatgcaataaataattatatattgagctttgtatcaagtaaagaagttagttagagtagaagttaattaacttgtgtgtgaattgttcaatgagttaattagttttggtgagtgagttagctactataagtagctgataatcacttgtaatagaaagtgagttcttgaataaagactttgtttcttttttcctcttactttattttctctttgctatttctgcactaatacggtatcaaagacaccatattggtttgagctactttattcttgtttgcttcatctctttttgttattcgcattttcataatcatgacacgtggattttaatcaagaaaggctaagaagtcattagctgaccaacttcctcatttgatgctccgggaagacaagggccataactttgcgagaagagtttccgtgatagggagttccctgactgatagcaacacggagggtattcgtgacccagagtctccctccgttccaagaaccaaagccatcaaatccctagaagagtatgggttttccctacagggccaaggcatttaaaggatgcaccaaaccggcctatgcctttagcctgtggaagctttgcctatatgtgttcgactatggatttagtgaccaggcttttttaggtacgacgtcagaggctgtctcccacaacacactatcgtacagagcatgtgtgtccttgtgtacctaaccaaatgatccaacaactagggatgagggaaattcaaaaaggaaaaagtcatgggatgacacgcgtatgaggcccagtcggtacgatttaacgcccttaaatgccatatgggagtaatgccacctaccaatccaacggtcagatttcacccaaggatgatccatctaaggcaccacatgcaaagaagttggccgataaatatcctaaaaaagtacaagagaggggaggaacttttttttttttttattgagagaagactcattcttcgtcatcctaagaaaacatattttgtataaccctacagataacaccagaatattcctactaagcttcctcttctttaagaggaacacgggggaaggagttctagtccattgtatatctatttgtataaacagttaccgaccaatcagtttaataaaatagactcgtggactaaggattgttaatgcctgaaccatgtaaaaatctttgatttattatcttgctatttattctattataactttcttaagctctaaaaatatttagttgccgaaaaactcagtaaacattttggtgctttcattgagagttaaagaaagagacatgcacggtggttacccacgcaagcccgtctaaatgagaacctgtgcaagaaaagaaggaagacctcctgatttcccgtcaaggtctgactaaaggtcaggaatgtgtaggttggaggtgttgccaaaagtgagggtcgatgccctcgtccgcacaaggaaaatactcaagacaaacgcatgtggtcttaaaacgcttattgtacccatattcatccttaaaagctcagagctggctagccaactctttggggggatgataggccactggtatcctcaagcttgagctccccaccatttgttaaggtatgaatacgcacgcagagtgaggtgcaagaggcattggggccaggtgaagaagctaagacccgatacggttacgatgactaactcacaaagggtcatcagatataatgactctatccagtgcatgactttagcaccggtgctaatgtaaggaccagatccaatgccaatggctatttcccctgccttttcattgcgccacaaggatgatcgaagatcaatgttgccagatcacgtcgtgacagcagctgaaaggagaccatcgatctcatcagtgctcactgggtttctagtcagtcttgatgttgtactgctggtaggagggcgtcgctcgggcaaatgctttttggcaaagtttgctgacaggaatctctgtcattacgatgtaactacaaccctggagttacattaaataaagtaacttgtgccatgaaaaaccagttagggaatctctaacaaagtagcattcatcgtgctgggggtctgagtctttaccgtaaaagctgctaagaaccttgccatccatcgaaggaaagagactgcccaagagatcctagggcacatgcacgcatttcttggagcttctcggagctcaggagacgcatgcacgttgctttccttgtgtgaaagatcactaggtgtatgacatgtcttcaatcctccttcctgaaatggaaggac

SEQ ID NO: 184250 - DNA, 4152 bp, Cannabis indica
attttaatatcctaacataagatagttaaaaattcaagtttaaaatcttcaaacatttattcacttgcacacaataatgttataatgcccaaatttcatgtgtatctatattttttatgaatgtaacatcagattatttaagtttacatattaacatttagtgtattggaaaaggatattaggtttaattttatagcaataattattagtgtttttttttttttttgtaattgagcaataattattagttaatgcatatagtaacgttcaaataatgtttcacagttgtttagatgctcttagacacccatttctatgtgggcctagatggaaggttgtcccatccatgaatattatcaggtggggtcttggttctactgcagtgcgaatttctgaggagtacatctacggcgaccctcaggtatgtcggattgttacttttctacaatttggttgtgtttatttgtaaaatgtgttgactcttgagagccacgtttgctgtccctcatcatatcctacactgaattagaatgtctatcctacacagtatttccattgtccaatggggcagtgattttagttttctacttaaaaaactcataccacttgtcaaaaaaattgtggggaattttatgataatttccttttaaagtagatttatattactatattaccacccaattgggactaatagatgcgctaacttcattttgttccatttgatttttcttacaacagcgcagaagactagcccattttattgaactaatggagatgctgaatcctcatccaaagccaaaggtagaattcatttgcgttttcccatctctcttttgtattaccattctttcacatgatgagcccatagactctagtgctagttagtttttgacttataacaaatacgatagataaatgttaacaaataaccaggcatagcaatttagtccaactctttgtgcaagccatgcaatgcactaatgctgaatagcatttttttgcacagaaaaagttactttttatctattcttactaaacataagttgctgacttgtgagtaaacctaaatcatatttgattccaattttgcagaattggctggagcttctgccaggaaagtggcgtttattgtactgtactggtaagcacataggtctgaccttccggcaacccccagcgcgagttcttgttggtaacgtgaacctaacaatatcgagaacatcaaagacaaagacagccttttcgcttgcctctgagattgacttcacagtcatgctcggtcagaattggccccatgacaagactggtgtaaatgggaaaatgcaagtgaattcactttgtagattaacagcaggtaagcggctgtatatcaaggaagaggatacaacaacaggaaagttctcctggagtccaaatacccatgattccgtagctcagaaactctccggtaggaaatggagaaaagctgttccgttcaaggagttgccaacaagccttccggtggccaagcttgtttcaaatgacattgatgtgacgttgaatcttggtgatccgttgaagaaagacgtcgccactgctggaaatgtagttcaagaaattcggttacaaatcccacctgaaatgtttgatttaacaaagctagtttgtgggacatatgtggattcgaggcttctagtggtgaggggagtgaatggttcagctctgttgttcacaagatcttgtgttgatgaaaacttgagatgatttgttgatatttagatctgtgtgtattcttttgatgtaagttgtgtaagtaattgtttataatttagaaaatgaaaatggtgaacttttttccacttaaggccttgctcttttcttcgtcaactttgatattattaacattccttaacaataccaccaccgatatgtcattctccatcttattagagttatatagagcaacgttaggtggtgtgtagcattcgctctataattagttaggactcaatattatacttaacatctatctatatataaaggagaactatgaggtggtgacatgacattttaaaatcattcaaaaactatttttctctttcttcttaattctctcaatctcatagattgatcccaaaaattgggcattgtgtttcttcaatgtgcatcctccgcccaaaatagcacacacaggaagcactttagcaaggatattccaccatagaatttatattgttccataattttattgttccaatttttgttccacatgggaggggaggctctttggagagcttggataagatacgcccaccaacttgtaagagaaacgacaatttgactccttagtccacacccagtaatcatgaccccttctagaaggcttctccctttttttaaatgtttgccacagtctcctagtcgaaaaggtagactagtttttggaaattccactcaccattgtcccataaaagatctgtaattttatggagtcgaagggagggcaagcaccccattaggttttgggtagaattggtttccatgagccactcagggatcctccttttattttattattatatttagttatagcattaaattaaaaactatttatatttatttctattgttttacataattaaagcttgggtaattgacggcaaaattttcttatttttttaattttacacacttaactccgtgatagatttttaggtggcatcacccttaagtttacttttgtttgcaattttaaagcaccagttaagtttcattaaatgttaactaaattgtcattgtgtatgtatatgtgtcatgtttttattagattcgaggttttagtgtcttacaagtgttcacagtggcaatctcaattgacatttaacggtaaaatttaactaacaccttaaatttgtaaacaagtaaacttaagggggtattacaacaaaaaaaattaggagtttgagtgtatataaattaaaacataaggggattttactgctaattaccctaaatgttaaaaaaaaattaatttataataaaaacattaattaatattaaattttgctcaagttttgcaattgtgcatttgagcatagtattaaaaattattacaaatacatcataaaattatgtttttttttatcaaatatagaacattttttacatctcacatccaagatggtctaattgtaaataataggttaagttagagaatttttattgcaaataagtttttctattagggctaaacatctgatataatctaatattttttttttttattcgatccaatctaattaataattagattaaaaaaattatcattggatctaatacgattagacctcaaaatgcaatccaattactaattagattagattgattttgtaattggatattcaataacacacaaaaaaaatttatataaatttaaaaacataacaaaaattacataaaatctaattgatattaaaatcgattaaggaaaaaggaaagagctattaggaattctcttagaaatttaagactatatacctgtttggaaaaacacaataagccaagtctgctattcttttagttttaggtggagttaaattattttttagagaaattaattaattaaatatacttgttaataaagagacaatttagaaaatataattaaactatattattttttaaatatttttattgtatataaataatatttaattatatatattaattgtaatttgattagaacggtttttaatcgaattttgagattaatattcaataactaatccaaaaatagacattcaacttttgacatttaattcaattcaattgtaattagatatttaattttttattattagattaaactatagtagttcaatttaattagatgagattgaatcatgtccaaccctacttgctatcatagagggagcatataccatataggcttgtaacccccactcagaaaagcaaattcacttaaaaaaatcattatatttcttttagtttaatatttgtacattaaagaatgggattttaactctacttcttttattgctttttgttgttttttttttttttgaggttctttttcaaacttatggctatgctttaaaccatttgaatttatcaacctactcatgttattttgtttttttataaaaaaaaaaa

SEQ ID NO: 184251 - DNA, 1913 bp, Cannabis indica
aaaaaaaaaaaagaagaaagaatcgaagaaaccaattagagaaaacatatatgctaaagtgacctcttaccaaaaccggtccaactctgagaatctttgaaagctcttaataactatcaaagctaagttagctcactctcactcactcacactcaatagtattttgggcactcaatttttgttttacttttttcatttattaatagtagtaacttttctttctttttcatagtttttcttttccattgacaatgtaagcaagcaaagtcatgattctaaaagaattaaattccctcgtataaataatacatatatatatataatacttatctattaacatttctcccccaaaatattttctttcattacatacattaataaactatagtgggaatagattataaagtctatttacaatgtcaactttaatctatctaagcaaagatcaactggtgacatttaccaaaatttaaaattaacaaaataaatatttaatagttattattattattattatacataataaaaagaagaaaagaaatagtggggtcaaatatattggcttcttcttctttttctttttcattaaaaaggttggtcactaactcggtgatctatcataaatgaagagcacaccatttattactgtgtgtcttcacacaccagatcacgaaaaaatgccaaatctcattctcaatttctcatggtcttcttgggtcttcggtcttcatcaagttcaagcagtaaaacaaaaatatagtaataaaaattgtatatacgtaacaattaaccaaaccaaatcaaagaatttcttttaataacttttctttttactatttagtcctaaaaaagcatcttatttacggatcatacccctgaggcccaccggaacagttcgctaatctcttccccaacacggcaagcttcgaggtcccagtctccgacgcctgtgatctcgctccgccgactgcttccgctgaaaaatctaccagaactccgaaacgattgagcacgtgaagatagcgacattgatagtctatctacatactccttaagccagcttctccctgaggcattttccgcacaagactcggctccggcgccggcaagtgagatgcaggtggcggtctgaattgatcttccttgaaatcggatgttgttctatggtgagcattgccgaggaagatctccgaatcgtcgtccacaagatattcgaacgatccgatggaatatgaccgtcgtgctgatgcgcccgaatccgaagtagcttggcggcgactgacgttgccaatttctattcggaaactgtcaccgctgagattctctccctccggcggcagaagcctcttcagaatttcagcttccgatgcgaagattggcgatcgacacagaggacatgattggttcgactgaagccatgtgtcgacgcagagagagtggaaggcatggcaacacagcgggagaagccggagttggtcgtctgcttcaaacttagacaaacaaactgcacaatcggcggccgaagtattccgtcgagtgagagaagaaaatgagaacagaggcagcgactcaataagcgcagtggtaggattctccggcgagacacggcggctggagcgaagagagtctaagtttgtaactggagcagcagaggaggacgtcgaagaagaaggttggagatggcggaggcaccgacggttgaggtgacggagtagatagcatagggagaccgaggcaaccaaagtgacgactagaattagaataatgatgagaatgctcggactgagagaaggagagtgatggtgaggaatcggggaaggaggaggaggcacggctgtggaggggaagaaggtcgtcaatggcggtgatggtggagaaaattgaaaagccatatttatggttcagagaataaa

SEQ ID NO: 184252 - DNA, 5222 bp, Cannabis indica
tttttttaaaaaaaaaaggtgaaaaggtgaagagagaaaccaaatgatgattttttttttggttgataaaaaccaagaggagagaaagagaaatggtggaaatgagtttagtgtatattttatataattaggctgagaaacggacaagtagaggtttgtgctaatgatgttgtcttgtgttggtgaatggtggaaatgatgcaccaagaacggggttctaatatttaaatattattattaattattataaatatatatgtcacaactcacactataataatatatatataaaaataaattaaataaaaataataaatagattttaatgaggggtgaatgacgtgatcataaattagcacgcctcttagttcaaaaaggagctgtgaaagaacaaggttgaattggatataatatatataaaataggtagaatatatattaccaagtattatatattagactcgatattaaaatattatacatatgatcatgcctcgtaagaaagctcaagaaatataggtagctactattaaaactgggttttgtacttaaaccaacagcagaaatgtttttaaagtttcaaaaactgaaaagcaatttttttaaaagttgaaccaaacaaggagttatctgttgtggtatttggcagagtaagccttgaaacgaaaaaagtgggggtttagagtgaaaagggaaaatgcatgagtgtgagaggagaggtgaagattgtctcattgttgaaattaaaagaggggggactctgactattttgtctctttgtcgagaatttttatggcacataatctcatctcatcactctttttttcttttttgtttcttccatataaactgatctacagaatataaagagaagaataaaaatgaatgtttctgctgctgctgctgctgcaatactaactatgtaactaaaacagggctataagcctatatacctataatataataacgtgcatttttttttggctcttatatatatttatattactctgatcaaacttatccttaaatttacttatattctttcatgttattataatttagtcaggtccagtcagtcatctgaaaccctctctctttcatatattctttcatgtgttataatttgtagctgtagctatagctacaccaattagggaaatttagactttgaccctataaaaaaacctgggaattatatatatttatttatataactgataatgaaaagagaattggatcaagctgaagataatgaatactaaaactgcttcattataaatatatgtatatatatatttacagaaatcagaggggaaatggaaattgatcacactgcaaattcagatacatgtatatatatatatatatattatatacagagcagatcaatacactacacctaaaagggaagaaaaataccctacagtgaacttaattaattaattactccattaattgtatatacaccagaaatgaaggaagaagaagagaaaacactatattgattttgatattattaattattatttgtttttctaaaactaaaactaaattatattgtattgtatatatatatgtataaattaatcatgctgcaggatatatatatataattaaaaagagtagtattaataaaaattcatgatcgaacgccttacctgagagagtctagtacttgatcaggaaattcaggtgtgatatagctatagtatatcactgtttggcttgtaataataatatataattttatgttatagtactcgtttaagacagaaaagaatactgaagaagaaaacaagaacaattgttttagatgatgatgatgatgattattattattattagtatgattaatgaaaattttgaaacttatatatatgaaaaacaatataaatattatagttgtacagagagagagagagagtttggagatagatggatagatagataagaaaaaatagggttaagaagtgagagagaattatataaaaaggaattgaggaagggaaggaccgctcgattgcgcatggcttaaagcttgtccccagtacctgatgtcactctctctctctctctctttaattaatttcatacatatatattttctttttctcatgagattttttgaattaatttaatttaattattcaaaccatatattactatttattattaatataactcatcaactttctttttctagtaatagtagtgtacttacttactatactactactactatactatcatatatagttaatatcaagcttgctaaagacatattattacttatctagctagatgggtgtaaattaattttgtgctgaatttaatttattagtgcaaaaattaaaattgttaatgtttgttggaagttttattagtatttttttttatgtcaaagttatgaaactctaccaatgcacacatatttaaagtgaaaaaaaattgtttcaaggtagacatttcattaagatttattaggatttttatcttttgttataatttgttaataaaacattaatatataaacaaaaaaacgtatgcctcaataattatttaatgacgaattatgaaaatgtgtatataaatacaatcttagtgcttatgtttgatgtttagtgtcaataaaataaattagagctagttagttattaactagatcatcttactgtttataaaatgaaataatgtaattaaatagaacgtacaattgcaatataattttttgtagtccagaaaaatttatccaaaggaaaaaattccacaaaaatcataattgcaaaaatcatttttattgttttattaatatttagtatatagaaaagtaaataaaatcaatatctaattagtgagtcacactcacattcgactgaattgttagtacatgtgtcaaatttaagagactttgtacagtattatattaaagttttaatcatctataataagattataagaggtggctagtcttgattcctttctctaaccccttttccatgatataattaattgtaattaagtaagggtgaaattaatagatcgaccaaatttagtttattttgaagactatatgattactttcatcgacattgatgttttatcaaatctgtcaatgtctaattagaagttgcaattaagtaatagtaatatgttgtagctagtgattatatatgtctcattctttctagatctcatatttttactttttatataaatatatatatcatcacttgtctaaaaaaaatatttcaaatttctaattaagcccctaactattcattaattttataaattagggactaatatgataaagcaagtaaccttttttggggataattaagtaagtacgaaataataagtacacttaattagtttgcatattcttttctctacaaagaaaatttaagtaaattagatggataataataggacaatatttcaagattaattaataattatgattattatctatacagtctcatgagttttcaaccgattgagacccttaagtttaaattatatatatatttaaaatattattatagtgttgcatgagatgaggataaaaaataaagtcagaattaatacttagaagcttctctgtatggtacgatctattcctcaatcactttctaaacgactcatatttcttttatagcattattattgtgtcttacctaagtttttatttttattattattattattattccttaattaatataaattacaatatatatatgttctaaaatggtattaggtcttgtttaattagctagatagatgaatgatattattagttgtggatataaatatattataggactataatctacaccttaatacatcattaatattagtgatatcaatctatagtttggtaattaagagactgatcaccctataatttatttttctaaaataaattttaataatttgatcaatgcatgttatgttataataaattaaatatagggaaatttatatttttccttaatttgactagtgatgataagaagagccctaaatgaaagctcctcatgaacttaattattattattagttaatcccaaaaaaatcaaaaatctcaccaaaatctcacgagatacaaaagttttcctttctcgttgtacttttcactttttcgttttcaaacatcccgacacacacacctgccacgctggcaaaaaacgacagcattagcgagcaaaacgacagcccatttttagatcaaccgaggtagctagctcttccagcgggggcggctcacatggcttgtttcctggtataattacgaaaataccctccataaagatgaatgggttttctgtttttggggagggcaatttggtaaattcgagtagcgttttacagagtgggaatgatttgtggacaagtattttggtgaaggaagtgtaataagtagaaaaaagtaggggaaaacgtagactgaacggggaagaaaggctgggttggtatacatatatattactttacgtagatcataaacaaagcaaagatcaataaaaatatctcactatatataaaggcctctctatatattgaggaggacccccactttttgttttcagcacatcaatttttaggccccaaatattgtttgtactcttatatataacgcaaatgaaaaagtagactagaaataattaatgttcgaacaatataaaaattttgtttttatttatttactgcttttattatttcgtaagatcttatttaattagttttcaaaaatttcagtaactaatttagtatttttattgggagctaaggaaatatctaagtcacggtgttactacaatgtggtggctacacgaaaaaaatgagataaagaagactcttcgggacaacccgacccccacattttgtttcaacaaatcaatatttagaccccaaaatactgtttgtacacttgtatataacgtaaagtttttttttttttacaaaaaaaccttattcagttttttttccaagaaatcttacctagttgtaaactaataaactatctcttttaatttgcattttgagtcttgaattgaatatatatttatattataaatatattagaatattttctattagatcattgtattgtattattttgtgtataaaattttatttatctatcaaaatataaattgcatattataatgttaatacatatcaaatgaatatagtaagtagctagagataaatatattt

SEQ ID NO: 184253 - DNA, 5073 bp, Cannabis indica
atacaatatataaaaaataaagttcaaccaacctatattttacatgcgtgcaatagactatttaaaattctatttttttatgtgttaaatttttttgaatttctcaaaattttaaaaaatgttttaaataattataatatacatgaccataaaaaaaagtgagactgaaattttttctaaaataccggaacaaataaggatttatcaccgtatcgtttttaagaggtctattgtagaattttgactatttttttttattaaactaagtttttttttcttatgttgcagcattcgattcaagatggtgtaaagggaaatatttctgcatatatagaatcacatgcatgtaaaatgtttgtcttaactccacactaattaattacaatgtggagttatataatatttatattatatatataaatatttatataacataagaaagaagagttctatatatggattagactccttgtgtactctactatgaagtatgaactattattggattttgttttcaatatataaacataaattattgattaattttgctttttaagtttgataatcttcatctctttgatctatgtgtcattaatacataattaatataataataattcacttgaactttatgtacaattatttttttttttgagaatttacttgtttttttacagctaatttacttgaattttatttagtagttttaatagataattaagtctagctaatccatataatttatgtttgtttatttatttatgtatatgaaaattattaagaaagacatataattctaataaaattttaattaatcgtaacaatttatgttaaacatcatattaagtttgaatcaagttattgtgtctaactcaaatttttagtgctttgacatatgatttatttacaaagttatcaaagttaagaaagcaatccaaaccattaatggcgtgtttacttatgagattagagaatgattcttattaacttgttcacttttctaatttattttaaggaatgagaatgaaatatgtgaatctcacaccaatttgtgattgaggaatgaaagtgacaatcccctaaactcacgtagccgtcacctttattccttcttaaattatgaattgtcatttttaccctcgtgtaattctacatacccgtaaaactttaatcaaaggtatttttgtaactcaaaataatatgttttaattccgaaataatgtaagcacatcaatgaaaatattacttattcacattccaattaaaagtataaacaaaacacaaaattatcattgaagaaccatatgatcaaatagaaatttatactacatttttctttcacttactttgtaatgcaaaagtgaagtttctaataaaatccttacatttttttattgtgcactaaagaaaagattaaaaacttgcacaagcatatatcatcaacattgtgcaaaaatagctaatgtacaagcaatgaatagaacatttctgtactcacattgggactatactcaaatgaaaatgtacacacataccattcaaactaatccaattttgttaaaaaaaacaacaatattgctgctatcccttttcgggttttcaagttcctctcattttctcaacaatttgcttactcttttcttctatgtgtcgcctcttttcttccaatttctcacccatcttcttaccgagatcaagcatccttgtccttcttcccaacctcttaggcctcgagtcatcctcttcgacggatgatgacacgctcacagacctagaagagaattgagaatcggggatcttatcgtccttgcctttctctattccatttgtttcgtcaatcctcaacaacggggttgtcaactcgttcatagtcttatttgatggattagagggagtcgatgaatgtgatacaatatctaatgattcatgggtacatggaacgctttcaacagtctttagagtttgattattgtccggagaatgccccttgaaggatccccgattagcttctgtcttgagtttttcttcgggagattgatcgttaagtacatcattagcattagcagaatcatttccagattcttgattaagccatacgaaaggagatacctttctcggcacccaatcatccttttctgccaacatccaaggaatacatacactttcacagtttggaagcactagagtatcatggattgatccctgtaatcaaattccataagaagagttcatatcaattgaaattaacaatcgaaatggcttttgagtttctcaccttaagccggctgattaagaacaaagcaatatgcccatttgaaattttatgttccccaacagatgagtctaacttaaaatcaatttcaggcatggatgtaaacccgaaccataattgatccgaaggtggtggctttatatgtacccgcagtgttcctcgaagggatgctacccttatcgccaaagatatgggcacctttgtaaatttaaacagttagcaaacgaaagagcgcacatgtgagtgtgtgtttgtgtgagaaaagagcgatcgaaagagagaaagagagatttattacaaacctcggaaacctgtttagcaatagaatttacaatagatttccacctggaaccataagttgtagctgaaagagaacttttagagcttttcaatttatctgcattgcattcaatcaattgaatactgtgataacttatcattactgaaacagatttcaaatcacttaatatgacacaagacatgtttacttttgtagcaagaaacagataagccagatgcaaatattgaacagaatcatatacagatggtttatgcatgtgtttgcatgcatatcataacatgaagggtaaaagcaaaaaatgaacatgctaagagtgcattcggttacattggcctttgtaatttgtgatacatcacgatgttgcatctataacagttgtggagaaaactagaacaatacgaaatattcgaatgaatcgatcctaggacaatcacaaagattctataacaaccaaatcttcctttaattatcctattactcaatcattcagtcaattactcgctcattgcgtttaacataggtgtaacatattggtacagtgaatgacttttcagttttactaacgtgacaattgttcatgtaccaaatcgtgtccctgaactttaacatgtagaattttaaatctaacaatctcaatagttcgggaaaattttttaaacagactgaaaaagttcgaggagcatgatttagtatatgtcaaaattagccaaaaattattcatatgtttacaaggagttaatacaaacctggtttaggatcactatcctctttattctctgcagcatcaacagtcccttcagcaagatttaactgctttccataatactcgaaaccttcaagaagatctggcgatacatcaccaacagagtttgaatccaccgtgctcttttcaggatctagttcacgaacttcgagttgtttcaatgcctaatatcgcaccaccagaatattcaatgtcgacttcaaaggcccacacctcgctcatctccgtgggaagaaccctcataccgtgaatataaggtgggatattcccaggattaacattggtacagatgacttcaccaatgtaagcgggtgttcgcatattagacagtgtcctctgttataccaaaacaacattatatcaatgatgcatctttaaaaccagacaagacattgtatacaatgcaaaaatatatctacacaataatggtaaccagcaaacaatccatgagatttgctaggttgatcataccccccgaaatatgatgcataggcgataattaatctaatgagcgttcatacctgaatacgtgcttgcagggatttaatcattgcttcattttttctagcatcaaaaaagagccgcgagattaacaaattccaacacagagttccctcatcgatacaaagtctttcatcaatgtccgcctcagatacagcagaattttgattttggctactggaatgagataatgttgatgatgtactattagtatcttctgtcgaatgcttaactgtatcaaccggaggagcgttctttacgaagctagtgccaagaactgaatcctgatacgaatgaaatttctcccaagctgacttattttctagaccactgcccttagacgcctttttcgcaatcttcttccacaatgtgcgaaccttcgaggatgcaccttcagttttaggcgtcctatccactaaatcagcagcataaaaccccgctgatggtttcatgaacgaagggtaccccacatttaaggaagtcagataattgcgaaactctttctgcaacatcacgagtctatcgattttacttttatcatcacatgatgccaggcgaagagctctacaccatgattctttttcccaggaagtgtcgaggtaaatgtagacgattttagaatccttgtaaatagcagactccttgttttccaatttgatcggaaatcgtttggccctgaaaaacacaatgtaaaataactatgtacattaacaattacatatttaagaacataaaataaatcctacaaaaatatgtgaaccaaaagtgattcttttcccaaacaaactatatataaacacagttaagctgcattgtatgtaaagagcaaagaatcaaaatgcccaaaaaacaaactgcttaaccaaacatgttgcagaaaaatacaaatataaaaatgattagcagtcaaaatttctgtatatatatatatatactattaaaattcagaaactggtcttaactattgaaaagtacatatatgatgaaaacataaagtaaaatcctaggagtatgaacacattaccaaaggtgttcctttcccaaacaatatatatatatatatatatataaacagttaagctgcattgtatgtacagaacaaagaaccaaaatgcccaaaaaaatctattataccaaacatgttagcataaaaatataaactacaaaaaatgatcagctcagctgtgtcagaatttctgtatatacatattgaaattcaaaaactgagagttagct

SEQ ID NO: 184254 - DNA, 4379 bp, Cannabis indica
tttttatttttgaatttttctgataatttcctattcgggttttatgcttcagatgtattcttttgaatgccaaagaagtggaagataagcatgttttgttagttcattcccaaaatcatttgaaattgattaagaatataagttcgaaacaattcgattcgcgaagagaaaggactgcatcaagatacaactccatttatttcaatgatggatcatctgaagctgcgtctcttgctgcaggctctgttgtagaggtaatgtgaatactgaatatatttaattgtacgcatgaagttacttccccactgttaagtcagagtgtatgtaatgctgacatttttatacattacaaaatacttttcaaactcagaactaactttattgttaatgttttgtgacatatgatagatggttgagcgagttgccaaaggagaattaaattctggtatggctattgttaggcctccaggacatcatgctgaacatgatgaaccaatgggtttttgtctttacaataacgtggctattgcaacacaagttctattgaatgagaaagtgagtcaccctctaactcgtgaatttttttctaaatctttgattcatctctttttttatcacactgagaacctacagtagggagatattattacattttctctcttaatatggaaagttatgtctgctgattttcattttgatttttttttattattttttattatttttattatttttaatagccagaagaaaggattttgatagttgattgggatgttcatcatggtaatggtactcaaaagatgttttgggaggatccgcgtgtattatttttctccgttcataggtatgttataagaattgataaaatgtttatacatttaattgtcctcctatataatacatatagtctgagtagactttgtgttattaaggactatgcaagtgatataacactaacagtatcgtttagtctgtttgcataaactcaaaagatcctgctcatagcaatgttaatctatatatttgtataggcatgagtttggaagcttttatccagccaatgatgatggtttttacacaatgattggtggaggaccgggtgctggatataatataaacgtcccttgggaaaatggtcaatgcggggatgctgattactttgcagtttgggatcatattttgattcccgttgctaaggaattcaaccctgacataattatagtatctgccgggtttgatgcaggtgggtcatgtattttaatgcaatgatgtgttctctcttccgtttcttaacatttttatattcatgcattcccatcaaactatgctgatgaactccaatgtattcttggtgcagctgttaatgatcccttaggaggttgtcgtgtcacgccatctggatacgcaatcatgctaaagaaggttatacatttactaatcttcttttaacagtgatatgatctggttcatcctgcatcaacctattagatttattaaaatattccgtttgttaattctctttatcactaatgcctattgagttttattttgggattgcttttactaattttcagtttactttcttgcattctgttattaatttggaacttaatgactcggatgattcgttatttctttttgtttttcaaatcttttgattcattagttgatggattttgcccaagggaaagttgtgttggctttagaaggtggttacaatctggagtctatagcaaattcaacgcttgcttgtgttgaaactctgctagaagataaacctgtcattggatctgcagaagtgcacccatttgagtctacttggcgtgtaatagaagcggtaacataatgttccaaagtattgttgttttctttgaatttatcattttggggaacagagggctgggcatgaggaagttgccattggggacgactggaaatatttttatagttagtttatactaactatgctgtgtttacttgtccttgtttctaactagttacatcatatgtcatctactttgtaggttcgccataatttaagtccattctggcctacacttgcaaaggaactaccaaagaaattaactgatcaaaaaagcacatctgattccggtagcttctcttctccttttctctttccagacagatatatacatgcttgtctgagttctgagaaggttaaatttgtaaaagttgtctcttatttgtgaaagcttatatactttgcctcttagtcctcttattatactatattagtaggttttgctagataattgtgttctggtcttcaagcactgagaatattcctttagcgtgtttaaattggccattcttacacaagattctcggatctataaattgtatatgtttttagaccccaactagggatcctcaattcaatagccaaagcaacgagagaaatttggaaatacaagtcaatgaaaaatagggaaatgagagaattgttgtataactgaactaactgataagaacatactagaaccacaaggtattcgagagatcccaactctcctaagagcaatagctacattacaatatttcccattatcccctcattctttctactctcctatatattttactctattcctgctcattctctaccttttactacaatgacccttttacccttctacttccaatatgccatcatcagtctgtcattattgttgtttttttttttagtcaatctatcatatttattgttggttcactatatttagagaaagtttgatgcatgtatctctttaaagtacatgtctcattggattcaaagcatgaactgtaaattagaaaaattcaaaatagatgaacataaagtaatacgctacatgcctaaagtgagactcaaattagtagcagtaaacttatcctactcttttattattagaatatatcattacatataattgaaattacgtacattgctaagattgtttccctttccaaactagtatgttccatcttcaagctccgattctgaagtggaggacaatgaaaatgtatcagaaaaatttgcagaccttcttagtcgccttgtagaaccattttcgaagatgacaacccatgcaggtatacttattaattatattaatgagagtgcatgtttacaaagttagtttgtttatataatgtgtaagatgatgtttggattgtttgcaaatcaagtgttaagcaattctgacaactggagatcagacctttcaaaatttgatatctggtatgcctctttcggatcaaatatgtggcaaccaagattcaactgctatattgagggtggacaggtaaaaaaaagatgatttcaaatttgaacaagcaaaattagaaaagtcctttctaagcatatcacaagcttcaattatttaattaattttgaagttcaatgtacaaagatcttagttgttgactgacggcagtctctactgatatttactagtacctttactgattgcacatttcttgcgaatccattctcttgtcgacattttcaaattgattttcaggtagaaggtatgacaaagccatgttccggtgcagtagacaaaacattgccgaaagagattttatggaagactttccctcgtcgattattctttggtcatgatttttcacaaacttggggtcctggaggggttgcgtttgttagtgtagaaagcaacatccaagaaaaagtttacatgtgcttgtacagaattacgtatgtcatttttcttcattgttccttctctttgttaccatgctatcgttttctttactttttccaatcttctattgattaaaacaactccttggacaaattctattctagaaagtttaatctatgttttgatattgattgaaatatataattggtaacactatgtgttcttttacagactcgagcaattcaatgatgttttgctccaggaaaattctaaaagtctaccaattagttccccactgtttgatttgtcagctttgaactccttcaccaatggagaatccaattctgcggaggttaacttggaggtatctcttgtttctgatgcattgttttcttttaggtgtattcatcaactataatgtaaatatttctttattcatactttgtgatcttcatgcagagtggttggtatcgtagagtcgtgtatttgggaaaggatcatgatattcctatactcagtatgacgtatgtattctaagaaagttataagttttctttctagtttttcttggttacagtaacatttcttcaaacttcttttcattcattcatttcttttacttattttcatttttatgttgctatacatggcaggtgcaaacaatctgaatttgagagctttaaatccggagagcttacgctgcgagctccagct

SEQ ID NO: 184255 - DNA, 1632 bp, Cannabis indica
ggtagagatgaagatggaatgagacaaaaagacaaaaaaaaggtgagagtgtttggggttgaggaggcaggtttgttcacataactggtccttttgaaatgctgtcgattgaagtagccgacaaagacacgtgtttagacgacgaagtccttttaatttgtctattctatgttgttgattaaagaaaaaaataaaaatacaatttatttctctttttcatttactttagtcgttgttttcattctaaagtctaagctatatactataccacctaataagctatttagttcctctccaacgatggtaccctagcctagctaccctagtagaggctatagtggtaatgatttttctcttcgtcttagagattgtgttttgcaaccgccagccagaaaagcagaaaagaagtaactttgtttgaattgtacttacactatttagtacagctacatttcatatatgtattgtgtgttaagactataattagaaccatacaaaaaaaaaagacatataattaattaattagaatggtatttattagtgtatgtatgtggtaaaattggttaaaaagggtcgtaagagattgtgatgtgatgagtgagtgagtggtggtcgaggaaatgaatgtggacgaacgccacacacaccactgcttgttttgttttaggtacaaattaccaaaacaaaagcattggtgcttggaatactcaacattaatgtggtttttaatttttaattttatttctttacataggaagtagtggaaatacccaacatcaaaatttttattttaaggtcaaatcaatgttcaatgcatattaataattatctcgtgttacgcatgcatcatcctattataataattataataataaatccaacaccaaattcttgtgaattataatatacatttgtgaagaagaagtgaaagaaactttgaatttgacacatacaacacattttatgagtgatttgaaatagtaattaattaaaacatagtttccgtatcatatattttgttgttttcaataagtatagaattgttggtctctaacttttatataggtgtcggattttgttgtggcctacaatgaatgaatgactaaaaagagaagagagattagaaacaaagcaaaatttattagtaaaaggaagaataagagatgatgtaaaataagaagacatgcaaatgcaatgcaattaataataatggaattggaatgaaacacaagaaaaagaaaaagagacaccaaaaacaaaaagtgtattcagaatatcttaattgccaatctattggacgacttgctcccccacacgtgtatacgatattattttgatggccatcatcatgttgttgttatcatcattttattttgtttgaaagaaaaaaagaagggaacatcttcaagatcttgttcgcttagacctaaagaaacggcgagtatagagcaagagagcagaatttacaaaaggtggaaaaaaagaaaaagtagatgatgttccctaccatccctaccatcatcacatgttgttttccattcaattcccttacccatccctatctctattcctccaaaaccttccaaatttattgtttccttctttcccttcctacccatttcatttcaattt

SEQ ID NO: 184256 - DNA, 4348 bp, Cannabis indica
ctaggaaaaaatctaaattagcctaaaaataaaaggagtatgaaactacatcttaaagcaaaatttaagtgtaccttataatgtggtaggaaaataatgactttagtttaactcgaaggcacaaaccaatcactgttgccatactacaatgttgaatggttggcgtaaaagttatcctgtaattaatgaaaagcaaaaattatgtatttattattattttgaagaaatttaaactaaaagaaagaaattgaaacggagacttgttcaatcaacataactcacagaattcgaccgagtttatcatcaacggtaatcgattcctctgaaagcacactaagctgttccaacgaatatggatgctccggatctctaatatctctcacgaaatgtattatcaatcacaagtcaaaggcacacaattggtacagtgtggttctcactacacaatcacacaatagaaactaaagaaaaacaatgatcaaaactcgaaatttaaaagaacttttaagtaaaaaaggatatcatagatttcgaggggatcaactgcatcatcatcgccatggggatcttcagttcgagctactctttccttcttggcgtgaacaactgggttcgcattgatcagacccagcgtcatctctctctctctctcttcacggggcttgggtttgagcctggcgaggtttcgtctctgagtattaatttatttaatttagtgctaatcacttttataataaccaatgagagaaaaccacgtattgagcaagtttggaattttgctaaaaaaggtctgaaaaaattgatgatgaagtgttagtaattaaataataaaatggtggtggtgtctgtatttgaagcacttggtttggaggatgtttctgtgtgcttgtcaggaaactgtgctaaattctatattgctagtgttcttgcttgccacgtggaaaagtatcttgctttatgttatttgtatattattgctaattttctaagcactcaggtcccgtagctcagttggttagagcgttggtcttatgagccgaaggtcgcgggttcgagccccgccgggaccactatttatagttcattttagtttttattttttattttcttaaaaaaaaaaagaatggaatacttcattgttttcatgttttgttcattctttcaaattattatattttcatttatcacaaattcatttttttaacaatatcttcacaccaataaaatgccattatgttttttttttgaatgaaaatattcattttttttaaataatgaaaatattcattaatgaaggcatttagagtacaatagtgtttgaagctcaactagagcaacataaacgtaaatgctacaatttgaaaagagtcgagaacttctagtcacgtagtgagctatttgattataaaattgtttgctaaacagtaactaaacattacataaaatagaaagtaaaacaatctttaatcaaaagactaaatgctgagaacatttgagtattgttacgaatagcttgaattgtgactaagctatcagtttcaatgaccatataatgtcaataagagtatatcatccaagagagagctttcttcacttcaattgcttcttttactattttagtgattgtttatatattaaaccatgctctccatactttgatatctaccaaatcatacccctcaaactttcatatgtactaaaaatgcccccgaactttcatccatgtaagaattttcttactaaaattagacaaaagtccttaaatctaacaatcttaatagttcagggggaatttttaacaaccaaaaaagttcaaaggcacaattttgtacatgtcaaattttggagggaaaaatgctaattagcctaaatatttaaactaaaaaatatgtaacctttttattattatttttttttaatttttacgaagatggatgtcttttgaagacacacacccaaactcaacccaagtaggaagtgggtgtcttaaaaaaataaaatataaataaaagaagagtgttaattataattttttagaaatttttatgtttgaaatcatatattaaaataatttttttatttattttatagtagtatacactatagtaataaattatttttgtaaatttttaataaatttcgaataatttaccatatcagcaatagagtttttgatatttcagttcattgtacatatttaaaaaaaaattaaatatattttcaagattgtaaattattcaggatgatattataagcgtaataaataatattgattttttttttaaaaaaaaaatattttgatatgtatttttaaaaaaaataaactaaaaaattataatataagattgactcctcaaaataaaaataaatatcaggaggaaatgaaaatccaacattccaactcgaaatcactgtgatgtataatattatcaattaacccaatttggaatttcaaagtgtttgtgaatgtgaaggtgtagtttaatttaattattaaaaaaataataaaaatattgggaaaagattcaattggattggacgaacttgagttttataagaagatcgatcatcaaaggccctcaacgtgagtgaagccattgctttcgatcaaggccgtacagctttctacaacacaacaactgcaaaccccaactactttcctttccgaccacctccgttatccgccggcctctctatctccggcgtcatgatcgtctcttttctcagtcattaagctgtatgccacaacacagccattggttcattcctcaggtttgtgccttctcttttctctttctttgaattgagctgattcgattttgctagttttgttcatttttagggtttgatttccattttatcattttattattgataagatattcgagtggctaatggataattttgtagactatgcattgaataattttgagcaatgtataatttggtggaaaaatccttaggattatatcaataatttgatatttttggatgcaatgcataattgataaatagataaggagttccttaattaaagcttaccatgaccgaccttatgtaatcaactcaatccctatcaatgaactttgatcaagagagggatcaactccattaaggacgtatatcgttaaattagttctgttcgaactcaaattaaataagagagtacatgaaaacctgtttagggtaatttgcagcaacaatggatgaagaatatgcttttctttcccttttttccctaaattatttgttttatatattgttctctgtttgataaggtttttgtacttacatattcctataactttgatcagctttgaggcgtagccgtgtctaaaacaaagttgtttagtgaagaacgataacggaaaaatggttcacagtgcctacgattcatttcagcttgttactaattgcccaacaaagattgaatccatcgaatcatatggttcgaagctccttctcgggtgctcagatggatcacttcgaatctatgctcctgaatcttccggttcagatcgttctccaacatctgattaccatactcaggtcttagagctgagaaaggagccatacgtactagagagaaatgtggtaggtttctctaagaaacctttggtatcaatggaggtcttggaatcaaaggagctccttttgtccctctcagagtcgattgcatttcacaggcttcaaaatttggagactgttgttgtactaaccaaggctaagggtgcaaatgtgtattcatgggatgatcgcagaggtttcttgtgctttgccaggcaaaagagggtctgtattttcagacatgacggtaattcaataaatgagtttttttatttttattattattatattgcagacaaattgaagataaattttgatgggctttttcagggggacgaggttttgtggaggtgaaggaatttggagttccggacacggtgaaatcgatgtcctggtgtggtgaaaatatatgtttggggattagaagagaatacatgatactcaattctaccaatggggcattgtctgagatttttccttcgggcaggctagctccacctttggtggtctccttgccttctgggcaactccttcttgggaaggtatgttttatatatatattgattcttgcttatttttattcatatgcattattttgtaaagaaaatggtagaccctaagtaatgagaaaatgacttgtaactgtaaagctgtaagattcattgtgtggtacaagagtttttccttttatgttccctactttttttatggtgcttgtgtttgatgaaacaatatatctcgtaaggttgcagtgaaacctttcccaaaacaatttattttt

SEQ ID NO: 184257 - DNA, 2626 bp, Cannabis indica
tctctctctctctctctcctacatgccacatgcactctataagacactaagtttatttcccatttcactcagtagagatcttcttaaaattattctcactattgtactattcatagagagccactctagaaattataaggtaaaagcctgtaatctgagtggtattatctcttaaatcaatataacaaaaagaggagtagctcattacctgttaaccaaaagggctgaacctctataaatattattgtgctattctctttacttgctttagttgtttacacgtagtgattccgatcataaataaggctctattgtcaattgaccaaatctgaggtcaacaccaagaatagacacaagacagttgtccttggttatctaggtgacaaggttcagaaaaggcttcagaattgggaaggaacactcttatctacagctagaaaagaaatttatgccatgggagtctttttgttgcccttagacattaaccgtgacatggagcggatgatggcctttttttggtggaaatcttctaaaaatacatctaaagacattcattggatgtcttgggaaagactatgtcatcataaaagttggggtggtatgggtttcatgagcttgaggattttaaccttgcccttttaggcaagtaggggtggaagcttctcactagacctctctctttggcttcttgaatctttgaattgagatattttctgaatgttaattttgcttcaactcaacttggtcacaacccaagttttatgtggtgaagtattatggatcgcaagagttggttaagcacggagtttgttggtatattggtgatggttgtaacatctctatcttaggtgaaccttggctccctgaccaggttaatccttttttggtttcaaaccaccctgctcttcttaatgctacggttcactccattatgaacattggtggcttgggtttggatatagatcttattgctaatctttttgaggtgcgtgagtaagctttgattactaatctttccttacaaattactcaagtaactggccattacgtgtgattaaaggagacttcgagtatatactcagtaagaagtgcctacaatttactctagcaatctcaaggtcactggtttgagaatgatgcttattctttatggacaagatgtggagtttgagacttccaccaaggataaaatattttctatggcgtgcaacgtcggggtgtcttccaacaaacttacaattgcgtaccaagtatgtagaggtgagtcctttctgtcctttgtgcaatgagtttgatgaaacaattttccattatctagtaacttgcaaggcagtagaaacatgttggaataaggtcgacatagggatagtggttgagcatgttgcaagtttctttgattggtgtgctaatgcctttcaacgtacaaagaagaaaaaaaaataccttttgccagtcatttcttgggctatttggggagcatgaaatgatttgtatggaatggtaaactagtgagagcataaataattgttgtctttgtaaaaggttactttgattaatggaataatgctcagaaatctaaaatagattcaccatggcctgattttcaggagggtgatggtagcgagagtattggacacctccacaagaaaatagtattaaggtcaatatagatgtaataactttatttgatgggagtcaaagttacggtgcctcaagactcagatgactttcttatagagggatgtactattttttcttttggtttggttgagcctgaacttgccgaggctatgggtgttcgggaagctcttagctggattaaagatcaaaattggtagcgggttgtggtggagaccaattgccttggtctgctgtagacattaaggagctagctttatcgatatgaattttttgtttgatttagtcgtccaagattgtaaaagtttgcttgcaattttaaaaaagtctcactttatttcataaaatgccagtttatgtggtggctcatagtttggctcgagttgcaatattgtatcctagtggtcatttcaattcagaacctgtttaaattgagttgttaccatatttgctaactgaaatcgatagttaaataaaattgattttccattgaaaaaaaaaaatactataattgagaaaaaagttataataaaaggtcatagaaggactctcacttcaatattacttgcttatagacttgcaatgtatatagaagaattcataattaatatacattaaaagaaagagaaaatacaaagttatcatgaagttggcattcatacatataaatataatagctctttcactcatacattattttttgtagtattaatgagtaagaataagctgtttttcgaacaaataaatacacaatgatttttatttctggtagcatatatatagatgaccatgcctactgaatgccaccacctctatagttactttcatattcatctttagcagtatatacccactagactactgctgccgcgtccaccgccatctcttcctcgatcctctagctagcttgtcctccagtttcaccaccatatcctcctccactaccaccaccatcagcttgtccaccagtttcaccaccatatcctcc

SEQ ID NO: 184258 - DNA, 3820 bp, Cannabis indica
attcttgttggtgtagggtaaaaagggtaaaaaaaattatgttttagtatttacttgtaactaaatactatgctttagtcacaagtaacattttgttgtgactaaaattcacatttagttacaaaaaaatcatgttgtgtttgactaaaaagttgtcacaaaaagtaacagttttttgtaatggccaacatccaccccaatttactaacaaattaaagacatgttgatatgtttgaaatgtttcaaattgagtccacaccttttcaaacagaacgcaaatagaatcccaattcgccaaggtcaaaaactaatttgatcagtacttccaatcaactagagcttatgaactaacttgtcaagatcatcacacatgcttttaggaagaaggaaagtgtgcatagcattaaaagtttgcaacaccagctttctatccgagcagatatattttcttttttttttttgagactaaacaaaatacaaaacaaaagaagatgctaaattatttctagattaaaaacaacatatcaattaattaagtgtattatttattttatttcaacgaaagttatatatatttttatctgtttgttttgtgttcatgaaaaaaattggagattatgggaaaacaaactaaattaatttccttatttatgtatacataaataaattcgcgcggatcaaattttggactgtatctcatacgtaattcaaaagttagataatttgttttttgcttaactcaaaagttagataattcatatatgtttcaggtggaaattggtaaatgaccaataattgaaaataaattcgtctaacacgtcagctattatgtcttttaggcgactcaactaccttctttaatgtatctctttcaagttcatgacatgacatgatatgatccggaatatatgtacacacattttcttttatacacatgttatagggttgagataattcatgacaaattagtcaaaattaacaataaatagctatcctaaaaaaaaaaaacaaaaactaaaactaaacaaaaaaaaaaaggttatattagagtgcactaagcaaattcattatatggtaacgtcgttcttgtgcgaatataattactcaccttattcgaaattatttatgaaatatactatgaagaaaaatttattacacaattaggatgaaaataaaaagtacaattactgtgtagtaagttgtctacttgtatatggaaatacatgttattcttaggtgtaaaatcagagtgcaaaaaacaatgaaaataaaaaatggaagatgggatagcagtctaatcacataaaaatcagatataagcactaataattgaggaaaggaaagctagatagacgaaatcctacaatataatttgccagttctctctagcttctctcataactcatatatatatatacacaatattattattacatacatatatacggtatatatagctagctttgcgaagtcatttgaccaaatttacaatttaaaatctgtagtgtcattgcttttctgtctcctcagacccctcttgccaattggaccacccctcatatcattttctcaatctctcaactacatatatgttctaaacaacacatggtttatttaaacaacataacaactttgcataatatatggagtaaattgcatcatcaccttcaatcttcgccccactaacaattaacttctaaaattttaattttgattgtaataccttcaaaactcgcattatatcagcatttaactattttcatctatttttagcagttaattataaattaagtatagtcgatatatatggacataaagttttgtaaacataaacaaagtgtacacataacactatattattagccctaataaataaatatttaaaaataaaaataaattaattataatagaaaacaattatctcatcatattaatttctcacacattttaaactccattttatttatttttatatatttttttctataataaaaataaattaccccaagtttttaaacaatccctaatcccttttccccttacctctctcttctccccctaaaacctccataacccaccatccctctatccatgaccctcttcttattcttccattctcatctgaacttgaaaactatcccacctttatctcttcattgcctagaagtcggccatcacttttgtcgtttctctttttccaacccgcatgagcctgatttcatctcatcacacaaccatttcatctcccctaaaccactgccacgacccaacgcaagattaggatttggaagatcttcacaagtggtacccacttttgaaacttatttggtcagctaagactaagtgtggccagattgaagccgtgaagctccaacaagtttttaaacaatgatgggtgaaggggacctaaaggtcttggagtttaaatagtcagagaggcctgcaatggtctctattttggtcgagcatcattagaggtggctcatcgacgttgagctgagagcagcgatggagaaagagacagatctaaggagtgggttttaaatagtctgaaaggcccacagtggtctcttttttggtcgagagtcactagaggtagctcatcgacgttgagccgagagcaatgagagagaaagagatagatctaaggagaggtggctcatcgacgttgaaatatttatttacgtgagtcaataatatagtgtcatgtgtacactctgtccatatggacaataccctaagtacacagggacaactaacttggcattttactgccaaaaatggatggaaaatgctaaatactaacaaatgcaaattttgttttacctcaaaatttaaattttaagagttgattgctagcgaagtgagtattggaaattatgccataatttactctaatatatattgttattagatgattatttaacaagtatagtctcatatatgattgcacatatggattcatttccacgaaagaaaatgataacgtgtcaagagtataaactccactaaataaattgtccttgcataatagaaacatgcgagaacgctagcgactgatataaagtctagactcgtattatatactacatgacaataagataaaagtgagacgaagagagaagcacaatcacagcatacatagaatatacgcgatgaccaagtattttctctcttgcaccacgtgtgaaggttgcatcttcacatcgattactccaaatactattatatgcgacaacccgtatgaaccagtgagttttaagatgtcagtataggaacgtttaatatgcgactaaggtagtcgcagacattccatactataatgtaaacagacaaattattcttaatcatttattttcttagtgtttgttataaaatttaatatattaattatggaaaattgtcctactagacggattacgcaaatcaaagggcgtatgctttctgtataatggggcgatccaccaactaataaacttaattacaaactttctcaaaagtggactaggcaggttgagctcttgatgaaccactatatttttgtgtgtccactactacaaaaagggcctttagaaacagttcttttagccctttagtaacagttttagagaaattcgcaatcgtaggcattgcacgcatagctaaagggtggtgaagcaaaggaaggcataggagacccctatggcttcgatttttatgtaataatcgaagccataggggcttcgctcaagtgcaaaaaagtacctatatggcttcagttattatgtataactaagttattatgtcataataggacttgttattaatgatttttattttt

SEQ ID NO: 184259 - DNA, 8873 bp, Cannabis indica
aatgacaagttcagcatgattcagaattcgacaatcaaaattaaattcaattcaattgcactgcctacttcaaaaaaaagcaacactatcaagcatttatattagaacaacacatctatttaaaatatttacccacccaccatccagcactaaacaagatctataaggaacaggttgaattgtttaatcacacattaaaaagatcagccagacccatcccgctcataatatactacaagacaacggagagacaattccaacaatttaaggcaaaccaagctaaataatgattataaagagagaaatcatactgcttattgtcttgctttgtttggtcaatcggcccccaaaataagtcatcatctcccttgtgtcttgactgagaagcaagtgaattaatctgcataggagacgcaactttagatggagatgagccagaaatagaccatgaaggaccactgctgcgtgggggatgggttggctgtgccttctgaggagttggtacttgattcacttgctgtgaagaagataccttcttctcttgctccttcagaatatcccttaaagatgttggttttggaacctttccagactctgtagaccatgctggagaaggaggaggaattgctggctctcccttccaaaaaacaaaatctcccaaggaaggccctgatgggattgcaggtaatacttccttttcctgctgtgtaggtcgggagcttttgactttctcaacagggcttgaactaataggcacatcaacagatgcactagaagctgagatcctacttccagctcccttagctttagcagattttttgcgactctttttagtgtctttcgcctctataaagttatcatcatccacaggttctgaaatgggagttgcaacctgtgatatgcttgatatagtagcagaaacatcaaaatccatttcagtagacttcgccaatacttcttcagccaatagatcatgcaactggctcttcttgctctttgggtttaaagtgctgtcaggcttcccaacacttgacacagcagtacctacatctctctgaacctctctagatacttttggatctgaactggccacaactccagcccaaggagcactagacaaactcaaggagttaacagatgtagcaatctccgacacaactatatctgcctgcactctattctgttcttcttgttgaatttctaacaatgactttgctttgaaaccaggagcaggtttccatgcccgctgcccagctgcaacaggcccggtgtgaggaacttgagtacttgcagccattttctgaattggttgggattcaacaacctcaacaccagcattcctcgatttattgaccccattgtcttttaacagatgtggtgatgacccatatatctcatcccctgcaccaacttcagcctccaacttattgtcaccaacaacagtcctttcagtttccaactgctttgattgctgagtagagacagtcttggcccccttcgcctgctcagacaattgtgcttttacagatttctgtttcttagacttcttctcagaagcctttttcggttcacgaacttcagcattttttacttctgtcattgtagagagctcagtgttcatttccatggcaaccttctcttcttctactgcactagtaaactgtatattcacatcatttgcatctgccactttaggaatttcacttgcacaaacttctgattcaggcataactccaggatgctccaaggcagaagattctgcatttaacccagatctgggaaccatgatgtttctttcagatctaaatgggctttcagaaggcatcccttgtgatttagtcataatgctatcagaatcagatacggatttttgcacaagtaattcctcagtagccttgttcctcacctcatgcaatgatgagcttgaatttggtaatgaatccttctgacaaccatcaccaacctgttctgcaacagtaccaccccaactcttttgatgggtaacattgtcaaacatttgatgaggtaaatgtaaagaggcttcggaacttgcattataacgtgtatcctgattaacttgtggagagaaattcattaagcctgcagacacttcatgctgaatactgggaactgccatatttgaaccaactggaaacaggtcttgaggtggttgaatacgaggatcaatagatgcattcactttcggtattgctggaacctgcaattgcccaaatgatagttccccaaaatgttggcggttttgatgctccgacagaacatgagaaagcagctgttgctgttgctgttgctgttgtcttaaaaacatttgctgctcttcctgtttctgctgctgcttaagcaacaaaattttatcaaacaatgatattggctgtgctggaacaggtgtctgagaatgtaactgcaacaggtactgctgttgtagcatatttaacagctgtggatcctgtgctaaactagaaggcagtaacttgtccggtgttggaatgccttgtgtattatcaacaacctgaggaaacagattgggtaaagatggttgattctgcagctgcaacctttgttgatggatcccatgaggagactgaggtggagcaaaactctggtcatgacgcaattccatctttgtctgtagtagatctgacccactttgggcattaaaatttgaccaaccagcaacattattatttacaccagatgatgaccgatcagataaaccttggaggacagacatcatgtcagcattctgcaaatgaggctgggaagaattatctgtcactggtggcagtagtttggagtcagtggccatctctgacatcggaactaaggatgctgaatctctacctggccaatatggataaggagtaggcaatgacctctgacgttcaagagccattctcttggcaagtaggttgtccactccagattgcggcaaggtatgagcattattgccaacataaccttgcaaacctacaggagaacataatatcaatcagcaaatgctgtcactaataataaaaagcataatccaaatcacaatcacatatcaagaattatcaacttttgtcgagaaatcccaccttcggaaaatgcaatcttctggagaggtgaggtaccagacatcagtgattccaaatacctattctcagcttctgtagttgaaccatgatgtttaagcctaggttcatttctcattaaatctatgtcgcttaaaccagcatgagttttattaacactgccaaagtttggccgacttcctgtgtcagaaacttcatttggtttaggagcagcaaatccaggtgggggtctggctttcgctcgaagatggggcatcacatcaccaagggatgcgaatggtacatcattggatgctcctgccaggcgaacctgtaaatctataccaaagtatccagcctcaaaccatccaataatatcagccccagcaaaagggccttgaatcataccctgaggatctacataacaaagttgtaactcttctggagaaggctgcagaggtttcctcacatcctgttctctgtccaggactccagacggttgtcttctaatgatatgatcctcattgctttcccactttgccccagttttggttaaagatgaatcagcggtattactttcccattcattattaagattcttttgaagatgtgaccaacccatctcaggtgttcttgacttagcatcagttggagtctctttccaatcatgcacgaccatatgagagggttcattcagtgattgggctctccatgtagcaccaggatgagcagaaacattttcctgcatacttgacgagtttgattccctactaatagtcgcttcgtcagactttttaaaagatccaccatcttctctctcaactgcatataaataaactgtagtgagaaactatgtctcaaaaagttacacatgaaatacgtacacttaaaaaagatccatattctttcacagttacatctatatatatatacatatatataaattatacacaaatatatattatataccaagacttcatttcaaaagagaatataaactaaacattcttaatgcccgtaattgttggagcaatagatctccatgtcttaaaaaattacacatgaaatacgtacacttacagcagatccatattctttcacagttacatctatatatatataaatgatagtacacaaatataaatattatacaccaagacttcatttcgaaagagaatataaactaaacattcttaatgcccgtaattgttggagcaatagatctccgctttggtcacagccaacatttctagacctcaatcaaaagtacactgggcaactagaacactcacattagatcatttgtagatcaacaagcgacatccaaactgaggaaaccatcctcgtcagttatacctattacctagagtgggttcttatacattttttccgtattataaaccctaaatggattttatattctggttggactctttaaggacagtctgccttactagaaagggggcatcggagtaattcaacaaactaccttttgaaatggcagagttttcatccttaaaatcttcaaaaccttgaggtaaatcttctttactacctgcaatgcacacacaagataattccatcaaagagtaaaagcatgagaatcaactataggaatgtatgttttccaattcactaaatgaataagtgaaataccaagcttagttcgtcttgattgcataaaatccgtctggccccgtccttctttggatatttgtggtgcgccactacttacaatatcccctttatcaattcccttaataaccacctactcaacaagaaaagaatgtttaagcttgctgaaaagtagaaagcagtaacaacacaatatttaataaatatatatatgtatatctaatgcaacttaccatttcctcaggacttggtgtatacagagctagaggctcaaccgggtcatccactgtaagggaaggaacttctgcaccatccactagtctccggaatgatctcaaatcacccaatctgtacacatcaagtaactttgtcctactatacttcaaatgtgaatgctctccatgaccactttcacctttgtctgaaaaggtgccctgggactgagaatgcgaagaaatatttgcagtggctcctccagaactaactctcccacggccaagagaaaatgaatgaggtgcattttccccacgacctcgattatacaaatatggaggtacttgtttgtttgaggtttgtgtttggttatgcggttctccccttcctcgaccttgtaatgtgctggatctccaagggcgaacatggtccccttccttttcttcttttccatgattagcaacaattgaagacctcttatcaagatatgagttagcatctttaccagaatccatccatttctcacgcaaaccttctgcctctttttcatcaggtccccaacgagagttccacttgttttcacgtcgctgttcgtaattggaatccttgttacttgaatcagcccatcgctcagatggagcacgacgcccttcaccaaagtgtctagtggatgaattgttgtctgtccaacgttccaccctacgagggtcgccatgttctttttctccatccctccacctatcttttcgcatagaggaattggtgtccctttcttcatctcgccagcggtcacgtcgaccagtttccatatccagcaaggatggtcgaaaaacatcttttctcttctgagtatcatgagtctcctcaccgttgcctgctggtttcaagaaatctgtgcgatttccatatggaaaatttgagcttggaggattttcctgcgaacattaaaaaagaagtagaaaattcactagataagtactattttggggaaatttcatagcattcctgctttttatacatgtaaaagtacaaaagtagctgaaattattaaatattgtaaattagtctgcctataattatacacagtaagtaagttcccgtcagtaagcaggcatatgtgaaggactaatgctagatacataaatggtcaactaagtgataagggtaacacaccccagttcctattcctggcttgctctctcccggcttagacagaagccattgtggtgaaagtgggatgggattgtcaaatccctgaccatctgcatataagatataagcaccgagtaagaattttaaaaaaataaaactgttacacaactgtcaccacaaaaccatcacaaagccaactggtgaagagacatagaacgaattagagatgactcgttactctatgataaacggtatcccaagaataacaaaataaataaaatattgaaggaggcaaactgtttgaatgaagatacagaagtgtgaataacaagaagttaaaccaccaaaaaatggattgcaaaatattgtaagtccaactagattcaccacgaacgaaaaatgaaatttgaagaagaaatttcaaaatacctatatagaaaaagactaaaaatcgccgacataaattgatcttacactaatctttatgaaaacgtctttctttcaacagaaaaactgcatttctttccaaactcaaaacctactatttttcttgtaatcttcgaatatatcaaacccatagttaaggcgtaatctagtaagagagcaaaccagcaaaagaaaaaaaaaaagagtccgaaaacagaacaaaaccctaagtgcaactatttatgaaagcttaaaaccaaccatgtagaaaacctcaataagaaaaatgcatcggtaaagaccagaagcagaaaaaaaatgagaatggagatcagcatgcgcctcggcctctcagccgaactagggttttagagggaaatcaacggcggacgccataggagacgaatcgaatatcaaaatacctttggggatctgattggaagtggcaacggaaaggttgagaggacgagaatcagagctggaacgagcggccatggatgatcgggtagagagagagagagagagagagcaagagcgactgagacaataaaaccctttgctttcgattgagcttgaatgagttgtgtgggaaagaaaatagaaaacaggaggaatggggggaatagtagtgaagggcaaaattggagataaatgagatagagatgagtaggttaaaaggatataacctagaggcgcacgttagagaagtgtctttcgattttgttgtctgacctttaatacttaaatagataatattatacacgcgccgataagaaagtgtaaatcacgatagtacaaaaataacgacacgtgtcagatcagttgttcgtggtgtacacgtggatatctgattactgtctatgtctggataacattaactttgcccttgttagttccagattggaactttatgtatgattttttttaatttatttagatttgttttatagaattttcatttttatttttgttgtgtgaagaaattcttttgtttgtttatcttttttaacaaagattttttttttctgttggcaaatataaaaattctttcgtaaatgcaagatggatgaattgaattatgaatatgaggttatctattattttgagctattgctcttgatttatctagatgattttaaataggataaaagtgtttaaattactagtttagtaatattttaatataaataattttttagcgccgaaaatatacttaaaaggtaagtatttaaattattttttgacgacaaaaaatctaaattattatatttattttagaaaaaaaaaatctcaaccaccaacataaaaaataatcaaactcaaaaaaaaataagggtgaaaatacattattgagtagtatctgctactcttaaatacaacttgaataattcggtcaccaaacagtattagaggacgttataagcttaactttgattaaagtgtggttacaacattataatctacaggacaataccaaaaaaaaaacatctttaaaataattaaaagattactaattcattcaaaacaaaacctaaagaggagattaaaaatactttgttcgcaactttttgcacaatattcaagcaatacatctcaaagataatattttcatacccaaagcaataacattggatcatgccatgtcgaagagccaaagtctctactgctttgagatcaagataactttccagacgccacacaatagaagcaataattgtaccagaatgattgcgagccactataccaaagccactacaattatcaaatttatcaatagcagcatcaatgttcaccttgatatgaccagtcaaagacaatttcgaaactatctcatctggtcattgtaaccgcgtgtcccagagaaagcaaaagcccaaattaaacttgactatagttggaagttctaaaaaaattcttgattccaattcaccgtcaagacaggtgataagttaatgttattatgtatcatttatttctcttgagctagataggtcacaaaatagtcataactaattccattatcttaattattgtgttagtatcactttaagtaattaattttttttatctttttgctgtgaaagcatccatgttttaagtaaatttgatatttttactagaaaaagataaaaataaaaaagaaattaaaaaaaaataatactttcgagtgccaaaaagataagttaagtattataaacataataatttaattattttcgttgttaaaaaataatttgaataattaagtgctacaattaatttaagtatttttatcgtaatatcaatattaatagcacatatagtatgagacactatgagtagtatgctcatacactagctaatttttgaagggtttatttcataaatactcaaaaa

SEQ ID NO: 184260 - DNA, 1337 bp, Cannabis indica
ggcatttgtaacaacatgatttttcattttcaaacaataaaaagttgaaaggtttttgcgtacacatatctctgcctattgactctccatatgccatttcttccactctgttcacctatgcaaactataaaagtccaattcatgaatatttaaatccatttctgtttgaccttaattagtggatgcagataatggagttagaatttttgtgtggcattgtctgcattgtcatgaatatatgaaccaattaccgtaggctctgtttcatcacaccattgaagaagcctagttttttattacaaaattattaacatatgatcatgccacacaaatttagcttaccccttcatcattgaaaatgctattatgattttgattataagtttcatatatatatatatatggaccaaaataacttgtgaattttattttgattcggtttgtgaattattctcatatgacaaatcattaattaggggcctctgctgttgtgctgctactgatggtgtcactaattatgaatttgttgggatattagtagttggggcaagtacaacaatgtcgatcgatgccgattgatcaccaaaggtatttgaggttggtgcaagtttaagcttcttcatctcttttcgtattccccatagcaccaaatataatccacacacgatcagaactcctcctaatacactgggatcatgtttctcttactgttaataacaaacttatatatacatatatataatgaaacatataagggcacttaataaatagaaaaaaaaaagtacccccaccaccatatagaagtattaaatcactcccatccatcaaatgaactaaaatagctactaatgtaaaatttaattatctttcatctatcttttgaaatacattactaaagatttatttttttattattttaccttataaattgcgacctcaacagccaactcaatacttgaattagaagatagttaagttagttatgtaaaggatcaatcattttattagaaaacagagtgagttgtgagctttgtgagctccaagaactatggtggcgtttgattggagataataaaatggaatggaatggaaaggaaacaatttttcttccattcttttgtttagttacattttaaagtattagaataacattctaatggaatgccctttccaccattttggtggaatgactattccatattaaaaaaaaaaaaaagaccattctaatataataagaaaaaaaatttaaatgattttttatcaattttttattgcatttaaatttgtatgccatttctattcttattctcattctcattcccattcttattcctata

SEQ ID NO: 184261 - DNA, 1885 bp, Cannabis indica
tgtcgattgtaaagcattgatttagaatcaggattttaagagcttgcttagatcaaactcattccttttcgaatggaaactaaccaggtgtttggtttggcctactcatttattgtccctatttagtgtaatgcttctagttttagcagtagttttgctctagtttgtgtgatatgtaacagtcttgttatcaattatgacagatgtgtactacttggggtgagttctggtgcgaacatagcagactacgtagctcgaaaagccgtcacgactgggaagcttttggatcccattaaggttgtagcacaagtcctaatgtaccctttcttcactggaaatgttcccacaatgtccgaaatcaaattttcaaattcttatttgtacgacaaggctatgtgctctatggcctggaagctgtttttacccaagaaagagttcaaccttgaccaccctgcagccaaccccctagtttccaggagagagttgaatctgaaacacatgaccccaacgctcacagtggtcgccgagcacgacttgatgcgtgatcgcgccactgcttactcagaggaactgcggagagctaacgtggatgcaccagtacttgagtacaaggacgccgtgcatgattttgccactcttgaagtgctcctccacacacctcaggccatggcttgtgctgatgatattgctatttggatcaaaaagtatatctcacttagaggccatgagttttcttattgatttttcttcatcttattattattattttattggaaacgagagaaattcacaggattgaagaagcatgtttgcggagattcagcattaggaaaggacatttttgtgaatatagcatgttccttcaatttggtgaggtttttattagggagttttttttttttgacattctatcgtgtatagcttggggttcttgtctatgaataggaccctttgtaaatcaacatccagcctatatattctttcattttctttcttttatgagatattataatcatatatacaaattaacattaatttcggctcacatctatatatataaataatgtatttgtatacattcttgcaaataatattctaaaataaaaagaatctcatctactccagataaaatcatttgtcccttacaaatccaaagcgacaacgactacattctaagttctaacccctcactcttatctttaataataaatttgctgggatttcgttgatattgatcaataatcgtcaaactaacaactataataattgtggataagaaaagcgacactgaacatgaaacggcattaaagagaaaaaacgacaacaatgtcaaacatcgatgcgtggggtatgcgactgcgttgtgtgatggtaattttttttttaatttttaataatgatttgtactcatgtcaagaatagagatatagataagaaaatggacatttctatataagagtaacgagagttgttttcagctaattatatctaataaagatgactcctatttaaaaattatgatacgttaatgaataatatgttttgatatatactttatgtgcatatattacaagagagtaacattgttaaggtgtgaaaatttaagaacatatcaatataaattgtaacagagtatattgaattcaacaatctcatcaatctataaaaaagttatagactaaaaagagagaaatcctttatttatagagaggagattacatagagaacaaaataaaaagttagttaacttaactattacaactaaaaaacagctagagaatgaaaacagactactaactaatactttaacagacactcactatattattccccctcaaatgaaagggcgtattacacacacaatttggatttcaaatagctgaat

SEQ ID NO: 184262 - DNA, 2320 bp, Cannabis indica
catctatgtattatttgatttaagtgaagatgttataattaattcatttcatactaaatctggtgcaattcactggctttcctgagaattaattatgatgaagcaagaaatgttgttctcttatcctgttcttcaaaccagtttgctcttatggtatgtaaatgtttacttctaaattttatcacttttatgatatcttataattaacagatgaaaacactgatgcaatcatttgctgcggtgtttttaatgattgtactgtaggtgtaggctgtagctgtggtgaaaatcattggctgagctctgaaaagctcgtatggcagtatggcagaaagggtcggaaggacaagtttgtttgagaattattccctttgtaatatttactgagagaggaaagagggaaatttgcttcttggtgggctcaaagtgccagagttcttttccaggaaaacgtttgtgtgttctgtaatcacaatgaagaatcagtgatgcatatgtttaaagagtgcccatttgtgaatgcttttatggttcggctcaagatgggaagttaggctggttggaggctctttcctttgtccaccccaaggatttagtggcttggttttgcagtccggaacaggtgcatgaaccagttttgcgagctagaaatcaactcatctttgagacccaaactttcaaggtgctcttctacaatactccatttggtgagactcaaactgtttctttgtgtatccatctttagagatgatgataattgtattattgatcaaagattgtttaatcttgatattgttgtgagcctttagttatactagagaaatagtgaatgatttgatcagactacggtccccgtggttttttcccgcattgggtttccacgtaaaaatcttgatgtcttacttttatgcttgatttgtatattttctattgtttgtggtattttggttgatatttgatattgctcattgtggtgtttataagtatctcatttttaacctacaaagagagaatgcaataggttttcccaacaaaaacaaacaaagggcctccgtttagagaaaagtgtttgaagatgtggcagagatcactagaattcgggataaactaggtggccacggatgctcttgatggctcctccactcttcaaatcgaagtgttggcaattcgcaaagcttgttccgcagctaccagggagtctctgggttccctcattggaatatagcttctatccttttttttttgttctagtgctagtatagtgaaatccttttggggttgtaatttcaagtttgtagctatatcctttaatggttcagcattcactgttggggagctacccttttgtggtagtttagctcttttctttcaatataatcaaacttaacaaaagacaaaacccagagaaatggtagttgctttttaggtgagcatttagatccaacaactcctttcagaacttgttttctcatagaatcaaaatgaaaatatgtatgtaggtaaaagaatcaattcaattcataaaaataaatgaatgttgaaaattcaaacattattaatcagatctctctggtttggggtgtagaggatgagcttcaagatctcaaggaaaccgtttcaacaatccaagctgtgcttttagatgctgagaagcagagccacaacaaccatgtcaagaactggctccaaaggctcagcactgtagttctcaaagccgacgacttgatggacgaggtcaacactcaagctttgaggtgccaactcatcatgtctcacaacccaatggccaaccaggtacatatttgtcatatatatatatatatatattatttgctgttataaatatatatgtaggaactctaaacagatttcaacctcaaagatcctataaacaattcacttagaaagaagtcagtgaacaacaattcaaacggttagtcaatagacatatgcaatgggaagtgagttaaatgcacaaacataagaaaagaaagcatatagtcccacatagaaggtcattgatcctaatttattgaccagaaaatttaagagtacaattacagtcaagaggtggcaactctaatataataatcccactcactctctctattgatcttcaaatattgactctcttaattagcaagaagtaacagggaatgatattttggttacttatcgttaaaaacacttttagcaagcgtagttttcctaatccaccaacacctacaacgtttatcgtgtgttttcctaataatatcggattcattactaatgagcccgtcttacttgtatattgcgcttcttaaacatgttgtaaata

SEQ ID NO: 184263 - DNA, 2115 bp, Cannabis indica
ctaatcgaataaaataaaataagttaggaaataggagaatctttccctttatttttttcctaatttgtgtggcgtctattactttatcttttcccaaaatttagtaaataattttatgagaatcaataccatacaattgattagcattccctttaagtaaacatgtcatgagaggtggagtttctttgagatattttctctaaattaaataataataaaaaaaaaacaatcaaaactcaaatttaataaaaaccaatgtttaagaaaaaaaaagcattgctattaagcatttgtgtacttattacctcttgacatatatatgagatccgatatttaattagactaatagcgagaatattagacactacctttaagagatatagttttgagacattttcttttaaaaaaaataataaaaaaacgtaaatttcaaatttaataaaaaaaacataaaatctaaaatctaccattgtttaagaaaaaaaaaaataacctatcacctctaaacatgtatacgagatctcacacttaattggactaataaagtattactagtgtaatttagtattttttttttttaaaaaaataataataaataagaatcaagggctgcaaatgcatgttgcagatcgagttttgtagaaatatacagccacagtcacacctcgttaaaccctcgcaaaagccctcggccaaagcctccccttaccccttcctctctcgcaactgcaacagccatcaaccatctcccaaaatggcttggcgctctgctggatcgctctctcgttccctcatctctagcgctagggtttcggctcaacgctctgctccctcgctccctcgattgcgtcctcccaacgtcgctgcccctcctcgtcgtctctccttctcctctcccaggtttaccttttcacttcattccttcctttaatcacttttcactcttttcgattagggttttgtgttttctgctgaattctgataaattacccctcaaagatttggactttggaaaatattcgattttagggaaataataggttttacagtgcaaatgtgctctttttgcttactatgttttgcctttaatttagtttaagcacctaacaacaataaaatgtagaaaattcccagtttgtgttagtgaacactagagaaaaaccaggtatatccgttaagtgagtatctaaagatacacctttcttccttaatgaaatgataatcttctacagtattcattatggttttctattgttcgggtttatactcttgaacttggtggttataatataattcagggctttctactagaaagacttgttacatagatctttcattgccctggtgtgtattgattatataaacgttttattcatatgttatttactaagtttacgatggtgtggcatttttaggcacttgggagaattgggatgcatacagtctctcctgccgataggtgcggctgcaacctgtttaacttctcatttggctgtcaacgtgcgggctttttgcgagctgtctcatggtaccttccgtcgttcttgtcaagatcgctaatagtctctttgtgagtcatgctgtctaggaaatataacaaagaatgaaatgagaactgatttttctttttcattaaatttacgtttatccttaaatgatcctttggtactttttaacattgactcgtggatatctctagttagtcttattttgcttgatggaataggcataaagtagctaggggttttgttagcatattaaatttggttgataagaaagaattgggattgggattgatagggaggagtggaaaagacgggtgatgcacttcaacattcaatgatccaaaggaaggcaatgaggctgcattgtaggttctcttttcatttcttttgccagccttagtaaaagaacataattcgttatagtcagattttgtgcttgcgtaattaaatttgttttaatggtaaatttactttttctgcttttccactgactttaagtgatctgactattgatttctatatgttaaatcaaatctttaaaactgttatgtatgtcttttggttgcagtctgtaatgagagactcattaggtgtgtattagtgggtgtta

SEQ ID NO: 184264 - DNA, 1340 bp, Cannabis indica
gaatcgtaagggaaaattaccaaagcagattacaaacaacttacctaaaatccaaacccattcaaagttccaataactccaaataggcacacaaatgatatatagtcctaacattcactcaaaatttcattctacctggtccaaaccctaatttcaaaatcctaagaacatgcaaaggtctacaaaatttagattgcataccctaactgtctaggcagtaccagccctcccttagcagaaaaatttcaagataaccctgtcctagaaatgtaaccctatgggtatcgtttttccattcaaatgtatgagatatcgtagacctagcttgaactaatcatttctatccaagatacgagatagaaagatttagcaagcgtcaggatacttacttaatgtatgagtggaaagggaaaggtttttgtggaaatctgccgaggatttgtgtacccagtcaatcacgtgaccgaacctgacttggacgtcaaaatcctcatcgggcttcgggtggaacagttcaagatttagtgacactgcattcggaaaataggttaaacaaaattctaagaagtactagatcagacagtcaaaaacttcttgcatttacagatggaaacaattgtaaggtcgaagtttttctaggaataagggactctggtttgaagtttgaaagtagagattttgagaagtctaaggtagtaaaaaaagagaaaataggtttgatggatctatttatatttcagccaaatccatgcaatttaaaatgaatggtcgagatcctccctccaaaaagtacgatttgatctaatggatgagaaaatgaaaaaatggcatttaaaacttgcgcatggcattcattagtcatcatttcttgtgttgagcccagtgtgtattaaaggagggtcatgtcaatagacctaccatcattgtaacttcctctgaaagatgcaccccctaaacacgtgtgttgtcaacggatgtattaaacacactggatgcatgccacgccagtggcaccattggttctttatcctttaattgatggcagcttaatacatctgtaatacccatgtgttgtaaacttatctctaaattcaaaagaatatagcacgctcccgctactcaaagagtctcaaaagcttggaggtaaatgttaatcgtgtttctgaatgggtgacatgtggcatgaaaaggaagagataacctcaagatctctccaatgaagtccactcaattataccaaggcacggagaagctttgcagatctaggaatatgtcaaaactgagagatatgtagagattcacattgccttagtataactacccagacacgaaagacttat

SEQ ID NO: 184265 - DNA, 6230 bp, Cannabis indica
tagctagctgttatattgtattttattattagtttaacatacatagttttagtgattaaaacggagtgttatacttaatgcagatggtatactatggtacatgctgatggctctatttaccaaaactttttactacttaaagcagcatgggctgcaaggatttattgatatatggcccagacctactgccactgcttggaagttaattgcgtgttatgctgctttcgaggctgcacttcagctacttctacctggaaaaagagttgagggccccatatctcctacagggcatcggcctgtatacaaggtgttcatgatactcattgattattatgtcaatatgatctccatatcaaaatgtcatacaaccttaaatcacattccttgaaccttctagcaatgcttcggtcttacgctaaattgtatctctttgttccatacatcatacatgcacagaagtttctatttgctgattttgaaggcggcgtattgtaattttcttactcagctcatcccctttttcaggctaatggaatggcagcgtattttgtgacactgacaacctatattggcctttggtggtaagaaaatttttccatgatggcttaccattggttttaagagcattacgttattacactataactcagttttgtagtgtcttttcatctaaaaccaatgtcttaggttttattcatcttattctgtttatcagacttcacctcctgaattattgcagtgatcactaattcttattactaatgtgcatcattattcattacaatgttattgataaaggcgtctgttttactcttatttacaaattcttagtaaaatgttgggatttattagttaacgagataatctgaaattttataatgttccaagtgattgatttttttatttttttcccattattataagttgaagaactatgcatgaggttaattgctgtttggaacttagattctgtgctttgtttcagtttaaaattgatatggagcagtttgggattgatatgagcaatgttctaatactatatcgtagtgcttacttttttgccatgttcaggtttggcatattcaatccttcgactgtttatgatcatttgggagaaatatattctgcccttattttcggaagcttggtgttttgcgttttattatacataaaagtaaggaatctgaactattacaatgtttctcccttatcacaagtatgaatttatggatacttttttgagattccttctttctgttttaagggccatgtggcaccgtcttcctctgattctggctcatcggggaacatcataattgatttctattgggtaagtgtgattcttcagtgatttctgtttttctattcgctaacgttgggatgtagtaaattaggagaaaactgtaatgggtaaagattaagaaggtgcatgcatattcaggaatgttgatgccatgttctgatataacttcatctaagtttactcaataggataggtttttggagtgtgacattctttgtaagcataatgaacctatcagatgttattgagtttgagtcttatttaagggttctgtgctatcatgtctaaatactaattataaataacaatagttcattgcttgatttattcatttttgtctctttttaatccaaaatcaagaataaaattagcacaagtcttggcaccaactgtcaaatgactttgagtggaattgtggtggtggtggtggtggtggtggttgctaagtgtttttatcgtcttgtttactatttcaatttgttggagaatatgtgctatgtagcaacttaagttcagctggattactaagtgtgtgtaattattgtcatcattgaaaatttcccaaaccataactacctttccttgactagtactttttgtcaatatccttttgaatttgattgccttttttgcagggtatggaactctatcctcgcattggtaaaaactttgacattaaagtttttacaaattgtagattcggaatgatgtcgtgggcagttctagctgtaacctattgcataaagcaggtagcgttaatgggatagttgtgaattgtgctgtttatgtcattaattcttctccactttgcttatgtttatagtgttggttaatgtgccaatactttttggggccaaaagttagttggcttacaatttgaaatatgtgggagcatgtaatcatctgatattgtgatcttagactgccaaaattgtattgcgttgccacaaaatctctacaatccatttcctgagcccgatcattttccctcttgctcaaagattgtttctttgtaaaatttatttggtaaaaaagaacatttaatattactttactgagtgcctgtgcagttggtttggtggttatttcttacctctaaatcagacccgatcttcctttttaaaactttcacaatcagattgctatatgggcacactatacgtttcttttgttagtatttagcttatttcttctttcttttttgccagtatgaagtgaacggtaaagtcgctgattcgatgcttgttaatactatattgatgctggtgtatgttactaagtttttttggtgggaagctggatactggagcacaatggatattgcacatgatcgaggttcttctatgaagttattatcattatagtttctttcttccattaaagatcatagttactttccctttaaccttttccatctattgctgtatatgatccaaattacttggattggctgacatggcataccaaatttttgtcattaatttgagcagataaattatttctacaacttaagttttaactcagattaggagagaaaaagaataattattaaacaaatgctgaatttatctattgtttctttccctttctattgttttgttcgtactttctctcatttggatctttgtgcttatcgctttgacagctggtttttatatttgctggggatgccttgtatgggtgccttctgtatatacttctcctggcatgtacctggtcaatcatcccgtacaccttggaactcaggtataaagttttctttctcgtaagtttatttggtcaataaaatgtaattgctatgtagatacttttctgctagactagcaaaatatagcaattactatgtaaatacttaggagagactcaaaattcagatcttataggagcaaccatttgagctaacttcctcttgagtataccaataatattattattaacttataaagctttatgttggcaatttgatttggaagctgaaactctattataccagccaaatgcaaaagttgaacgcttataagctgccaagcccatgagctgagcgtggatttgagctttttttgcaaccattagtctcatttcccatgttgctgttaaattagttattaatttttaattctctacttggctttgtcacagttggcactttatatcctagtagcaggcattctttgcatatacattaactacgattgtgataggcaaaggcaagagttccgcagaacaaatggcaaagctttggtttggggtaaagctccatcaaaggtatatggctctttgaaactcgtcatttgattctcgttatacatacaattttttgtgtatcttctgctaagtcctgtgcattgttctttcctttctatttcacagataactgcctcttacaccaccacaaccggggaaacaaaaagcagcattcttttaacttcaggatggtatgttttcaggctttctcatgtaaatatgacttaagtgaatgcggcttgagcatcctagcaatgtggacgatttgattttctgatagagggtgctttctttttcctacgagtcctttatctaatttgtgaaatggtgaaattctatagaacaaagttttatggttcagcaggtggggattagctcgacatttccactacgttccagaaatatcagctgcatttttctggactgttccagctctttttgccacgtaagtaattttccttttttgaggtgagtgaggaggtttggttatgttattaagaacagttgtgtttgaattgaataattttttgtcctctgcaggcattaccctacttttatgtggtgtttcttacaatccttctccttgaccgtgcaaaaagggacgatgatcggtgccgatccaagtaagcaaacacaatttcatcatttgtttgtctccaaaatttggtatttgaattaaatgttgagatgggttgggttgttgttgtaattgcaggtatgaaaaatattggaaagtgtactgtgagaaggttccttacagagtgatccctggaatttactgagataatgtttgttttgttccatgttgagatgtgaatagcatcatcatcatcatgtatattcatcctttctagattaaatgatgtcaggctgttatcatgttgttgttgttgttgttattatttttgtaatggtcaaatttatggatgatgctgctgttgctgtattgctctcatttttaatgaccaaaaactcttcttatttaggaaaatggctataaagttttgttagatttcaagttcgtttagggttattggttttgttttcttttccaaactatatatatagatagaggagcgagtccaaaacacttccaacccaaccaagacatttgattagtaagtagagtatttgatgaacaaaatgtaaaccaaactaaaatttacaagaaaaatgcaaaattggccaagatccattgttttttctttatccaaataaagaaaagttgccaccctcttttctccaccaccaaaacaagcactagatttgcacgtcgcacttcttcaacaaccataggattggatttggtgcggtgtgctcagaactatcgagtgcattggatttggtttaacaaatgtctggttagaaaacaatgatgggtggcacattcatgcttattgtttcactcttcttcttcctcactactcatattcattgtctcttttcatacatcataccccttttcactattctccaatggactctcctttctcattgtccttctccaaactcagtggttgaacttgaagttttctcggattctcagtgtggtcctgtttttgaggaatttgatggtgtaaaattgatgcctatagattctcaatctcaatttgatggaaatattgtggttgaggtagataaaggtgttgatgataatgaacaagtttcgttaggtcgaaagtcgatacctatagattatgaatccaatgtaaatgttctagttgaggaagttgacactcaggaagagaagaacgggtgttagaatctagtttgtggttgagaacagtgataatgatgatgaataaggaattgaaaatggagtctctcatttactaaagatgaaaacctaactaataatactgaaaatgagactacatgtgcttcctctaattgtggcaatggcaatggcaatgacaatggtaatatcactataactagttcagttggaggagactcagagaagagcttaagtgaggaagagaaaaggaaagtggacaagtttcaacagttaagggtgaagtacttaagatttgttaagatagtaggtggctcgattgaagattcgatagcaaggcaggttctgtaaggttggcacttgtttcgggaaggcaagctggccaagaatttagcttggaaagtgcaaaggctaaggctttccaacttgaatagaggggagtgatgttttggagttttccttaaacatatttgttattgggaaaacaaatgttggcaagagtgccaccataaactccatttttggacaagagaaaatctcaatttatgcatttggaccctccacaacttgtgaaaaaaaattattggaaaagtgtatggtgtcaagatcagggcttttgatactccaagtctgaaattagctgcaatagaataaagcaccaatcgaaaaatcttgtctttagtgaagaatgtcacgaagaaatgcttacctgatataattctctacgtggataggttggacactcaaagtagagatcttagtgattttttatggttaagatcaatcacttctactcttggtccttctatttggagaaatgtcattgttaccttgactcatgttgcatcctctccacccgatggtctatctggttgggcttgagctaaggcgagctaggcgtctgcctagggcccaccgagttcaagggcccaaaaataaaataaaaaa

SEQ ID NO: 184266 - DNA, 1097 bp, Cannabis indica
ccgctaatgagattgccacctgaaatatagggcaaaaacatagagaatcagctatggggaatactgggcattatttaatatcttgctagagagtatggagggatccaaagagtctcaaacttaaatttactactgtttagaaagaagacagcacaaagtacatttaggagaatcattaagagtttcagatctatgagaaacagaggagtagagtttaatgataatctttaaaagaattccaacaaagaataagtactaatcagttgtacaagtacatatataagataaattatcagccacaaccctttgaaatgaaatctgaatcctaaaacagtaaatttgaactgcgacgctctcctcctttctaataagaatttcattttttaaaaaacaacaccttaaaagtgtttgtctaatccatttaaaaccaatagaagttgcattcacatagcaaatattcagaagaagaagaaacagatcaaatgttgcaacaaacctgaaaagcaggtccagcttcagctgagttcataatactccaaccagccataaatgcaaagaggaacaaccttcttaaaataacatcaacagggggaagttccacaaaacttaacaagttcttaacccatggcggagattcctctacttgctttttcaacttggtcttcagattaattttagttttcttcctgtgctggaagctggtcatgagtattttctcaaaggcggcttctattgattcctcacttctctcgtgtccagaatactgctgcaagaggaaattacgtgaaccccatatctcctcctcagaagcatcagggctaacaccaagacgcttataaggatcccaaaccctagtccgaggaaaagttgggacattacctattgaagattacatgtaacatatataattagttgttgaaggaatttactgaagacaccagagttgaccaagaaatataagcacaacatgaaagaagtattcatatctctcaggatggaaaaattcagaaaatttatcttcccaagtcttttgtacttcttatttatcaatgaataattgaagtttcattgcttgttttcaaaggaaaaaagaaaaa

SEQ ID NO: 184267 - DNA, 986 bp, Cannabis indica
aaaagaaaaaagaaaacaaaattctcatcaagtccaccatgaaaacattcagaaacatctatacactataattcttagcagatgaccgcagttggggtctattagaacaactcagtaagggtgccataattgtgaaatttatctcttgcaagaaattcatagccatccttagagcctgactaataactaatatcttctaggaaacccaacacaaacatatttggttatcaaaagaaaactaaagttcagctgagcaggtttagtatgtcccctgcccacacacacacaccccaaaaaactaaagaaaaactaaaagaaaaatgatatcatcttgaacgcaactatgcacaaatgaagaagacatggcaaatatagaaaagatataggaacaagcagttgtacaaagaattttctttctcatattgtcattctatcaaaattgaaatgagtacctccaaaaggtgtatccacagcacatctagtgcgtcccagttgcacaaaggcataagtcttctttgagttttcacgaaaagaactgtcacaagggaaagaaggaaatgtcaatcaaaattcaaaatttcagcctcacgatatcattttataaatactaaaaaacaaaatttcgaatccaaattcgatcaacttctaattacaaatattatatgcataactatacatatacagtgagagaaataatacattttcttcccgaggaaaggagtggcaaaagtagggttagaaaggcaaatggaggccatgagtaagaaaatccaaaatccctaattaaaaccaataaaccctaattcggaagaggtttgaacaccatgcagaagaaagttgaaggtgtctgtaagaaccaacgtggttggttggggaagctgggtgctagaggaagactcatatcttgtgagtttcttccttataatccgataccgggacgctatacgacgctggaatgcgcattgcgcaccttactttcttatctt

SEQ ID NO: 184268 - DNA, 1849 bp, Cannabis indica
atgtttcagaaagctgttttactgtggcttcatgatccaatgacccgagacgcaaccattgtgaggcaggctttgagtactgcagatgttattgatcttaaagctgctactgaagtaatctgttctagaacttacactcaaattcaacagtttaaacagatttattatcaaatttttggtgttcttatggagagtgacattgagtaccaaacatctggagatcacaaaaaggttagttagccaattctctctttccatttttgacttgtgttgttgttttagttagtaaaaccattgaggttgagtttggttgtaatgaaatagaatggaatggaaaagaatgacatttccaaagcaatttttaatggaaattctcctatggaatatggtgaaattgcagatcaatgctaatcataagttagatagtttgagtcttccaaatatgattatcttacttaaatcttcttttgtagttgctgctttcatatgtatgcacaccgcgttatgaaggtccagaagtcgatagatcgatggtggaaagagacgccaaagctctgtataaggctggggagaagagattgggaactgatgagatgattttcataaggattttcagtgaaagaagcagagcacatatggctgctgttagttatgcttaccatgatatatatggtacttctttagaaaaggtacattgcattacattatacattttaacagcatgattattgtatgtagtcccatcttcaacattttgtgatccatccaatccactaatgcaaatatttatacttgttgcattgcaggcaataaagaaagaaacatcaggacatttcgagcaaggccttttggctattctgcgaagcgctgaaaatcctgccaagtattttgcaaaggtattgatttattcttctcatatcatctctggtagaattggcatgtattattgtgttctatcaaaattggtcataagaaaacactgaaattttttatgcataataacttataacaagagacagaaccagctcccatttagtcctttttggctgaaattggatctcatcagtcctttttgtcaaccacttacctctttcggcttacacgagcgatttcaattctcccaagctcaggggggccagccctgagctaaggcaggctaggcctacacctaaagcccacccagggacccaaaagaaaaaaaggatctttttaaaagacattttttaagtaattttaaaaatataaccggggcccaaaaaatctattttcctaaggtccaacaaaactcagggccggtcctaactaagctctacgcattgatgacattgtcactttttccctcttcaaatgaagtatggcccctccctttctgacaatctacttattcttaggtcctagaatttagaacaccaaattaagttgtccaagttttcttaacatgtttggcaacaagtagaaatgacatgttatgttcctcattgtgatcttgtttgaacacatgtaacaggtcctacacaaggctatgaagggtttgggtacaaatgacacaacactcattagagtaattgtaacaagggctgagattgatatgcagtatataaaggcagagtacagaaaaaaatatgggaaaacattgaatgatgctgtttattcagaaacatcaagccattacaggacctttcttctttctcttctaggccccaataattagttattgggcattctacgagtttgaagcttggttagctggtactcatttagctctgactagatgctaccaatgtgcatattattcactttttgtaactaacttgaaatttatattcttttcttctttgttatttttttt

SEQ ID NO: 184269 - DNA, 6151 bp, Cannabis indica
tctctttcctctcctttaatcccacataactttcccaaaataaatcaaaatagaaatagaaagtcactcaaaacaaaaacaaaataaatgaatatcataatattatttagttcttaaaaccaactcaacctcaaatccactcattacttacaattccttctagtataagtgaatcgaattggtggcttatcattgctcgccgcccaaactttcaccttgtcctcaaggtggaattgaggaaactgatgtcgcatgttgtgataattctcccatatagcttcaaacaacggtaaatccttccagttgatcaacacctccaaatcacccttcccattgggctaagcatgacccaacaattcggtcggttcaaccatcaattccagattaggactcaattgtggcagcagcactggtatagaatgaacacttctatgaacccgacgaaactgcgagacatggaaaactgggtgtatagaggtagcaaaaagtagtgacagcttgtaggcaacttctccagcccgataatagcgtgaagaaagcttctcatttcttcaaacagctagggatttctgacaataagatttcagtttcacaaatatcttctctccaatggcaaattggtcatcacgccagttctcgtttgcagattctttcatcttttgctgggctcgaagcaaatgcatgttaagatcatctaattgcacatctctccctcctaacatctcatccactgtagatagcagtgtagaacccttcttatatcttatcaaaggaggatcgctaccatataaaattttgaaggggagtgtgttttcaatttgtatgaaatgatgtattgtaccaatattcagcccaagccaaccattcccccccccccccccccaagatcgtggcttttcacgtctgagggtgataagcggtactatgacggagctctgttccttggagcttgaaaagctccagccaaaaatggctcatgaaaaccttgtccctatcggagatgattgatcatggaatcccatgaagtcgaaccacttccttcaagaaaacttcaaccactgaacgagcagtaaaaggatgttttaaaggaatgaaatgaacatacttaacttatcaacaaccactaagatggtatccatcccttgagacctatacttaacttatcaacaaccactaagatgatatccatcccttgagacctaggaagaccctcaatgaagtccatagtcaaatcttcccaaaccaatgtttgcaaggcctataggttgtagcaacttactagggacatagtcagaaacttatttctttaacaaacatcacactctcgcacccaatcctccaccatttttctcatgcccacccaataaaaatcagattcaattctcttgaatgttttatcttcgcctaacaataacaactatccatgatctagtgtgtaacctactgcccgttgagtcctttttgcaaagcagaaataatattcgagagagacatcttgttcgatttcttgttgcacaacactccaatcaattccttgggacactagcaaattttttagttccaaggttaattgacccgtgataacgcatctgccactctgtttccagcccctggtttgtactgaatttcaaaattgcaccccatcaatttaaccatccacctctagtactccaaagtgataatacgttctgctcctatagaaattttaaacttttgttatccgtacgcaccacaaatctcctccctaataaggccaccatttctaagtaacaaaaactatagccattaattctttttcatagatcggcttcagtctaacttgtgcgtaaaaagccataggcctttgctcttgcatcaacacagcccccataccataccaagatgcacgtgttaccatcgcaaatggcctttcaaaatcaagaagagtaagcataggaaccatagtcatagcttgattatgagcttcaaacacaaaagtagctacgtcattccatccaaattcgtctttctttgaatgctttgtcaaaggctaagccatctcactgtaatctttcacaaatttacggtaataacttgtaagtcccaagaaaccccataattgtctgatgttttgaggtttcgccttgagagagatacccttggaagcgatgtcggttacaccgttcaagaaaagaatatgaggaatatggcttgagtattgatgacaaaatccaacttatttctacaacttattattgcaaaagtaaatgcctcaactctgtgggtggaatgttcatggcgggagagaacaagcacagaagctcactatagcgagctcactgttcactttagggttggttatttttttctgcttcactatcattgcacagagtttgggtgttgttgggttttttgataaaggaaaaataatgattttaggagagtttattaagtggtcaaactccaataattcttcttggaaattcagcatatttgtttttcatattcgtgcgtggacatgactacatagggaatggaacatgggcatttagcttcaattggtgtgattcgtgatattattccataagcatgctctaaaacagtatattataaacatgagtcctttttactcaagaatttattcttctatataccatttcttatggtcattccaaattgttccctcgagtttcatgctctgaactagcatctgttgttttggttcatgtaacaaaatagaaagaatatctcaatgtttaaaaaggcgtttttgaggcgcgcctcaagttgaggcgtttaaagattgtaccaaggcgtgcgccttgctaaggagaagagaggcgtacgccttaatgggtgaggcgctgaattgaggcatgaggtgttgaggcgtaagaggcgtaagcctcaaattttgaaagtgaaatgggctttttgagccccaaaaaaaaaggcccaaattataattttaaatttgtttttctgctaccaaacttaaaaaacctaaaaacctttaaaaagccctataaacattaataagaaaacccaatgaaatttttaagcccaaataaaacttaaaaataaaaaccctaattctatcttcttactatctccctctcttcttcacatctatgcagctgcttatttcttcaaccaacagagaaaaaagaaacttgttgcttgcttccttcaaatgtgttctaggatagtagaatttagaattctaattctagaaacataattatctttattttagtttgagttttataaaacatatctttcggtaagtttgaactttatgagacgtttaatggttattatttttatgagatagtttatagtatgtttgaaatttatgtgacagtttattcattcttaggtgctctaaaagtaatgattccattaatttttgaggcttacgcctcatacgcctcgccttaccaaaaaaaacgcctcaaggctcatttgcgtttgtttaaacattggaatatcttattggaagggttccaatgatccacaagtatattcttcatgttgtttggcttgctgttggtgaacaaagggcaagtttcacttcttgcgaagtttccattggaccacactaccgttgatgaaaggaggtcaagtgatattgcttaactagtttttcgatagaagtcgacttgttgagaggtgtatatcttgatgcagcaatcatgaccaggtaagaagctcactcactttgtcttgttctaccacttggtgcaatttaacaacggatacgagttgcgctattgtccttcaccttgaggacaagctgaaattcgggcaaccagtaatgttagacccaagaattaattaaaagggtagttaagtcattgtggtgacgatagcttttaagtggaataggatcctataaataagtgagtttagaaagtgggtatatgcaatgtattgagtaaaactctttgcatcaaagtagtctaagggctcccatcaattgtacttggttttctcatatattcattacatattttctactgtttggctattattttgctactgtaatactgctactattgttgttgtttgtgctatttgctactggtttgagtgatttagtactcggttcttatcagacgataaacccaaaacaatggaaagatgacaaacatggtcgtccaagctacagttgtatacaatcatcaaaaaataccataacaaaccaacgcaaatataggcaaaatacctcattcatcgttgcctagaatgtggttggagcattggctaaaccaaaaggcattataagaaattcataaagtccatgggtcctaaacactgttttgggcacatcttctggttgaacctgaatttgatgatagctggatttgagttcgagctttgaagaaataattgccccatggaggtcatcctaaagttcgtcaataactggaattagaaacttatctggaattgtcttccagttcaaggcctgatagtccacacaaaaccgccaacttcaatccttcttgcaaaccaacaaaacaggactatagaaaggactcacaaggggtttgatgatccttgccaccaacatccctttaactaactgctgaagtgcatctttctgcactttgtgaatacctataaaatcaaacgcttattagggatgaaccttcacgtaagacaatagctcactgccccgtatgggtggtaactccataggcatctcaaacacacgattgccttcttggagtactctagaaattgcagcaagagcttcctggtcttcttctggttttgcaatctcccccaactcaataatcattgcttgaccctcatgtttaatcagtcgcgtcatggccttaagtgatactcaggtcttgtgcaatgttgggtctccttggaagtgcactgctatgttacccacagtaaacttcattggatgatgggtcttggtgctctggttcctatagcttcgcatcttctacactctccatggaattcttcctcactttcagatgcatcttgtaacaataacacttgtaattctctctttttacatcagtgtctcggtgaatatttctcatcacactcataacacagacctttggcacatttctattggagctttgtctctaaaaaattgacggtaccttgagtcttctttggatgaaattgttcgagggaaataaattttctaggctggatttgcggaagttgcacttagctaacctaagttacaatttgtctctacacgttgggccccaatttttgttttgatcctttgggctaattccatgtcttgctcaagtaatggcccaaggacaataacgtcatgtcttgtttcagtttggagcccatttatgaaagtagactccactccataactggttcgatgattccctctagcaatgaagccaaaagctccaaattttagcgataatctcccacagatccttcttgagttgatgccaagaagtcactaactatacatagatcccgatggaggaagacggaatcgatgtatcatctacccttcaatacagtccacatccaaaaaggtccccaacggttttcctacagaaaccagatcagcgcttcttccacaagactcattacagcaatttctaaacttttagcatcagtcataggatggatagaaaaatatcttagtcttgagaatccaaccattcgggttgtcaccatcgaaagtagagttcaatttgcctacgtctgatgtcccctctggttgataaccgccaaaacaactgttgttgtcttccatctcaatccccttgtacccaggcatcaatcgtggttcttcccccataatcagcgtctttccagtcgccaatagttgctcctgaccatccaacaacaagtgttagtcgacattcctgaagacgcatgaactgttcgggacgactcaccaaggcaggaaccctttttcaatcacaggtagtttctataattcctgacatattgctcgaatactagcaatcaccttttcttccattgtatccattcgaatttccatccaagtcattgctttgatacacaccagtagtgtatctgtcccaaccaaggaaattaataggaattatgagggaagttttattaacatagcaaaaaagtaacaaaaactcccaggttattcaagagacttagtacctcccccaagcataagctt

SEQ ID NO: 184270 - DNA, 1754 bp, Cannabis indica
aaaaaaaaaataaaaaaagatgaatagagatataaaaagtacctcccccgatacccttccgatgcagcagaagaagaaagttcaccccaaccaactgatatggcttgagaatgggctgaaaatttgagtcctcagatgtacatgctgcatctacatcatcctacataaataaagtacgcctttgaaatgtctactacatctaaaaactattccatatatatttatatataattagtaatatatcaaaataacgaaacatataacgggaaacagaacattttactagactgaatattatccactaacacaatataaacttatttacttaccagttttacttcaggtgaaaattaaggcaaccaagggaaaattctcatattttccctcaaaatccaaacatgcaaaatgtggtgacccggagaaactcgggctagtatctaaattgttctcatttgtgcataatctccatgacctctttttttcttttttcacactttcttttcctggtttaagttgctaacttcctatgttctcacattacctaattcagctaaaactctctaactactttaccaaatgctttcaattccaagtctagggaacgaaatagttaaagaaaagtgaaattaaccaattcttggttgttatacgcccaatgcacaaacagccaaaatgaacttaaactaacgccttcaaaattattaaggctcattgcgaaattcaacatgaaatgccatttatcaaaagcttcaaagttatcaaatgtctcaatgcagttacctgtgtaacaattctaacggaagaagattccacttcggcatatcgatcacaggccggaacggaagaaccgtacagctctcttctcagctcggccgagattttagcacatttctgcaaagccttcccgaccacatcatcctcatctgcaacctcgtcctctaactctaagtcatcctcctcttcagtcgttgacttgatctcgaacacttcaggtaactcctcatcactctcgtcatcctcaatcacaaatctacggccacgattcactggccgaacatgcgagacctcaacatcgtcgtcctccaaatcctctccgacctcaacgcaatcgtcgctgctctgatttgagacttcgagcttcgaggaagacctaaaggagaaagactcaatcggaggaggaggaagtggtggtgtagaagaagggttttgaggcttcttgccaagaactcgggagggtttaaaggagtggttttcccactcgtcgtctgagatttcttgataatcgcgcttcattttctttttcgttttcttcaaatcatcgctggtaaggcctctctaggaaatggcggacagggaaagaggatgtttgggaaggagagcagcgacggaggatcgaaccgccatttccaattttctaaggtcggaaacgaaatgaccagcgcgggggggcacttgggcctgttatgatttggattcgtgttttaaattccttaggaaatttctcatgttctttttatttcaaatttttacaaaaataaaccaaaattttaaacattttcatttataaatttattttttttagtaaaaataataaactgttttttaagttattttaaaacatctttaatacaaatactttaacaaatgtttgattacatgaatattttttcagtatattttaatagatttttaccactatagtgaaaaataatgttaagcattatttatatcttcttcttttttatttttttctt

SEQ ID NO: 184271 - DNA, 718 bp, Cannabis indica
atgcaatagaatagtagcaaatcattctagttgacgaaatgaagatgcttgaacaaaattaaaagccttttcaacctataccactaaaagaattcacctctccattaggatttggaaactcgatctttctgtcaattcttcctggcctgagaagggcttgatccaaaatatcgatacgattcgtcgccatcaatacctgtaacaggttcaagtaagcaatgaatccagaattatgaaggataatacttatatataatattgatatatatatacatcaaaaaacaataacagctcttttaagtgtgtaaggaatcagaatctatggaataccttgatcttgtttgatgcttcaaatccatccaactggttgagaagctccaacatagtccgctgcacttcactgtctccattgccacttccagactccattcgagcagacccaatactatcaatttcatccatgaaaatgattgatggagcatgctccctgaaacaaacaacacatgctcatttaaatggtaatgttaatatgagcacaaagcatgcaatcaaccagaagaagagcaaacatcagaagttcaaagacacaaagcttctagatgccactagctggggcacatagttgttgcataatagtcacttcatacatatatacaactgcttcaattatactgcatcaatatttttttactcatcagtggagaaaaaaaggattgaa

SEQ ID NO: 184272 - DNA, 5311 bp, Cannabis indica
gaaagtgggaagtggtaatgaccatgatgttaaagtacaagaagaatgctgtaagtgtgtgtatctatattttttttctttcctttaatgttagtttcttatgtattttctttttctgtttcacatgattcaattgttttttttccttctccttacatacctttttacatatttttccttatttcattttggcatacatttgcatgattcacaactttgtttctatgcagtaatgaaggcatctaagctaaagaggaagcgtgtaattgacagtgcaccatcattaaattcaaaaaagatatttaaagtagccaacagggctgcaaagcaggtgtcatctaggcaggccacagtaaaaaaagccaagtcaaggaaaacaataaacctatgccctagatcagatggttgtgctcgggcttcgattgatggatgggaatggcggaagtggtcaatatgtgctagtccttctgaaagagtccgcgttaggggaagtaaacatgttcacgtagatcatttagggtctgatattactacatcacagtggtccaatagcaagggtctttctgctagaacaaatagggcaaaactgcgcaatcttgttgctgctgcagagggtgctgaccttttaaaagccactcaattgaaggtaatagacataaggatgacgttgtaatggattgttcttttatagtgtcccagatttaatttataagaaatctttatgttacttcataggcaagaaaaaagcagctacgtttccaaaggagcaagatacatgattggggtcttgttgccttagaatcgattgaggctgaggatttcgttattgaatatgtgggggagctcatacgtccccgggtaaattttagttaatttgctctattgtttgttctgtctgctttacaattgtagttgtctccttctcccacttcctatttgaagggctatcattgtctattttcaaccattatttattatgtttatgatttcacagatatctgacatacgggaacgacattatgagaagatgggaattggcagcagttatctgtttaggcttgatgatggttatgtggttagtaaacagccctcaaagttatcttggctattttttttaacatttttttccttttcttaaaatattatcatattttaaaaagcactaatatgtgatatttatcagacatttattaccttagttttttgctggtgtattatcttattatttgaagtggagaaatctaggctgatttatagctgtatattaaagctgtgctttgttatttttgcattatagattttgactgatgatgtgtaggctgtttaaattcatgggatactatagaaagaggtaaacttcaatttttagaccaatccagcagctgtatgcgatcatgattagtaatacaccaatagattctgattttgtttcctacaggcttaatacaaattcaagtgaaatgataaatggagtttctgtttagtgtggcatgtagcaaatccactatgttgattctgtttatgttgtcatgcacaaaaccgcacactctcttttttgctgtttaactacatggaatactacagaaagaggcaaactttaattttagactaagcaagctgccgtatgcaatgcagtctaaatgtatattcttctgaagagtcaaactttgtcttttataagtatttcgtgtaatttcaaacctatgattttcattatatattcatgagtaaataaattagcattgttttggttttgattccttaaaaactattgtgcagtctaaatgtatattcttctgaagagtcaaactttaccttttataaggatttttagtataatattaaacctatggttttcattatatcatgtttatgagtaaaaaaattagcattgttttggttttgattccttaaaaaatattgtcccttgtgtatattcaaaatgtctttttcatgtatcaaaatacatatgcaattgccctagatgtacctttaaaaatatttagaaatggtccctactgacaattatttatgactttgtccctgattatgatattgattatgtcaaatattcactttctgaattatgtgtaggttgatgcaacaaaacgcgggggtattgctaggtttataaaccattcttgtgaggtagacagaataactaatcttatcaaatgtgcctgaggtttatattatttttgtccttaagtgggatttttttttgtgccagcccaactgctacaccaaagttataagtgttgagggtgaaaagaaaatttttatatatgctaaacgccatatagcagctggtgatgaaatcacatataattacaagtttcctttggaagagaaaaagattccttgcaactgtggttctagaaggtaggattctgctgtttctaattgtggttctcttaatatagtgtacttatgtttggttgttagtagagactttactatatgctctgtttgtttggatggtgaatttatacaaggttgcatgaatgatgattcacatataggttttgtgagactagaaagggtacaattctggctacaactagaagcattgattaataatttttcaatttttttcttctgttcaggtgccgtggatcattgaattaaatgatggcatttgtttctctggtgggtggtttagataaattttgctgaaaggtactgttatatttgtttctcggtcgttccaatccatgctctctttccattcttcttgcaggttattttcccaatcaccatctctcatgacactgtgtgtccacttgtaagaggtacgaaagcagctttcataatgctgagctgtagttcatttcattttctagtattgaatgacagtgattgttgtagattttttaacttttaagctggcaagtaccaagggctaagtggggaaaaataagaattttaacttttgaaaatcaaaatgtatgtagagatggagcttaattgtatttttaatttgtagcattttagctgttttgcttgaaaatatactaattcttgatcgtgcaatatacttttgtaaaatatttttaagttctagctaatgtttgtgctttcaaatttttatgatcagtttgcatcttcttagtcctttagttgtctttagaatgatcgcttgcagttttctttttttggattgacaatatactgtttaaggctgacaagttagaggctttggagtaagattcgtcaggtttatccccaatttcatgttccaactcacagaactaccattaaaattaatcttttatcgcactttcaaacaaatgaaaggttcatagatagatcttttatgttggatatgtgcagctaggattcaagtactaggggaaatactaattgaattattgaaagccgtttatttgtttgtgctatgctatgcgtgtgtatgtgattacaatttcggttctctagtgtttcaataagatgtgggttgctggaagctgaatgtctcttatgagaattaggattcgatctaatgcttttgtgcttgtgaacctaatctatatctttttctccttttttcatgaaaaaaaataataacaaagaaagaatatcccttgtcagtaaataaaaatatgatattaaggagtgaagacagcaactgtgcaatgtttataccattgagctgtgttttgggcttttcatcatacttaaattgataggatatctaaaacctgaacgcagtgcattgatttgatgttgtatgctgttcccaggtttttcaattacaattggaaacaagggccggacgatctgatctcagtgatggttttacggtgggagttttgccttttcaaagatgaaattactgaaatgtgcattcttatagatttctctgttgcagatgagtttcttctcttagaatctgtaaatcagtctctagagtgtttccttgcataaaactttgaatatatgatttttggtttttgtacagacttgcattataatatttcaatatatattaatgaaatttcactaggagctgtacattatatgcttaatatacttggtattttttttgtcgaaagtttgtttattttatgatcctcttctgatttagaaatatgttttgtagagggaataaagataaaactagaggggaataaaattcaaatatattgtaaatgtgtaaagaccaatttgtttgctctgttaggcccagccatgatccattggatgcactattattatcattgttattattattattattattattattattattattatgagtaattggtggaatagtattcttttttaatgtcactttgcaggatggttatttttcttataattttttgctaagtggtcttccaatagggtgttggctaaagtcaactttgaatgcacttcgaatatgcattcaaaggttgtcgagtgtgtcagtaggaaggttattttgcaaagaattactaaaagaaaatcattgtgcataatgataaaaggaagtcaattttgtgaaagtatccttattactgggttttctcttttattatgcttcttattattacattattatcatgtttgtttttgaactgtaggaaactggcatcaagcttctccgcaagcacttagaaacccaaagttaagtttggacttaataatggaatctatgatggtttatttgagtttttgggtttcgttattacggaaactcgatactacatttacagttcttcatgaaagaaattatcattcaattttttgctaattaatggcccataatatacttcttctgatgaattggttattgtgacaaaacaaagacaaacagaataacatacattgtttatacacatatataggaggtagctaagaataataggttggtaaattatttattcaaataaaagaaaaagttgaatagtcaacaataaattgggagtttgggaaggtcaatgttttaatgttcttctatttggtatgtacataaattcgggcatgttctttatatggtagctgtgaaatgaatgaaatttccaacatccaattattcaattttaggttttaatgaatttaatactcaaatttgtgtagtgtaaaattatatgagctataatagtgttgtaccttttgtttctattattctcaatatttgattgtttgcaggagcatgatcaactaaaataaattaaaccacgtctttggctgagggggtgagatggaggtcttttaggtatgtcatctctttttctattcattttttatttcttttactattttttatattatactataaaacttaaattaaaatgaattttttattttaatttttttgttg

SEQ ID NO: 184273 - DNA, 7517 bp, Cannabis indica
gttatttgtttattgaatgtttttataattctccaaaataaaatggaaattttatttctcaaactttctcttgctctatccttgtcgggctaaaggaagagatagaggagaaaaatctaaacaaaagagaaaagagaataagacttttcaaaaattataatatcatttaaaaaataacatgtgcacctataaattatacaacaatataaatccaaccaaatatgtcttgtcaaacattaattttgtttgtatatattgtttttgacacaatttcttttcttcaaatattttaaagggcttcttgtcaaaaaacataattaacaaaagttactgtcaaaagaaagttatgaaaattctacatgcacaaggatgtactcatacatttttatttattttagaatttaaaattttattttttatagttgtgtatattgtagttatttaagatattttataaaattttaaaattttttaaaaaatttaacacaccaaaaataagattcaaacaatctaatgcacatgtaatttttttattttatatgcaggtaaaataaattatttaaacatagatttttatattgtaaattttttcgaatttttcaaaattttacaagataatgtataccactataaaaaaaatgagattaaaaatttcttctaaatgcttacaggtgcattatagaagcactcaaaaattattattggaattattattatttgaaaatgaagcttaaactctcacttgtttatttttgtccatatttacagtctaacatgatatttaaatacccaaaaatagataagggtaaactgttaaagaacacgcgttttgtcaccaaaatttaagttttggagatttattgttagcgaaataaaagtaataggaagtttgccacaatttactcaaaaaaattagacgattttttttaaatgcctacatgtacgttgtaaaagcacacacaaaaaaattattactcaaattagtattattatttgaaaatgaagcttaaaccatcacttaacactcaaaaatcgataagggttaattcctaaccgaatataaatttcgagagttttatcgtcaaaatttaaattttaagaatttatttttagcgaagtaaaattaatatgagttttaccacaatttactttaaaaaagggaaattaaacttaaaaaatcttctaaattttaaaaaacacccacaaattattattgaaattattatttttatttgtaaatgaagcttaaaccctcacttgttaatttttatccacgtgagtagaaagagcactcaaaaccaaaaaccctttctttcctttttccctcctttctctttctctcttcgatttatatgcaatttccccaaatttcaatttcaacaccacactctcattctatgtaagctcccttcttctctaatttctccccaaattatcatctttctcgctttttctcaactttccattattagggtttttcgaattaccttttccacccttcaattattaaatttttggtcgtttcgaaaacgaaaaaccagaaaagtttgagtttttatactgtttggtaaacgttttttctgaaagttttgattttttttttgggtttcagtttcagtgttctttgcagttatgtatggaggaggtgagtacattaatacatccagttctaagttttttttttttttttttccaatttattttcataatttgatgcttatatgtatatatttatatatgggttgtagatgaggtctcggctattgtaattgatctgggttctcatacttgcaaagctggttatgctggtgaagatgcacccaaggctgtttttccatctgtaagtgttgttcttaaacttattatcagttaaattgttgacttcatatttgtttagcttagttgaaattgaaacatagttagcattattattagacttcattcacaattttgacttctgatactttttccttagtatgtcttgctgtttttatggttagacatttaggttgttgtgtttggttggaagcaataaaaacacaggaattgaaatgagaatatgaataggaataggaatgtaatgaaatgaactttttttgtaatgaaataaaatttaaactacataatatgtataattagtaatttttttctcatcttgtgtaaatggtggaaaaccattcaattagaatggcattgcggaatttaaaatgcaatcaaacataaaaataaaatgaaaattgattctttttcattccattcaatttcattacctccagtcaaaaggaacctttgtggtgatcatagatgttagaacccttttgcaagattgttatagtggtgatcaaattggccatggaatgaaatctagtttgctgcattaggtgtgaaacaaatactatataataatacaagttccatgttttgtttcatatttataagatgttttcggataaaatattgaaatgggatccctttttcttgtttctaaattgttaaggttgttggatcaattgatcaagtggatgttgatgactctgcaaatgctgaaatgaactctggatctgctcttgaacctaaacccaatgcgaattctgacaaagccaaggcaaagcgaaaattatatgtaggatctcaagctttaggatttcgccgggacaatatggaggtcggttttgtactcttttttcttctctcgatctctctatatctttacagttaaggataccatgttttgagattgtcacttgttatgaggtctttataaatttttctgctatttacaggtgctgtcacctactaaggatggaattgttgctgattgggatctagttgacagcatatgggaccatgcttttaggtaagtactgattttcaattaatgtcatttagtgtcataattgaggatactttacatatagaaatgtttgattttgtgattaacttatccaggcagtaaccgttgtctctatgtggttgcttttctttttagggagtgtctactgattgatccgaaagagcacccaatgctacttgcagagccatcatcaaacacccaactacaaagagaaaggtgattagcgactgtttaaattttcttagctgatttgtctttcgtccctttttctctttttaagaggaaagccaaatagtcttttaactttgagctcatgagatatagtatcgggcatgtagtgagtcagtgacttattagattatttagtttctatgttaaggtatatgttgtgtatttgacaggacagcagagctaatgtttgaaaagtacaaagttccggccttgtttttggcaaagaatgctgtatgtctttactccagccatcctttgtctccaattttaaagtactttggtttctttgaaccaatgtttttcattctttggaactaggagtttatgggcactaattggaatttcttcttgtgatctaggttttgacatcctttgcgtcaggacgagctacttcattagttgttgataggtaggatatttacatgattttgaccagcattttctcaaagattgaaatcctaatattttgtgtcaatcacaatacaatttttttctagtggcggaggatcaactacagtcgctccagttcatgatggttatgttcttcaaaaggtatatcctcctacttatggtgtgtgtgtgtgtgtgtgcaatattggagatttactccacggggtttcttttaaatgaataaattagttatgtgtattaacaatgatgcttcccaatgatttatgctattttttttttggtttctgaataaatttccttttgttttaacaccaggctgtgttatcttctcctattggtggggaatttcttactgattgcttggtgaaaagtttggagagcaaaggtatatcggtaagtgattacttgaacattttccatgggaagtctgttgtttcttctattgtgcctcataatatattttgtatcatctttttcttgtagattaaacctagatattctttcaagagaaaggaaacacgacctggggaatttcaggtacccctttttttattagaaaagaattaatctttgtcctcagattatgcattgttactctccttcatcttttaatgctcgttctatgtcatttctatttatgtcgaactagcatcccttaatgcattcacgaaacagttttttgtatgtattatcttattgccctttgaatttgatgttcatgtatcgaaatgttacagatcgttgacctcgatgtaccaaatacaacagaaagctacaggctttattcacaggtctgtggttgatcataatacttcttactatgtcattttactgtcttttttcctttttttttgctgagtattctcttttgacagagggtgattgctagtgacatcaaggaatgcgtgtgtcgagcccctgatactccatatgatggtttgtactgttccccttcccccctcatttccggtttatctgttggtgatttcctttaatatgattctcattctaaaatcttatatcaatatgaaaattaaaacacactgtacatacacattaggcctaagcctcatttttctttgcacccgaattgccaaaatagcctgaactcaagattgccgacaaatttaattccaaccgaaggcttattattcaccaataacagtatgacatttggccagaagtcgatagagcttgttcttgtttggacttgtttattagatagaaatttttaaagatagatattttatttatatgaaaagtaatttgatagaagtaaagctcttctcccaattatttttgttatctttgtttgaacatttttacaattgcctgcatatatttcttgctaatgtgttttacattttccatgtatgaaatattttcatttgaagcttaagaaaatcttaatcatattactgatatcgatatttctgttgccacagaaagtgcatattcaaatattccaatgactccttatgaacttcctgatggccagtgagtattatttaccctcatttgtttatcgaactggtttcgtttcttcttcttcttactattattttccatgtttgaattggtgcatttatgtgttgttgtgtcataatcactctattattattccataatgtaggacgattgaaataggatctgataggttcaagatacccgatatactatttaatccatcccttgttcaggttatctttaatctccttaatcccggctagctttttcatattctctgttcactattattactgtaacgaacacttgattttaatgtacgacaacattcccagacaattcctggtatggagagttttgcagaaatcgccccttctgttcgtgcattgcctcaaatggtaagtccctgacctgtatctatttttttccttttaaatttctaaaattaccctttttttcgaagataaagaaagatctcttatttttgtttcaggttatagaaagtatcaacaagtgtgatgtagacattcgtagagagctattcagtattctggtaaattgtcattttattttctttattgtttttcggtgtaatgtggtacgtttgactacaaaagctccttactttgttggatgctatatgggttatgattatcttttgaatatattcttcggaaaagatttgattttgctgttttctatgctcaacagctttctggtggcacagcatcaatgcaacagttgaaagaacggctcgagaaagatctgctcgaggtatttctaattttttttccttcataatttcatagttagatgtgggactagcttaagatgaatcataacttaatgatcttacaatgtttggctaaattgtctatttgagagctctattattaaatatgagaattgctttgtaatgaaagaaaaatgcccgattctcagctacgcatagtctaatgttttcttcgatatttaggaatctcctcaagctgctagagttaaagtcttggcaagtggaaatgcaaccgaaaggcgatttaggtaagccatgtttcctttcataaccgaaagacttcatgttatgtctttgaaattaatcttattattatcactaaccgttgtcgttcgttcttttccagtgtgtggataggagggagtatattggcttcgctcggctcgtttcagcaaatgtggttctctaaatccgagtaagtttcgctacttcattttgttttttgacttattgatcactgcacttataattgtgttaaattgaaagttcatccattaattttagagtaatttgcagcataaatacttaagattatttttgacagtgtaataatatataagttatatttttgaatcttccgtagttacctgacagttaagtgtcaagtcaatattcacgtggtagtctctgattggtccagatcattaagtttttatcttttatttaaaaattaatttaaatacactaataagaaaatgatacgtggataataacttgacacttaacggcctagtacttaataccgttaaaaattaaacttaagtatttatctgcaaccgagagttaaaacttaagtatttatgccgcaaactattcttaattttgaagttactctattgataaatttgatttggatgtactttaaaacaggtatgaagagcatggagcttcttacattcaaagaaaatgcccttaaaagatgaaacacaaggtttcttcctccttcttcgattcgactttgcttcgctttctgattgaaccacccctctaatgagctctctctgtgtctttttaacaattgactttcaggtcaaatcttatgctggaactaacttcttggctagcattgttaaagctttgtgtatttaggtagatatgattatgattatgattatgataagattgtatttgatttgtacctttggtacaatgcttatttatttatcccttcaatttttaaactaaaaaatttctcaatgttaaagttattttacattttattatgttgtgtggtgcataaaattatcatggttggtagaaatgaaatgatttcattaacttatgttgttgcttcacttagttgtgttaaggctttgaattttatggatcatttttatgtacatgaaagaaaaagggttaaattttggtgtttttttttatgggaatatatttatttagtattttgtgtttttaataatacttagttggtatctcatatttttaaattgtacatattttgtgctaaagtaaaatttaatcaatataattttatcaaatcaactaaatagatctcggatatatgtaattaaataattagatttgaatttctaaatttataaaattataaatagtttaattgtattgataatttttttttttttttttgactttagtaacaaatatatttgtatgattttaaaatataaagtatcaaataaatattattaaaaatacaacttacttaacttgtatttataaacacagtaatcataatcacaatagcacaaacttagaagggtagatatgtttattgtctagtac

SEQ ID NO: 184274 - DNA, 698 bp, Cannabis indica
ggaagaactcgccccacagaatatagatttagattgcaaacaacaaagaaagagctaaaagtcgaaatgattgtcgatagagcaatttacttgcgtaattttgaagctgttttcgacattcacatgaagtcattatgatttccttctaatattgtatgcagtggcagtacaacagcagagagctgcctcagcaacagtgataggatctaccgtcggtgattcctcaacaacccccgatagaatccatccaaaggaaaaagctgagaaatttgagccattgggactccaaattcagcatatcccattagatgttgaacccagcagcccagcaaggaattcgttctacgtagaaacaaagttccaggtagaagaagggcccgaggaagccccaatcccaagcgtagaacaccaattcattccaagcttccctagaagatccccacttcaccataacagtctcaaggaaagagtagcatcagagaatctttcgttgttacgaaatggctgcggtgaagacttctgcgtctcacttcagcttggggacaacgaagccaagaggaggcgttcggatgcttccactagtgctgaagaaccaaaataacttggattttgttattgttgttgggtttgatgatatgatatgataccatgttgtaacattctaaccattgggtgatgttgttaaactaatgttaaaa

SEQ ID NO: 184275 - DNA, 2240 bp, Cannabis indica
aataatttagaccaaataaaacaatggaattaccatttgatatgattcatctgagattacaaaaataaaccatagacaaaattaaaatgtttcttaaagtcatgttccttcaaagaatgaaaatcaagtaacattcaagtcaacattcatacccatgctgaagtagttccaaaatccgccacgaaatgtgtgacaaccctcctgaaaagtagttcagtgatttcatgcataagaaactgaagtatccagctaaaggacagtcagaaaaattcaaactagccagatcattagttataatttttccaaattatactattacttggaaacagattagaaagacaactagagctcttcggtaattcaaacaatacaagtcaaacatctgacatccttacgacggttcaagtataattgcgaatttattttttgtatgagcaagcaggctgtagtaggattctataaatatttttatacatataaagcaatacaggcaataaacatattctacgtttggcatattcaccttgtttagctcatctgtatcagagacgcgatggaatgcatgcagagaatgtggtagctcaagaggagcaattgggtcacatgaaccttcttttggagcccgcatcctcatcataatatgccagctattacagtcaaattggagaaaacatttagtaccatacatctgaggatgatagaagataaaagaaaaatttattagtgttagcactgacctgtcgattttcatttccttggcttccattacttgagccaaaaatgacttaacagcattttcatctgtcccaggatttttcttcccctgtcgaaccaattaatatggctactgattaggtaacacggtacatgaaaatagtttcttttctcagtagcatagaaaaaacaattcagtaaatgtaaatatcaactcattttcagggaaatcaaacaacatattatcaagaagtggtttatgagtcaacaagatgaaaggatatgccaaaacaataatatatatatatgtatatatataattgtatccgtagacaaagccttgacaggtacaataaataagtggaagttttgaaatgttcatgtcattcctacccagccaaatgcaaatggaagattgtttcctgttcctaagggcactgttgcaattgctggtggatgagataatttgagatcagaaacaactccaagaagccaccctgcagttccatcaccacctgcaacctgaagaggacaaaacacatgtcaactatccaattacaaattttacaagagtcatatcctgtataagtttatttcatcatcatcatcatcatcgttatgaaaggtaagactacaaattttaacaaaaactcacaattaatctcaaattctcctggatatgtgtagcaaacttatctccttccctctgcaactgtgcgagattaacataaattcggcgcaaaatcttatccggaccttcttcccccaaatcaaaaacctgaagaaaattagcatcttccaaatcagcctctctctcacacacacacaaacacaatcatacataaatggcatatagatatttgtatatatgaatatacctggtttttgttaagaagacaactataggtcacaagaagatcaccaccaagttggcctccacttttggagttgataaagacgatgaccggacacttgggttcatcttcagcagaaatatgctcctttggttcattgggtaatagtatgtaatttggaatcttaaactccttcaagaagttgttgttggtatcagaatctgccatcagattcagattcttcacctacaaagtttaaaagagattttgacattttgtttgagaaaattgattaataatcaattatactaatcacaacccataacaaccttattagaacatcataatagttgactttcagagctacccaaataaaagcttttgacttttttaaatatggtgttggtaacatcaaaacacaaaaacaacccaaattacatttttaagtatttaccttcccaagaaggaataacaaatgaagaaatgttaaaactcagattgccatgacactacttttctagtgcattttctcaccaaccaaacaagataagaaagagaccaccgcaaattacaaacataaaataacacgtgaattcaaattacctcgattaccaatgcagctggggaaaaaaaactcgtgatcttcagagagctgcaaagctagagagagaa

SEQ ID NO: 184276 - DNA, 5806 bp, Cannabis indica
tctctctctctctctctttccatcatcttctttcttccaccaccggaaattacagttcaattaacttggtgagtggattgtgtacgacgaaatgtctcagtggggttctgtttcagctactaacttcagctcccaccagagtcgtatctttgaatttccaaacgtaggaacagtacccagatgttgtttttcattgggttccaaaaaaatggcatctttggcttttgggtctaatcaatttatgcctcctggtagaatactgaagaagaagaagggtgttttgcctttaaaggtatatgagtgttgctttttgttgagatgaaagaaaaatgagaaatttattaactgaattgaattgtgaaataggtggtttgtgtggattatccaagaccagagcttgatagtactgttaactttttggaagctgcggctttgtctgcttcttttcgtggctctcctcgtccagctaagcctttgaaagttgtaattgctggtgcaggtgaagaaagattgcatttttatttacttaatgattttttgtgtttcttacttttgagtattgtttgcttgagaataggggagaataatcaagtttaagaaaaatctttacttataataagaaagttcaattagcctattttttataattaagaaagatttgatatgaaaatatgtattctgttttttttatcttaattatactgaattttgtaactaatcttgtctattcgagtcactttgttgtgaagcttgcgaatcgttttcgagttgtattatcgtgtttgactcatcaacatcatcaagtttacctgcttgtaataaaaaacattacttataataagaaagttcaattagcttatgtttttttttcttcattttatttgtatgcaaatgattaaaaaagatttggtgtgaaaatgtttattttgcttttatcttaattttactcaattttgtaactaatcttgtctgttagagtcacctcagtgtgaaaagtgtgaatcgttttcgagttgtattatcattttgtaaagcttttatgattttgtatatgtatggtgagtccttcgctaattgttttttcaaattcttgtaggtttggctggtttatctactgcgaaatacttggcagatgcaggtcataaaccgatattactcgaagcaagagatgttttaggtggaaaggtttttacactgatctagtttaccccccatgttaacatcaaacttattctttcattacaattcattttcattttcactttcaattcaaggacaaactcatttttgcttatcttatagtttacatttcaatcctttttgttgggtagtttcgaaatagttaaactatgagagtgtttttgctgattagaagtctttgccctttaggtggcagcatggaaagatgatgacggtgactggtatgagaccggtctacatatattctgtaagttgaatctcggaaccatttcattttaccaaattcagttttaccccctttgaattttcgagtgcttattttctttgtatgcgtcgcaagttggagcttatcccaacgtacagaacttgttcggagagctaggtattgatgatcggttgcaatggaaagaacattcaatgatctttgcaatgcccagcaagccaggagaattcagccgatttgatttcaccgatgctctgccagctcccttaaatggtaagagactacatcatgaccaacctatctctgtactttataactaagaaaatggggttttcctccatggtggagagtaactatgtttttgaaactagttggtcaattactcaattatgtgcatttgaaatcagaatgtgttttgtcgattagaattctgcaatgcatggatacgctattgtacaaactgggtgttcttgaaaccttgtaaattctacctctttaaatccaagtatttccacaaaagctgttttgttggcatttttggtgtttaacagtttttgtgctcatttggcaggactgatgttcttgtaaccttattctttgcttctgttaagttttttgtttcctttcggaaattttactatacactatcttgtttttcctaggaatatgggccattttacggaacaatgagatgctgacctgggcagaaaaagtcaaatttgcaattgggcttctgcctgcaatggtaggcggacagccttatgtcgaagctcaagatggtttcaccgtcaaagattggatgagaaagcaggtaaaataatggaagaagaaattcttttataattgtaagtttgtaaaagtattcaaagggattcattttatggtctcatgtgaatttttgaagtttcaagttcgaagagtgatttatgatgtttctgttttctttcagggcatacctgatcgtgtaacggatgaggtcttcattgccatgtccaaggccttaaacttcattaacccagatgaactttcaatgcaatgtatattgattgctttaaaccgatttcttcaggtatgttgtttacatttatccttctaggttgatatatcatatcgataccataattttattttattcccgctcatataaacaaagaaaggaatctagaggttaagttactatgcctaaagttactatttcctatcagattgtggaatttggggacggttaggattccgcattgaccaattatgagattagttagtagcatataactatttgggcaggctagcgtttgggagtgagttagtggttgtattaagtagtatcaaagccatgcaccctcaagtgggaccaacgtcgcgggatgggcgacttgtggatcaagcctagtgtgggacaccgcagagtaggctaccgtagagtgggctcccatgggcgtaagctccaaagagattggttagtagtatatagctatttggacaccctcgtctcttaggttaatttttgggaatgagttctacccgagtggtttcataagactactatgatctgtttaccataaagtatttgaagcaatagtgttaaaagtagtcaatgtaccaaactaaaaatttcgaagatttgaatggagggaggttaagtaatacttatacactttttgtacgggtacaatttttaatgccttgaagggatcatttcttcttaggttatgaacattttgatactactgtttttgtcataaaaggaagaaacttatttaagccaaatactttttgatgagttttttgtggaatgttacattgaaattaaatgaacaggagaagcatggttccaagatggctttcctagatggaaatcccccagagagactctgtatgcccatagtcgatcatatccagtcattgggcggtgaagtccgacttaattcccgtatacaaaaaatcgacctgaatgatgatggaactgtaaagagatttttactaactaatggtagtgaaatcgaaggggatgcatatgtgtttgcaacaccaggtatgttttcgacccttgttttcccgtccgatataaagtttgtattgagttcaaaatcataatatctctaatgatatcaacaacttacattccaaacagttgatatcctcaagcttctattgcccgaaaactggaaagagattccgtatttcaagaaattggataaattagttggcgtccccgttattaatgtccacatatggttagtaacagactctctctctctctgtctctccttaatcaagcatagaaaaattcagaagttagatagaggtaggtggtctttgattcatggattgaccaaatttatgaatatttttcttcaagtaggtatcttaataatttctaaagattcaattttatcttaaccatttgtttgaagcaattttatataatattttcttgataaatttacatattaagttatgtttatcatgtgtatgtgtgaataatatgatcattaatattttgtaaacaagttttctattgtttggtggtaaaaatgttttctttgttgcaggttcgaccgaaaattgaagaacacatatgatcaccttcttttcagcaggttctgatacttcttaattttacccaatttcattttaaaaatggaacctttatgctaactttaaatgcatattttatcgaattaatagttacaaacatcttctactcaagtagtttcccgatcaggcgtgatttaccgatcattccatagtacctagtactacatagcaattgttatagtttcccgatctaaaagtattgtagggttaggcacagatcctagttacaaacatgttccgtgtttagtgcttctaatgctgcaaatgggatcgcatattaatttgccaaaagaaaatgaaaaagggaaagatcgtttcttattaatgcttgtaccgacttcaaattaacgtcaatatgcttctttttgctgtgtttgattcggtaaattaacttatttcttccccatgcagaagtcctctcttgagtgtctacgccgatatgtcggtaacttgtaaggtaataactactttcttaaaatgtcatttgaggctaaaattataacactttcattcataattaataagagttagtaatcataatttttactttttaatattaagtttatattccacttgtatattgtaggaatattacaatccaaaccagtctatgctagagttggttttcgcaccagcagaagaatggatttcacgtagcgactcagatattatcgatgctacgatgaaggagctttctaagctctttcctgatgaaatagcagctgatcagagcaaagcgaaaatcttaaagtaccatgttgtaaaaacaccgaggttcgatttttttcaccactaatttgaactattatgagctcggttggtacaagttttacttctactaatagaagttttagttattgtttttcttctttagaagagcttcacaagtaattatttacttttatttgagtagaataaggataaaaatcgaaaattttgttagagactagtgaagatttacctctctaagaagagtttccaaacacgaaaacaagatcattttttcttttaagaaatttttagttggaaaactttgatgcaaaggaaatatgtttttagttttcgggtatggctttgctgtgagtagttcagttactaaatttctcttctgaatctgattcatatcaggtctgtctacaaaactgttcctgattgcgaaccttgtcgccccagacaaagatctcctcttgaaggtttctatttagcaggtgactacacaaaacaaaaatatttggcttcaatggaaggtgcggttttgtcaggaaagttttgtgcacaagcaattgtacaggtaatttaactcggcaagttaagaaggcgtttttgtttgctgctctcaatgaaataactccctttgtaatgatactttactttcaggattatgagttgcttgctgctcggggtcagagaattttggccgaggctggaagtcgttgataacaacactcgagtcaagctccacagttagagcttgtaagtgtaaatcattgttgtttcgagtgtcaacgaaaaccgagcttatcttcaagcaaggaccattccatcagatatagttataccttttctttctctttttctaatttttctgatctgataaaagggtcattttttcagttactgtacagtgataatttagtgtctaaatctgtttaatttggatttgaaagaagtggacacttaaatttgtaaccattttgtttgtttgtggaacttgagaagaattgtcattataaaacactgcatatacatattgattaaaagggctgcatgtatagttgaagatat

SEQ ID NO: 184277 - DNA, 2143 bp, Cannabis indica
tcaatgacaaaaatatataattttgagcttatatttcagctactcacctataatcatggtaaatctcaggtgctgtaagcaagaattggatatctcttaagcttatgtttcctactgctttgttgccaccattttcaattacaggtaccccaccaatcctctttttcctcatcagcttaaatgcttgtaacactggttcatcttcataaacctataagaagaacaacaacaatcagcatttgaaataagaaaacaacaaatattgtaaatctttttagttttgagagagaaaatttgtgcaccttgatgagacgatctccagtcaccattgggagacccacttcagagagtttttttgttccccaattttcaaaccaatgaagaccagcacattctgctaacatgtgaatcaccgaggattgcgtgatgaaattttcaatcttaccttcacccaaatcaactacgaaaatactcttcatcttgtacttggaaagcaacaaaagcattgtcaggaacgagtttgatgtctgcaaagcaagaaatggagcccatcggaatgaccccgagatgtctcgaacctgtaaaatagacaaatatgcataataataagaaaaaagcctaaggtattaattcaacaatgaaaatatctctcggtttgaaatgttagtaatataaccgttgtattcttataatattcagatgcagtcagatgctcgaaaaagtttccagaggttgttgcagccgagtcagggcctaagactccaagttcaaacaaagaagtcactccattagctgctgctgcaagtgcagttccagtatttggactatgtggactccttggagatggaggttccgactgatacacattaaacactatttttacttctcatgaagataaaatatcaggaaaagaaaaagacactacagtgacaaagccagtattaaaacaatataggggccatttttcttttataagattataaatatagtgcatgacaaaaccagtaaagacaataatgttttcagcacttgaaaaaattataaccaagttctttttatagttgtagtaaacattccaccggttttcgaaaaattctgaacaatttacaatatcaaaaatagagtttaaacattcagttgcacccgtgctttgtttgtttttgtacgaacctgttttcgacactaaaaattattctaaattttttgaatttaagtcgagtgtctgctataattacaatattcacagtcataagaaagtttgaattaaaaatagagacatccctagagatatccctatggccacccactttccccctagctcaactatgccccatgataatgcaactacatggttgctatttttgaatgcagaataaagaaaacttgagcaagaaacaatatttattagcatcgaaatcactcttctgcaacaatttaaaagaatatgtagattgaaatattcaagagtaaatggcatttaaatttggtaggcttgctaacctgatgcagaatccatacaacaattccagcaaactctactacaccaatgtatctatcaatccaactagcatcctcagctgcatcaacatctacaacaggtgcactaaggattttgtgttcggacaaaatctgaacagcctcagccaaggaagtatctgattttatctcaatcactgtatacaacgatagcaattcaaaacatgaattaacatcataaacaagtacaacccattagaaacttctcaaaacaataataatccacttttgggaccccaaaatcgttacagatcactatttcttcagctaatcaataataatcccagatcaaattttcttttctcaatatctatattattgttcaaattcggaacttgatcatcaatcaagaaatattaaccaaacccagttagcataaaacatttttaagtttaaaagatgaaaaattgatgcatggttaccttgatcagaaggagctggaggaaaagctgaaactggtatgctctcaaaacaagcattgagtttgtcattaggactgagctgtggctcctgcgtgtcccatagatcctccacttgcatacccaatttcgcttctgggcttctcggactcggactctgttcacccaccaccgcttcacccatctct

SEQ ID NO: 184278 - DNA, 2770 bp, Cannabis indica
attacaatcttgtcttttggctagcaaattaataaaattctaacttgcattcaaaaaaaaaatgagttgttgttatacaagggatgtacttttatagggtgtatttataaaaaataatatttaaataaataaattgaagtgtatttaaattaagaatgtacttataaattgttaggatgtaaatataaactccctaatattaattatttaaatattataaaaataaattttctctatttttgttatccttgttattccatttcaccaaaccaaacggtaaatgtagatgccaaataaagtattgaaccctccacggttctagatttgcgaaaatagccccagatctgcaaaacttgctccatattgaacccctgggcttggccaggcttcgcttagatcttcatctgcgacacaaaaatggcgaaacttgaattactggacccgcaacctgaaccagacaatatcaacatcaaccacaacaccaaaaacaagatggccaagaagaggaaccatggctcaaccaagctgtttgtttttgtggattaccttttccttctcattttttttggcttcttctacttcgtgattttcaagataatcctttcctgattttgattcaggttcgtgcttttatgtataaagatttggtattttagtagttgtatgatgatggattcgaccctttgattttgataattgcctatttaattgattaatgctggtgaaattcaaaacccctttggaacatagaacataaaatcaatggacattttcttgttctaagcgatatctcaaatatattttctttcatgaggttgacatattttttattttcttggtataagaagagctattcaaattgaagcccttatcttttatgaccatctgtatttttattatttattcttgtaccttggcaggctggccttgttgagagctgctttcttgtatctgtcttcatttactacaaggcttaatgcattatagttgaatatcaattatgattacacattttataccaggggatttttttgtattgaaaattccataaaatctttctctttaagatctgaattatgggtatgaacatttaattatacatttgaagaaaacttttgcttaagcttggcattgattgaagtgatcatggtagacctttggaggtgattataacacacaacatgtggcattttctaataccatgatatgataataaaggtatttgatcattaatagtatggtcttaagactactaatggtgttggcaatattatacaggggccaattttcatctgaacagtctttataggtatatcatcaaaaactccatttcaataattatggatcataagattcataactttggatgaagatgttttgattacatgataaaataaggtttagtaaatgaaaagatgtggagtgttattaatgctatggaaaatgacttttggcaataataagtttaatatacatccaaattttgcagactgagttttgaagttgttattagtttgcctctcatattcagttaggtcaaacaaattcggctcttaattcttaattcatgaatgggactgtggttggtgatctttctattatattcatttattattggcctaatagtgcggctaattatgttcttcctccccttctccttttatccaaaatagaaccaagttcgaattctacttatttacctattaatatcacagtatctcttaatgttgttagtaattgtgtcttaaaaccaagttaactttggacttttcagtaccataggtaggccgccatggccaaatggttttttgtacaaatgaaaagaaaaaaaaaagtgaaaagtaaaacaattatagtcccttcagcagtaaagaaattttacctttttaaattcttaaatttgagtcctctagggtcccttctcctcattgtcaccccagctcaagaaagcattaattaaaggtgattttaataattgatgatatcttctaaaagcaaagtttcattttcttgttgcaagttacaattggcaaggaaattaactatttccatttatttgttagcactttttgcaaagttttttgaattcaaattatgcatctgtttttcaggctcaaataaatagtacaagcagatctgttttttaggagaataattttgactgtttgcatttgatgtttaaaaatttatttaattgaacacctttatatttgctttctttttttttcttctcctggcaggaaggcttgacctggatgaattagagatgttttgccagttaaagtgaggtggttttgtcaaatgtttactaggaaaggttgtgttgtgtactatataggaaaaagaatatctgatcctttttttactttttagttgtttggatattcatgcactatactcagtgaaagtctatgtcattcatcatgacatgtactttaattttgttatatatatttctcattaatgaatgtgctcaatgttaagctccataagtcaagctatatgaggatgctcatagttggttatgtcaagtcattttttatgtgttagcaaaacttgtacatctttgtctaaaggaaaaaaaaaattgtacatctggtctcttcataggtatcataatctttgttgacaagcccaaatcagcaaatactaaatcatgcttattaaaactcctactttggtctgctgcttctacttgattacgatgtaaaactgccttgattttgtccattatcaaatatttcaacttataatccaattgttatcattt

SEQ ID NO: 184279 - DNA, 2844 bp, Cannabis indica
tatatatatatatatatggtggatttgtagccgatgtcaacatatctaactctttctattgttttaatatatttggattattttgggtggatttgttcttcaaatatagatactacatacataatcaccttatatatacgaaaaaaaatatatattttatatacatatattattatatatgtttatatttaattattatataattagaaaatgagatataatagattcatgaggtaatgaatcattgctaatgatatatatttatatatattgatgatattcgtgaggagaagtaaggagacgaaaagacaatatataataatatactatttatttccataattaaaatatttttatacaatagcttgaaaaagatgatgacattatgttgacatgcaaaatggcgtattgacataaatagctttctgtttttataatttaacttcagtttagcaaagtcaaatatacaagatgtcgttatagtgtttcatatatatgttatctgttttttctttagatatataatatgtattatatattgttatttcctatgtttatatgtatgggtaatgatctattgtataaaagatatacttataacctggtcaagctatctataattaaatttctgacaagaattttttcacgaatttattatgagcattactattatgtatagatgtaaactgatcattgtattaatttactttatcataatcccaaaattcataattcgtaaattatgatgaagaaaaatggcataaatagttaagttgaattaatttgtaaagtttgatatatcaaacaaccaattttttgagaagtagctagcgagttaaacgtgttatgcttcatgccgcttttgagttttgaactttgcatattatataagtatctttccttaattaatattttgatccccactcaacttttaatataattcattactttgtatgatttttatatatatatatatatatatttacatttttacctttataaatttaattttttttaattttatcaccacatatttatattttgttctgtaaatttatatttctcatttttctctttatatactttcatatttattcttatatatttaattttatctctataaaatttaaattttttgttttctctctcatctctcttatagctcttgtaagctagtgctatggcgaaaacacaagcgaaggtacaggaaacactgaaagtcactacaaagaagaagaaacgagaccctaattcaactactgatgggaaacaaacaagattcatagaagaagttcttggtattaaacttctggaattctcagaggaatttgatgaaggtgctgataagcattctccactggaaccacaattgcacaatgtatttcaagctcttctgtctctaagggcttctctgaaatcagttcaaagaaaggaagatatttgagctgatttttctttcttcttagaagtaaataagaatttctcgaagtctttagcaaaataattaccaatgacaccaccagttctcagatttgacatgttgttaggaacctggcaacatcttttgagagctcgggtgataaaagcaagattaagatcactatggaggatattgaagaggagatttcgtactgaaattcctctttagtgtgctatatatatatgtttgagccaatcctcctctctctgttctggaagaatttgcaagacgattatggaaagacaaatttgacaaggttggtatgttcacatatggaatattttcaattcgatttcactatgttgaagaaagagatgtagttcttaagggaggttataccttcttcaataaaagacttattgtaatgaaagcttggggtccgaacatcaattttaagaaggaagacattcgaattgtcccaatttaggtgtaattgaatgatttggaattgaaatatttggttcaaaagtctttattcaagatcattggccaagttggagagccattaatggtagatgattttataaagagagagataaacttaactaccgaagggttctcattgaaggatcgattcatcaggaattcccaaacattatctattttgaagatgaatttggctttgatgtttctgtagtagtcaattacggatggaaacccattcttcgaagccactacaaaaggaatggggcatgaagcaaaggattgtcgcatgaatgggagtagaaaataagaatggattgtcaaaaaagataatggaaagcctgaagaaaatctgtcaaaagatgtggtaccttggccaaatgaattccatccaattatcaagggatggaaggttaaatgtaaagcacctatgccttgtcctatcactttgaattcatttcaagctttatcaatgccatcatcaagtgaagaggatcaagttgttctgcctgtacatagggaacaagaagttttgatgactgatcaggacaacacaagagaggggggggggggggaggcacctcctcaatcaaataggataagataataaatttgaaatagtctaagggatcaacagccaacagaaatagaaagatgtaaggtaattcattgctaatcaaagagtcagttagttggtctgctcaagataaggttaaggctcaaacttggagcttataccaacaaatgttcatgaggtggtatttcacatcaaacattgcgtggcaaaaaaacgtgttaggattattattgcttggaatccatcacagtttcaagtaagtatactaagtcagcttatacatctatatgttgttactccaaataacaagtatagatttatgtgacttttgtttatggctatatataatgaagaagttggaaga

SEQ ID NO: 184280 - DNA, 5852 bp, Cannabis indica
atatatatatatatgctcttttttggttggttgaactctacctatcttatcatgcacctacacatatatatgtataagccatatatggaatattcatgaagttttagagagtgatataataaatttttatccaaaatgagaaaaaaataaatattttcttctttattaatatatgatagataagtagttagaagaggagggtgtgattttcaaataattttaagataagtgaaaaaatataagtgtaacatgtggcaatggccaagtatatatatgcatatgtgttaaaaactctaaataaagttaattaatattgtttgtttttcatgtgcatatatataactcagtcttttatcatctctaataaatacaacaacaacaacattcactgcatcagccgcacgttactctttttttttttcttatataaataaatatatttattattttatatttaatatatataaataaataaaagaatatatatatgaattataatgttgttatttgttttataagagggagctaatttagatagggtaagagtgagaaaagcatgcattcaattgttatacgtacaagacacgtaataccacttcttcattttgcatgaggtgggttcatgacacgtgttattgatctttcataaattattttaaaatttatgttaatatcatgaataataatatatgtaatatctaaacatacattttaactaattttataaatttattttaaaaaataagaagtatgatttatttgtcccatgtcacagttttcttaaaagaaaaactatataatttccaccgatatatatatagtgaaactatgtggtatatattcattttggtatttatatatatgtaacgtattaattaggtcttctttattttcttcatcttcatggggacttagtttttccagaattaaataaagtatatgatatgttccataaataataataataataataataataaaattatatgacatatagtttgccaaaataactaataatataatattaattatgtgtaatgtaatgtctactataccaacacgaatgcgtggatattattaatttataatactttatttttcgctggtgtttttattttttattattttgaaacaaggaaactaataatattaatagggaaaaataaataattatattggtggtaggacacccaaaccaaaattttgtgggcaaggtttcatcaaaattttgtctttattcgccatgttggccaatcatattatcttcaagaacttgacctaatacttcaaataactttgtctcatcaaaaaatttggctaaaacattggtgcttttgtctctttaatggtccaaaaatctcttagcttttttagtattagagttaataatttaatttttttaaaaaaaagacatgacttttctttttcctctttattacactcacacccaatatcatacttagataataaaattaaagacagcctttctactttgatagtgaaagaattagttaaaggttcttatgtggcctcaattggtttagaggtcacataataaatatttttgtgttgccaaattggaatgatattgatcatttctaaagtgggcattgcttttttggtgctctttaatctctggtttcaaccctttgatcttttttaaaaaagagagattacatgacaagatcacagcctcaattatattatagtgagtcatgatcagtttattttaactttttattgttaaatattgttttgacaaaaatgatctttctctttcttatgtttttgaccataaatgcttgtagttttatgcttggaagcaactttgaaaacgatctttaaagccctcttaacttaattagttatggctaataggttatcttattttgtgggaatcctttatttattacttagacaacaaaacataattggaattgtacaaacattcccttaagtgggttgccttgtcaatcaagataattagccaataatataatcctctttgttttttttacttgttttgtaaattgtatttttggaaacttgccacttaagtaaaaaattaattaaaactctttttttctctaatgaattatacagtgaatcaaggccttgtgacactggcattctttggagttggggtgaatttggtgctgtttctgactagggttttgcaacaagacaatgccagtgctgctaacaatgtgagcaaatggactggaactgtatacattttctcactctttggtgctttcctcagtgattcctattggggaagattcaagacttgtgcaatctttcaaggaatctttgttgtagtaagtccatacacatatatgtgtattcatatcttttatatattgaaagattgataaacatgttgttgtgatatatatatatatatactaagatcaatttcatgacagggtttggtatcactatctttgtcaacaaacctattcttgctcagacctaaagggtgtggaaatgaagaaactccatgtggaaaacattcaagcattgatatggccttgttttaccttgcaatatatcttgttgcccttggatatggtgggtaccaacccaatatttgtacatttggggctgatcagtatgatgaagaggaccacagggaaggacagtctaaggtggcgtttttcagctacttctacctggctttgaaccttggctcactcttctcgaacaccattttgggttactttgaggatgaagggatttgggcaattgggttctgggcatctgcagcttctgcttttgcagcattgatgttgttccttctaggaactttgaggtaccgtcactttaggccgagcggtaaccctctctcgaggttttgtcaagtcatctctgctgcatcaaagaagtggagtgtgaagatgccaccaagtggtgaagatttgtatgaagaaaatgttaaggattcttctaattgtaacagaaagatactccacactcatggtttcaagtaagcatttacaatataaagctcatgaaatttagactttaaatcaaatgacaatgctaatttgtattttgttctgaatgtttaggttcttggacagagcagcatatgtctcttctagagatttagacacccaacaaactatcaacaaaaacccatggcgtctttgtcctatttcgcaagtagaagaagttaaatgcattctgagactgcttccaatttggctatgcaccataatctactcggtggtcttcacacaaatggcttctctctttgtggagcaaggtgctgcaatgaaaactacaatttcgaacttcagaatcccaccagcgagcatgtctagcttcgacatcctcagtgtggcagttttcatcttcctcaatcgaagaatccttgaccctttggtggggagactaaaatcaagttcgaagggccttacagagctccaaagaatgggaattggtcttgtgatagcagtattggcaatggtttcggctgggattgttgaatgctacagactcaagtatgcagacaaggagtgtgctcactgcgaagggtcgagctccctaagtattttttggcaagttcctcagtatgcattcataggagcttctgaagtgttcatgtatgtcggtcaacttgagttctttaatgctcaggcaccggacggattgaagagctttggaagtgcgttgtgcatgacatctatatctctaggaaactatgtcagcagcttgcttgtgagtatggttatgaagatctcgaccgaggatcacatgcctggatggatccctggaaatctcaacaagggtcacctagacaggtttttcttcctgctagcaggtttgacatccttagacttgtttgtctatattgcttgtgccaagtggtacaagtgtatcaaattggaaggaaaatatgacgaaaatgacaacaatgacaacaaagaagacaaggagtctgagaacatcaaactctaaagcaaaggaagaccataacagacatgttaaggcctatggtagcaaaataaccttataaattaaataagagaaaaggggtatgcacaaacacaaggggcatagcttagcttcgtgtttcgaatagttgtgaaaaggaaaagaagactgataaagcccccccttcttgtgctgtaaacttctcagtttctacatagcctgacagacattttttgttcacagtgagctgagtagagtttgtaagtgtgttgttttaagagatgggcaacttttggcttaagtctgatttgctacctcatcttctcaattgttcattgtgctagccgtaggattaacatgtgcttcattgcacatatctatgtatgaaatttgctctgtttaacgtttataaaggtgaccctttcatcaaatgcacttgattaataaatgaagattttcaaatgctactatcagttaatatatctattgtctactgactcatgtttttggtgatataccattcacagtaactttttcatgccttaactgctaactcctgacctagcaattctctgatttttctttctgtatccattgtaaaaagaaaaatggaggttctttgaataactaagctgaaaatggtgaatagcaaataactaaaagggtcagatattctaatttcttaaaactaatatgggaagaagagagcctttatctgcaagtaacagtttctcttaccatgtatgtgtttgtttgttgaagctcagggaacacctatcgcatatcattatatgccatacgatacaataaaacttgaatgcaaatcatggtggtatgctatatcatatgtcatgacataccttgttagttcacatttaacgccacgagaagttgagctacctaccatcacggttcgctatgaagaatggctctgtctgagcaaccttgagatgttaatcaagccttcaagagcactgtaagttctcatctttggagatgaaatttgctctcaagtttcaaccaggatgtcatagaataagaatctttacaatcagctctggtaagaaatgatcatggaatttaaagtaaagagaataatgcatgtctgaatctcaactcaagttcaaataaaacaaatctgagctagtgttctcattgtcctccattgacagtgtcaccaaactaatcttacaatgtttcgccaattaatattatgaaaatcatatcaaaatagttgggagagaatgcaaatggaagaatatcagtaagagacatggatggaacaaattatttatatatatagttaaacaaaaaaaaaatcagaattatggagacaggatctacacagccataaaatattaaaaacacttgagaattttgaggtttctacacattagcttcacaacaagaaggataaaaaatgttgataattttatatctgcataagtgacagactaaatcttaatcaacattaactgttttaacatgaaagcttctacctagaaccccaaatatttaagataattgcaaaattaagaaaattttcttaacaaaaagaaacaaaaatacatacaaatatacacttacaattcacaacttgaattaacatattgtttactatcagccactaaaaaagaaaactcccgccagcacaaagtttagctctggaccctacgtacttgaatgtgatgagtcgattctgaacgccatattggttgcgcaccactttggacaagggtgacatgttctccctccttcaaatgacccctatcctgaaatcagaaacaaataactgtataagatgatgatacaaaagaaataaatctataaaagttaaacctcactaaccagtaagagcttgagtgctctagagaaggtttcctccgcatcatttgagaattccatatata

SEQ ID NO: 184281 - DNA, 4399 bp, Cannabis indica
gggtcatgggtattgaaattgatttatatacttgtactaaaaaatcaaaatcttaaatgggtttattttatgagacttgttgatgaggggaatatatgcttaatatgttttagcactgaaattttatggagtaagctttttggggcagtccaccttttttttggggggaatttgtgattttgctcgaatttgataatttgtttgaacactgctttgtaagctccttacagggatttagaatactaatttggtttattgaatcattgactatatgtggattaaggtcgatgcccaggttaattagtttctttttttagttggtttctataggttaactcgtttcataatgagctatgaaaacataatgcagacactattagtcaggttttcttcaccctttatccggaggtcttaagataaatttgttgatctcgtgttcagtagatcagatgcttactaattactgcttctctagtttcttttcttgtgcttggttagaagctggtgtatattgatgatataattagcaaatataccaatatgatagatgtaatgattatacgtaatgatggatgatattaacgttaaggtagtattttttagagtattgaagaacatgattgttgtgttggacgcaataatgtgataggaaactaatgctctgatgtgatgatggtaattagctatagagcatatgtgtggcagtgtttgttgcatagcctacagttcttctttgaagctttttctttctttttgttaattgagatggagtaggcccctccaggctgccatactttagatttagatttttttttttgatatattcattagtttttcttctcatcagtatcaaatttcttgagtggttcggtttgtttcggtgacagtgaatgtgtttgagttagtcaaggtcattttgctgttgctaatgagtgtcattactgttatcaataaagagatgcatatcaacagagctacagctctcaattatttgtttggggttagaaacccctcgtatgtcagttattattttagtcgcttgtgtttgtgtatttcatatgtcagtaattatttaagttgcttgtgttctggagtgggggttgaagtctgaaaaggtttcagcagatttcttataaatatccaattcacaatagatggatgttgttctttgacaagtatttgcaccacaatatcagataatgctttctgcatctaatactatgggagtgtcatgttttcatttatcgctgtctaggtctatgaaaaacattttcttacattttgagttattatgtgatagcatggcaaactatgactggaaaaataagttcgctatttgttttttcagtatttagatctaacctgatgaaaaattcattttgataggctcgcatcaaaaagataatgcaggctgatgaggatgttgggaaaattgcattggcagttcctgttttagtctgtgcgtagctctcactttcttttgtagtacatctcagtttattatttattctctcttgcttacagttttcttaatattaatgcagcgaaggcattggagttatttctacaagacctttgtgatcgtacatatgagataactcttcaaagaggagcaaagaccatgaattcgttgcatttgtaagtatatttagtttttcgttaatgtaatcgatttgtttttcaagttttgcgatgaagaaaaccacagctatgatttgccatttttagtgagaatcttggcactttatgtcagttaacaccaatagcataaggaaaagaaaaacacaagtttagatgttgttcattgttattcgaattgaaaaggaaggtgcttttttgggggattaaatgggatagagatcaaagaacagatttgaagggagaagtttctgacaaacagcaaataaaaattaaatttccaaccaaccctgacaaattgaagaaataggatcacgttaaagttgttcagttttatacaactatagatcgactatgttaaataacttaatgccgtcaaggttctaactaagaaaagtttccatacttttatgctcaatttccttccttttagctgaaagaatttctacggagtgtaaagtacaatagtctattttttgtcaaacactggtcctcatagcaaagatatatgcagctccaaggaaaaattatcaaattaaagtaggtcaattttgctgattttcctagtactgggcaggtgttcatatgatcaatggtttagtttgtttaggtttgtgcggttacgtaacttttgggtactgccagggctttcttgtgtgtttgggattgctgggaagttaatcacaactgatcagaaaaattataagttcacattatcttgttttgtgttgatatcttaaagaaataaagagaaaatgtctcttttgattaaaagtattatatgttagtatgcggtactcttgcctcctttaaataaatgcttttatgtataagattctaattcttttaattcccttaaatgcagaaaacattgtgtacagagctacaatgtgtttgattttttgagggatatcgtcagcagggttccggactatggtcacggtcattcggatgctgctggtgaggatcgagcctacacaaagagaaggtttgcaagatgactgttgttctttttctttgatctatattactttatgctcacaagatagctcacccagtttataatagcacatagatgacttgagaactgaccacataggaatggtcacagtaaggtcctagatatacttgcgagtactggttaacatgggtacacaagtgttatcctgttgatctttatttttcagttatagttctgttttaacagaaaaaaaaagttgatcagatgtactcagtgtctatttattctgttaggaaagctgctggtgatgaatgcaatgacagtgatgaagagctgaagaggagcaagatggtatgattatagtacctcgaatcatctacttttcctgtttttgctaatcctgtctgaaatgtgtgtgcagttaaatagtgtttagtagtgagcccgttggtaactgaacctgcatggctgaattatattaatcttccagttctaaaatatgcaacatataagaataatgtcttcatacataatagtgatcgcattgaagttgaatgcactaatattatattatgtatatataattagtcatctggatgaaaacaaaatgtggggtgactattggttaagcagaggtcgatagagcatttaatccaggaagctgtttttgttttaaacttctggtcattattcttcttcatatattttcttttgtatttgtagcttgagatgacccatggcagtagtagtggcagaggaagaggtaggggtagaggccgaggacgcgggcgaggtcgcaccttagaaagggagacttctcaccttgatccagaatctgaaccctgctcatctcctcagtatggtaccaaaccaagtacaatccttggagcacctgtggacaatgctactgatgtcaaggacccgttgaaggaaaataccagtactggtgatgaaaccatcccgattgacccaacttctcggaactttgacctgaacgctgatgtaattgattcagcaaacgatgaaaagaagacagctgcagctgccgcagctgcagcggcggcgacagcaacagcggttacagctggggcaacggcagcagtagcagcagcaggaactgcccaagccccattggcaggaacttctgaaaccaaacatgaagaataccctggttggtctcttcctgagatggatcatatggcaattgaccctattcaacttgcgcatcttagcacaaggttagatcaggaagacgaagattatgatgaagaagggtagtgtgacgaagtacttagtagatgcttaagaagtagttgtggggatcgaaattaataggaaactcaagagaacgcaccaataaaattacatatgcgtgcgtacaaaagaaatcattgtatggaaaatgtgccctctagccttgtatctttcctctctttctcactctcttactcaacctttaatccataagaacaaatttggtatgatagcttttactgacagttgtagaggtctttagcctcagcacttagaattatcttttagaagagtagactaagcatggtaagatcagtaatggtggtgatgatggccccttctgaaatacccttgtgatttatgaaattattatgttttttctgaagattttagaacttaatcgtatctctgattcttgagtttataccaccaaagaacaaacggtaaggagaaattttgaatttggcatcattttccattgcttgttaatcaaacaactatatgtatataacttttttacgctttaaactatactcacttattaat

SEQ ID NO: 184282 - DNA, 6628 bp, Cannabis indica
gtaagtaaagaacagctcataattgttgtctaaatagatttcaaaaaaaaaaatcaataacaaagttggggcccgctatagaggcggtggtggtggtagtgatgtggataaaaccaaaccaaatcacaaaaagacaaaaacatgtcacacaaggactccaattaatacattatctttaaatcatttttttattaattgtttttacgaaataaaacaagtctcagcgaatcctcaattttctttgttatttttcttcttcttttttaaaaaaattaaccatgcataataatgataaaaataattgagatttattaaataaaaataatgataataattgagatattttggttttggttttggtttatttatttatttttatttaagaatagatgagaagaggagagaagacactctagttgatatttttttggaaattcacacaacttggccaaaatcaggaaaccaaatagaatgatagaatattaaggttaagattcagatattctgatatggaagccgatgtctccatttctctatccaattccgaaccctaacttcacactctcacatcacaaaccaattcatcttcttctcttcttctacttttcttttctgtccctttcatccaatctctgagttgttgtaatttgcgttgaaatctttctgttagcgactatgaatttggtcctgttcttctggctcttactcttcactggcttctccttctccctgactcttgccaatgtagtccttcttgggaagaatgtcactctttctttcggggacattgaagccaatttcggtgagttttttactttttatttttgaaattaaaattttttggtttggggttttgtttggttgctgggtttttgtagtgattttttttttctttggttgaattgagctcgcgtaatgcaaatatttgagcaaagcttcaagtttagtgacttcatgtgggtttcatcctttattttgtgtcttttacttaatttctttatgtgtgtacatctaaagctattatgttgataacattagaatacttttgtgaatattcccactggttgttgtttaataagaatatagagttagggatattgaaaaactatattagttgtggattagcaaggcaactggttacctcccattaggtatggggttcgattccttatgggacctacctagaaattttgttagattttaatcctctttgctcacaaagattgcaattttgttagagtttctttcctttgcttgctaagattgcagggttcagcgaaaggataagagaaaacaaagctatattagtgtttgtaagcctgcgtgtttgtgttggtactgcatttgtaatgcctttctgacagatgactattgttgcattcatttcagctcctgcaataagagggtctggggaatgtggaattctgtatttggcacagcctctgaatgcctgctcaccattgagtaataaagttcaatccattaatactagctctccatttgtgctgatcgtgagaggaggttgcagttttgaggataaagttcgatcagctcaaaaagcgggattcaaagctgcaatcatctatgacaatgaagatggcggcatcttagttgcaagtaatgacttttttttaacaacttggataggcttgttgtgctagctacttctatgaaattgcttagtctaataactaatagtgaatgagtgtgagcctgcattttctcatgagtaaatgctgattaaccttttactggtttattaaatgtactgagttatcaatagagttcccgatgggattagacactaactctgttatctgcacatctaaaacatgtataatagtaaccaggtagtatagaatgggatgtgtgtcaatttgctttgttctttatgttcagtaattttcttaggcaaactatttttatttttttggactcagatgaaagcttcttttttattaaagtaatcactaatgagtaatgatcaaagttctagccaacagccctaggataacaaactttttgagaatgaagtacagaagttacgacaagtcctaccaaacaaaaaacttttcattttcttttttcatgggacatgtccgcactcttgataagggtcttgtttttgttttcctcacttcaaattttgtcctcattctcttgcccattaagactattttggaggtttggatatttttatcctagttataagttggtaacaaacaggtgataaggataatacccttatgccatgtacctaatgatcccttaagagcatttctaatttttatatctatgttgtgtatcattatggactgtggagttgtatgtcaaaggtggtttgtcatcttatccttctcctgggtatttgtgaatttttcagtggccgggaattcagctggtataaaggttcatgccgtctttgtatccaaagcttctggtgagaaactaaagagatatgctggacatactgatatggagttgtggctaatcccaagttttgagaattcagcatggtcaattatggcaatatccttcatttccctgctagcaatgtctgctgtgctggctacctgtttctttgttcgcaggcatcgaatacgacgagaacgacctcgagcttctcgggtccgagaatttcatgggatgagcagtcggttggtgaaagcaatgccaagtttgatatttactgctgtttcagaagataattgcacttcagcaacatgtgccatttgtctcgaagactacagtgttggagagaagctgaggattctgccatgtcgtcacagtaagtttatctgcaacttattacatacttgcttactcaattgaagttcttgtagtatttcttagtcggtttctagtaatttatagtcattttctagtaatttattacatttgtcattgctgttatttttattacccatcattgctattatttaaccttttctgacacttgagttgtgacaagttttcttgtagatgataggttttaaagttttcttgtcattgctgttgggtgtgaaaaactgtcatcgcttgcttttttttttttaaaagttttatttatttattattattattttaatccgaatgtctttgctttatatgtcataatgttttgttttttgtgctaagaacgggttaaccgtgttccttagagcacccacatcagatgctttaaaatagagattttttaaattatttaaagaactaaactaaaaacaagctacatcagatgctctaaattttttctctattttaaagcttctttaaaattcaccattcatgctttacatctatagaatacaatttattgttctgaacatattttattaattgttttgagtttacatttttattttcatatggtaaatatgtgtaaatattaatattatatatttgaaaataaaaaaaatatattaaaatttagaaaaaaaaaaaaagagttttggtgatgtattttgaataaactgttttatggtgtaatgtacaaatttgaagtaaaacaagaaaaaatgggattttggatatgtattttgaaggatagaatagggaggctgatgggagtacaatgtttgttttttttttccaaaaagaaaatatttttgtttgtttgttaaaaggtggcagaatactcaaaacagaatatttttattacaggtagagttgtgaaactattaaaaggtggtcatcacctgtagaataatagtttgcagctccatctttgttttgatgcattgtagttattctggtttgctatcctcttataatgggtgtaaaacacgtgcatgcccttatactctatgtaatttgatatagagaactaaccatcgttaaaactgcgtacgtactatgttagcttcttcatagaacctactcgtgctcaaatagtttctcttaatctgtagttgctattgcgtttttaatgtttaggagcttgggtataagtagaactgtgatagtaaatcctcgtgtttcccaaagattattctatatgcttgtctaaatattgttttttttctattaagtctaaataatctaaatattgttattttgactcttcagaatttcatgcgttttgtgtggattcctggcttacatcctggaggactttttgcccagtttgcaaacgtgatgcaagaactagcacaggcaatccaccagcctcagaatctacaccactactttcttccagccaagtttctttagcttcctcatccatgctatcatcaatgagatcatctttggcatcctcgtctgccatacaaattggcccatcaatgtcacgctccccttctctttctcgctcaattgcaagtacttcctattttcaacagtctcttaggtcctaccgccaatccccctccttgggtgtaagcagaagctccatggatctccagaatgcatcttcccaaagatctcatgcttatttgatctctggccattccttgggttacccttctttatcaccccttaactcaagatacttgtctacacatattccaagccctagcaatgcctcacctccctttgtgagctcttctacttatcagcagaatccgttgcattgcagcgattctgctgcaagtttctctcctttcacgtctgcacactccctacctgattgttgaatcaaactatcctgtgataaactattgggcatggttgagtcggtaaaaataagtgagtgtgaacgtttgcgaatttgtccaggaaagacaccgacagaaaggaaaagaaggcagttaccaagtcacctgtgctccatactccccctcatattcatatggttgggttacatctaattcagtggctggtttatggtgaatcgagggaaaggtttcttcttgccgagactcgcgtgtacattagaacttttagtgtgacattggtatttaattctggtttacaagaaatagttgtgtttctttcgacgattgtatatcagaaacatagggaagaaaatatcgaatgtaacttgatgcattggttttgttaatatttatgttacaattgttgatgttaaaaattgcgtgttaaacagaggtatatctgtaacagaagcaattttgagacaattatccgtgattttcgcatggcaatttcaaactgatttcactgttatatgatgcagctccactccatgggatgatttagttcgttaggggctcgacaaggatagtattgtcaaatactgtcacctaggatttcatattaacgctaattttctcatctttggaaacttgaatacttttgacgagctaattttggtttgtttgttggttttttttaatgactaattttggttactagttatgaacatattgctttatttttattatatttttgtatatttattataatttgatcagttttgcaatttgaaatttcatatggatttacaaacaggtctgaaatttaaataatattattcatatcacacaaaaaatttaatccaagttaaacaacctaaacagccatacacaaatcatcatcctcatcttaagccatcgtcccgacccgcgtaccgactagctctctaacgccaagcagtggccccaacacacatcaccgactagctctctaatgccaagcagccgcggcaccaatcttgacacccagcctttgcccttgcagcaccattgcataattttttccccacgctacaagaaaataaagatctaacgtcaataataaatttagaaagagcgtcgttagaaagaccgtctttcttcagcaatcgttagaaagactgtcgttctttagcaatcgtcagaaagcgtcattcttcaggaatcatgtaaatgacatttttccaagtgacaaaagccacacatgataaccaatgcattaggcataatttacgtcagtttccaagaaagaaatttgatgtatgtagagggatctcgcataattatgacgtttaaatattttttataacgttgcttgttaagcgtcagttgtcataacaaaccacagtaaaaaaaaaaatcacttaaacatcatggtcccaagattgacatcaaaagagctatcacttgaagaaaaagaaaatataccactaaaaaatttatatgataaacaattgaagagaatcaagcttcatggttctacaatttctttatttttattcgaccataataaggatatattttattttacaacataaaagtgaatggaaattttcattgtgtcaaataaggacctaatgtatgatgtaacaatccaaattgtgagctgtttgttagtacaaatgtgtaataacgcttgaaaaacattttagtaacttatttggacttgtattttttaaaaattattaattggacattttattttattaaatgataaattagacactgtattatccaaaatagtataaatagacttaaattgaattttcgacaatttttttttaatataaccaacttgaaaataaattctgatacggatagatacaaaaaaacataaccaattttgtcataatacatttacatcgggttattattaagttttattttgaccaaaaaaatatttagggtattaattagtatattttggaaaatacaggatgcaatttgttatttatcaaaacaaaaggtctcatcagtaacttttacaaaatata

SEQ ID NO: 184283 - DNA, 5926 bp, Cannabis indica
ctgacgctacagtttgtgagcgccaggcaactctgaatgcttgtcccctccactcgcgtggtgagtctcactcgcccacatagccacatgtgtgtaacacttctcattgcgcatctgggggagtttttctaccgtatttttgtaaataagagactttaaaaatagtatatttcaaattaataaacaatataaatatttattttttcttgtagtagtataaatatttttttaaagtaatattaacccaaaatagaaaaaatccctaattcactccccatgtcgtgatggtaatggagctacgtctattttgagtttttatttctcacgagacggtaattacagaaaaaggctaagtgtttaagctctaatttctagagagaaaaactagagtgagatgctctgaccttgtgcgtaatttttttaatatgaaaaataagctagagaagctccctttttataggttaaggagatccttaaaaataggaaaaaaataattcaaaatatgaaaaaatataaatttgctaaatttaactgtagatgctgatctaacaatcaaaattaatttctagggttgatagtcaatttttttgagccaagatcgcggcggcgagacccactccaggtaagtcggagcttattttcataactctgagggtcaaatttaaggtcgagaacttcagaactacgattaaagtgtgagacaagacttgataggtcattgaaatagcttcaaaacacaattttaatcgcatcaatcaaactaatcgtgagttatttatgatcgtttcactaaaagtagttcataacccagcacccaggttaacatctagtgcttaggttgacatcccaatgcccaagttgacatatttcaacaacctggatgctgggtaagtgagaaaacctcccagtgatgtactttttgatgtctaagtgatattttgacatcactctatctatttttgcgttttggcaaagttggtcaccagttcttggagatgttgctattctacagaaatgagagactcgaaactcttcatttccgactggttttcccatgttggaaatgagaaatttgaagttataaatttgacttctctaacttcatggatcttagttgttgtgaaaaattagacgaacaataaaaacaggataagaattggataagcagaacccagttcatttctaggctcccacgttgtcattttgatacttccaaggttcttgaacttgataaagaggtctcttaccccatttttttgcattcttaagagagtgctcaaatcatatttggcatttgaatgattgaaaccaaaacaccaagttgattgtcaacttgggccctgagcactgtttctaggccctcgagtttgtggttttctccccgagtttgcttgaatcttaattatttcaaatgaggaaaagaatttctgaaacacttctttgaaaatctgattggaaaaggcctaggttgataatatgtcaacctgggcgtgaggcctagtatcaagtgtcaacttaggcgatgggtcctagtttgtgccctttagaagctctgttaggtccatagaaatagttgaatcttaatcttttctgaaaattaagaatatgtgcggaagagttctcgaaaaacattatcagaatcggtgcaggttgacaaaatgttaacctgggtgttgggccttgcttctggcactcatgaagttcattccctaaaagtacatattttaatgttttttatgaagatgaagataatgaaaaagtcagatctttgatctaatacttgaaacttgcccagattgataaattgtcaacttgggcactaggtgctcaagcactggctgctctgggtgcttaaaaattaactttctcttaatttaattttgatgcctcaaatatgtttgtggtatgtctagttgatgtcccaatgaaaattttgacctattttcactaagatgataccaaaaactgaaaccctagttatgaatgcaaacttgggcactaggtgaaaccctaggtgcccaggatggcttttagggtgcaagattgtgtaatttgagctccccgggtttggattttgattgctccatgtcttcatggtaaaagatactaaaacataaggagttgggaacaagttattgaagttttaacttctattatggaattcctaaaccctagttagcaatgtcagcctagccgttaggtgaaaccctaggtgcccatgttggcttttggggtgtaggatcgtgtaatttcaactcctcaggtctagattttgattgctccatgttttcatcgtaaagaatacaaaaagataaggattcaggagcaagttatcgaagtttgaacttccattatggaattcccaaaatcaacctaggtgtagggctagggacctgtcccaagtcgacttgctatgacataggactactcaactccatgtcgtctttcatgcaacatgtcaaacattgttgtccatgtcattagggctaatttttgtgtaaacatcacggactatgaatacactagcttccaggcggataaaggtatgtactgttatggtcatgccatttggaccaaagaatgcctgagccacttatcaaaggttggtcaataaaatgttcaaagatatgcctgggaggaacatggaagtatacgtggatgacatgcttgtgaagtctagaacttctagagagcataacaatgatctggaagaagcctttgctgtcatccgaaagtatggcatgaaactcaacccaaagaagtgcacattcagagtatcttttggggaattcttgggtttcatattagttactgggatgctaatctagaaaagatcaaagcattcatggagtttccatctctgccaagtgttacagaaactggagtcatccaaaaggtttttgatgtgggccatggaacttattcaatttgacatccagtattagccccaaatctagattaagggacaggccctagttgacttcatggtagactgctctggaatgaacgattatccagccgagctagttccagaattgccaccctaaaagatctacgttgatggaacgtcaaatgaaaaaggatctagagcaggaatcatcttagtttctctgcaagtatagcagatccaaagttccctttgttttgagtttcccgtctcaaataacgaggcaaagcatgaagctatgatagctagcttgcaattatcaagagaagtaagagcacaaaacattgaagtgtacaataattcccaactggtggtaaaccatatatctagggagtatcaaaccaagggagaaaaaatggcttcctatgtgtcacgatcaagggaaccgttgcaaaatttcaaaaactacaacatatgacaagtctcgtgcgagtagaattcatttgctatatgttggcgaagctttcaatagacctagagattgtgtaatatggcatggtgcccgttgaccacttgaaagccccaagtattgaaaaatttaaggtaaaatccataattgaccactcaaaatcatggataggtcagatcttccactacttgaattctagagagtcttcaactgacagagctgctgctcagaaggttcaataccaggctcccagatatgtcattcgaaatttaaaagctttattgtaagggattatctgcaccatatcataggtgtgtagccaaaaccaaaataagcgccattattcatgaggttcacaaaggtttctatgcagtccatacttctagaccgatcctttcaaagaagattcttcgtcaagggtaattttggccaacaatgaagaaagattacattgagtacatttggaagtgtgagaaatacaaatcctatgaaaacgttttgtgaaccccaccaacagaaataactttgatgaacagtccttggcctttcgtagtatgggaaatcgacctagtgggatctctaccaactggaaaaggaggagtcaagtatgccatagttattgcagaatacttcaccaagtgtgtagaggcaaaacccatgaatatagtcacctcaaataaggctttggacttcgtcatcaaaaatatagtgtgccattttggccttcagcataagatcgtatcagataacaggaagcaatttgacattgtgtagttcacaaacttttgtgtccaccatagaattatcaaaagtttcttggttgtggcaagaccactagcgaacggacaagtggaggtcgtaaacaagatcttaaagatcacattgaaaaaaaattgtaggcattcaaagctcattggcaggaagcacttccaagagttctttgggaatatcaaaccacaaaaggaacttcaacatggcacaggccttacttaatggcttatggatgcaagtacccatcctagttgaaaacaccattccttcacatatatgagaaatctattaaccatgctctgcttcaagaatctttggacttaatcgaggagctccaagaacagtctcaactccaactaaaaatttattaaagcgagattgtcaagcatttcagttccaaagttaaaagttgatcatttgaagttggaaatctcgtcttaagaaaagtattcccatcttctcaagaactgggagtgggggtcttagcaccaaacttggaaagaccttatgagatcctacattaagtgggtaatagaatgtaccaattgaaaagactggatgaattgagattccacaagcttggaatgtagatcacatgcactgctagtaccggtaaactggtgttgtttggatcaaaatatcttcttctattggttgtaattttttaatttttcttctttatttacgcctctgggcacaatgaaattggaaaaattaatgaattttattttgttttcaagctgcattttaaataactgatcaagaatttagagactttggaattctcaactcacttggggagtaggatatatagctatgtacccctaaaaatgtgaaatgccattttattgttatgttcaagttctactcactatttttattatcaaaaattgtggaatgttgaagtagaaaaatttacctgaatcattaacatttttagctattttcttgccatattcaaaattgatggaatatggaagtagaaaactttgactgaatctttaacatttttagctattttcttgccatattcaaaataaatgtttatacctttatgtcttaaaattgagaatagaaaaccacgcctaaaatttgtttttcaactgttttcttaacattttttgagaagggtgaattcttcgcgcatcattttactttgttaattaatgaacaaatcatggaatatatacaatacttttcttaccattttttaaattaacaattcctagtgcagtcgtgaatcaatatttaactagttacggaagtatagagttctagctaaaactagagacttttagagccgagagcaagccactatctcactgtacttaagaataatactcactaagtcaagttggtccaggaacaaaaacacaaaatgaagtccatgagtgtgtatcctctaaaattagttgcctagggaaccgagagtaagcatagcctttttcatcacctggagccaacagactaaggtttttgtttcgtggaaagttcctaagttgaaagatatgtacttgtgtggaacaaaaagctagaatccaaaaatcgtaggtgtcctatgtattaattcttagtattaagcactaagaaacttaaatggaggattttcttctcaaatacgagggacacataacatgaaacttagaatggtcctaactaaagcttaagccttggagttcaatccattagaatcaagaactcatgacatccaaagtcgcttgaaagcacttatgcaaacataaataccaaagggagattttttttttatgtacaaaaacaaaaaaaaaaaaaaactaggt

SEQ ID NO: 184284 - DNA, 747 bp, Cannabis indica
agaataggaatgggaataggaatcgtctttccaccaaaatagtccatatattctagtactttaaacgaaaacctttatgtataataaactaactctgctgctaatagttagcttttttccccttttaacactcaagagagtcgagaaattttgcattgtgttttcgtcaaaattgctgcatttttatttcttgcttccttttgaagttactaattaattagtttttgcttatgatgcagagttgaggtacctccacttctatcatatgggccaactccaattttatgtgaaagtaaatgagttcaacactatcaaaattccatgttgggagcttcaacttcaagtgatatcttgttatttttctactaattctttggtcattcttttcaagatatagatatttggtgtgtgtatatataattaaaaaaaaataagttataagagtatttcatgtaagtccatgtttacatgagaaaaaaagagttcattaatttgactgtaacacaatcaattttgtcttgacatgaatttggctttggctgtaagacttgtttatatgaatatgattcattcattcataaatagaaagcagagtaatttcaataacacatatttatccaattaccacaaacgttatcatgaaaatatgacttagtagctatgcgtgcgtgtaatataaatttgaaaaatcggtcgtgtatgtacagtgtagaataatgattacacaagtttttttattattattat

SEQ ID NO: 184285 - DNA, 7366 bp, Cannabis indica
ccctataccctttcatgtaacatgaggtcaccaagaatcatagccgaagtaatcctaggattaagatctttcgggccaaagttaacaccatcagaacatgtccaagaatagtgccaaaaatcaacctcggactttttaccaataatccacaagctgttgtctttgataaaataatgagtcttccaaatccctctcaccacaggcgaggcagcgtggggcaaagaaccaccccagaagttagaggagtggcaatactttcccaagaggatatgagaccaaggagtattgtgtttcccaaggccaccactgcttttaggtaggaaaatggaactccaggtcaaaagagacaagaagcgaccaccctccatgcctccaatccaccaaaaccgtcgcaccatggcatgaagagttttggtaattttcagagggagcaaaaacactgacatagtgtagataaggatggaggagataatattcttaataagcacagttctagctgcctgtgaaagaagcttggccttccatccttccatacgacttctcattttatcaacaacgaagttaaaatcttttgtgcgattaccactcacgaacagagggttacctagaaaaaccacctccccatccataatatcaaaccccaaatactcagagatattaataccacagctcacctcacaattctttgagagaaaatttttggatttcccttcattaattctctgtccagactagaggcaatatttttccaataccccctgaagaacattcacttcctgcaactctgctttagtaaaaaaaaaatagcgtcatctgcatacatgagatgggaaactgtaggacaattccttgagactctataacctgttatcatgccctgttgttccgtatccaagatcagccgagaaagaacttctaagcaaataataaagagatatggggacaaaggatccccttgcctcaaccccatttgaggtagaaaagctttggggagaccaccattcagcaaaacctagaaattcaccgtagaattacattccataatcaaactacagaacaagtcactaaacccgaaggccttaaggacttttccaacaaagggccattccagctttgttgtaagctttagacatatcacactttatcccaacaaaagcttgtctcccttatttcgtacccatgtcatgaataatctcgtgggcaatgatagagttcttagcaatccatctacccttgacaaaagctaattgatacagagaaataatcttattgagaacaggtttgatcctattttccacgatttttgcaacaatcttgtagcaaacattgcatatactaaatgggtaaaagtcatcaaatttacaagtgttacttcttttgggaatcaacaaaatacaagtgcggttaacctccttagtaaacttgccagagccaaagaattcctgaaaaaaaataaactgtctgttgccccacgatatcccaatgagacgtatagaatttagcagggaaaccatttgacccaagcgacttcaactgcgacgtctcccaaactatatttttaatctcctcccccgaagggattgctacaagagcaacatgctcctcattggtgatgcacagagacaccaaagagaatatttcaacatcgatcactggcttggtagaagtgaaggactcaataaacttagatctgaaatactccaccacatgagccctgtcatccacccaatgagtaccatcttcttagatagcccaaataaaattcttctttcttccaacaactatggaggcatggaaaaatcaagaattacgatccccctctttgagcgagagctccctagatttttgtttccagatagcatcttaacgtgcctcaacatcatcaatttctaacaacaacgcactctcaattttagtattttcatgggacggggcccgattctaaatctaagtcaaaagcttctctaggaggtccagtatcttcctacagattctgaagcattctttgttccatttactgaatgtagaagccgtacatcaaagtttagaaaaaaggacatagttgtggtaaccatgaaagatctactgctaagcctcaagaatgatccctttatagcctccatccatattccaggcatcaagatactaaaaaagttccttaaaggtggcggtatccattatggtattaagaacaacagtcgagtgatcagaatgcctaataggatgatttttggtggcagctttggaaaattaagtgatccaatttgtagagcactcgatccaatttatcctgaacaagatgattccagttttgaccattggaccaagtataaagggcccacaagccttcgaggtccacttccccacaatcaaacataaaagtacgcaggccacgcccttcactttcacaaaccgccctaccactgacttttttgttcaagttgaggatagcattcatgtcccccatcactatccaggcatcattaaagccattaacaatcgaagtcatcaactcccaaaaccggccatctctttcgttccttttaggttatgcatagatgaagcatcccatccaaggcttcaagctcctatcttcaccaaatctcacgataatcttgtctatattcagagaaagaatatgtatatcccatcccgctctccaaaaaagagccacacctctagaggcgcctaaagaggagaaggccacaccattaatgaaacccaacctttgccaaatcccttccatatcagagtcatttcttttcatttccatgtgaaaaaccacatccggaatcacactactaatcaaagatcgtagcaatttaattacctgaggtttgccaagaccttgccagttctaggataggatcaacataagggattggggttcatgtttcggcccgcctctcggctaaaaaaagtcctccctgccttcctcattggcaacacctttatccccagcgtaagtatcttccccaatacccttaattccatcaccagatttctgtaaggaatcaaaagccaaaggagtagagcaagagggaataataaaaatattatttataggtgataataacttatctttttccttagacaatgcataacaactctttttagttgaacccgagtccacagttccccgaagctaatctttgtccaagcaaaatgagtccatctccaagtgatccaatcttcttttcttccccgggctagggccagcaataataggcccaaaagacttttgtaggcccaatatatcttttctcacaattcccttaagttttgtttaagacttttttttgctgaattgttacttaggtcaaggccacttttgaagaccattgccaagtgtctaatttgtgattttatgggccccggtgtgtcaatcacgtcaactccactatcattcttcgtacgagcagtagcacaaccctcaatcgtactacccttatgcatggctagaatgtcctccactcccacgtccaccaccttgataggccgaggagtatcaaccataagccttagctcaaatttgaattcaccgtgatcagctgctcatcgggctttgccatgatggactgctccctgagaaattcttgatggatattagtgttaactaaccctggttcaaactctaaaatgctgccttgagggggaagctcttctcgcccagccacctactctgaatcccttccaaattttttgacagcaacttcctcttcaccaatcctcaaattattatcatcaaactccctcgcagcctcttctgccataactcttttaaagtagtgtttcaattgagagccaaatctaacccaaggaccatacatcgacaccgtatggttgaattcattcgagataaaccgtcttcttcgcttacacccaatctcatcatggacaactattccacatttgaaacaaattcttgggaggttttcatatttgaaataacaccaaagacttaccccttcctccatggggagatgaagacccactcgcaatggttttttcagattcagcatcacacgaagccaaatatactctgtagcaagaaactatgacaccatatacgatcgatgctaatcacaccaccaatcctatttgctatagcaatagcattcttcttagtgaaaaacctagggggaacatcataaactgtgacccaaatgggaaccaagtaaaagttcgtagagttctacctaccatctacatcaaatggttttaagatcagatggccgccacaaacagccctacggctcctcgctgagacaaactccacctcactcttctttttgaatctaagcgtgtaggtattcgacgccacctctgacatgctccatccagcggacaacctccatttctgagttataacagagcgtaacaaagcctggaagatactcttggtagaaataactctgccaatagctgacctcactatgaagtcagagccaacctcaccgtcttccccatcctattctagggaaagagagagtgtatccttagacatacattcaaccatttccattatttctttgcctttgctagacgcctagcccaacaccactaactaagagcaattagaagcaagaccaataacgagaaatcaaaagagaataggaatgcacaacggtccaagatcactcacaaaggatcaagatcacacacaacagtccaaagatcactcacagaggatcaataatgaaaccttagacatgttaatttgtgaaaagttcatttgtcatttttttgccatgtttttttaatttagaaaaaagtcatgttggaaaattatagatttgaatttagtcataattaattcataagaatcaaacaatagaattaaagattagcataagcgtatccaaattcataaaattgatattagaattgtatgatttctaattttatatcaaaattctttagagcctctgttatcttgatgatggggattcatgactattaaatggtacgatacgatgcaaaatgagggccgatatctatttattaataaatgtaaaaagagtaattaattatttattcactatttttaatctgacccctcatcaaataaaaaattatcttaatggtatctacatattaaaatcatgacaaacatgcctttaagtcataaactttattccaaaatcgaccacatatatttgacacatttatctaatgactcagtacacatttttatatatataattgtaacccaaaataaaaaatttataacagtctcaccattgcatatgtactacatactatgtagtcatagaaaaattgtataatttcttttatttcactctaataagaaaaaatagattcttttatgtttgatagtattactacgtatctttccttttattttagcataaaaaatacgctattttcttctaaatgtaaatatccaaaaaaaaatattctttggatatatcgataatacttcaatctatttctcctgatattgccaagattattatattccaagataaagttgtaaatatgttgaatgaactccatgagagattcaatcattgagatgtgactagaatttttgagctctaaacctccatttctagtctcaaacaaggtgttctaatgtcacttcctatttcactcgtctcaagtctatttaggttgaaatctgtgagtttcaatccttctccatgtatctgtggttgcacctataaatggtgccatgaagaatatgcaagactgttacaatcgagaccagactatacaatttctcatgggactcaacgaatcctatgaacaagttcgagctcagatcctactccataacccagcctctcatttgtctactgtttttccatgattgtttaaaaagaatgacagtgaggccttagaagcaaccctctcattgttgccacattcgcttcttggacctctgctccaaaagccaagaaatcaagaccaatgtgttcaaattggaagaaactagttcactgggtcgataaatgctacttcctccacaaatttcccctgaatatggagatacaaaaaaatctaaagaatcctccaaacttgtgatgtaatcaaactacttccacttcatctcccacaagaaagctttcttccatgactgtagatcaagtccaagagctcatcactttgcttagccaatccctcgagcagtcatccgaaatgcctctcttggcgtctaacatttctggtaacattcataccctttttggattattgatagtggtgctactcaccatgtttgtcataatccaaatttattttaatctttttccaacaaattattcataaataatgttaccttaccaaatggcaaccaagttcgagtaactggcattggcactgtcaaaataaataatcatattacattacatgatgttttgttcatccctaaattctaattaagtattctttctgttagtatctttcttgatcactccgttatgcacatgttttttttttttactttttaatgcttgttttattcaagaatctcctcagactttaaagattgtgattgctaaaaggcttcgcaacctctacttgttgcctcatacataatcaaatgtctccattttgtctataaatgcttgtaataatcttttgcataatcgccttggacatcttgcaatgtaaattactaaacagtgaacacataaataaagaactttcctttttcaataatacatctcactctttttttttgtccaatctatccattgccaaaacaaaaacaattacctttttaatcatctaatactttatatgatcattgctttgatttagtccaccttgattagcattgaaggatatagatactttttaacaattgttgttgattcctcacgacacacttggatctattttctgaaaataaatctgatgttgctcgaatcatttctgatctttttatgtatgtggcaacaaacaaaatcattcccaaagatggaatgaagcctttagccaaaagggtaggtatatatttgcacaagatcttctatatagaaaagtttgagcctttcctaaattgggccctccaaatgctcttccacaactcctccgctgccccatatgaggtgtcaagagtagatatttaagccaacgtttttgagaaagagtccattcaaagaattacgccaaattagagtatcattaatttctgtaggagaaagtttctagtccaacatcaactcaacaaaagctggcctaaaactagtactcttaaaaacagttaatatctaaaaaatattttacatcaacaagataaaaaaatcataaaaaatgaatatacaaaaatgtaatttttaattgaaaaaaaaagtaatatattgtaattagtaatttgtaactcaatattgaaaaa

SEQ ID NO: 184286 - DNA, 5413 bp, Cannabis indica
gatttattttttctaattgcattttttcatttatttacatatgcttgcactgatagtgatttctgcttatagggttcttcaaatagaaaaagttgcatctacaaatatgaacagagagagcagtcgttcacatagtgtatttacctgtgtgattgaaagtagatgggaaaacgattccacgaccaacttaaggtttgctagactaaacttggttgatctggctggatcagaaaggtaaggcaacatcatcagtcttgcttcagtttgtgattccaagaatttgcatgacactttcctcactcaccaacttcttcccttccctgtaacaggcagaaaacttctggtgctgagggtgagcgtttaaaagaagctgctaacattaacaaatctttgtcgacattagggtacttattttcttgttacattgacaaagcttgatttttgagacataatgatttttttggatatcagtctttgttatttgctgtctttaaacatggacctatgcattttcagtcatgtaataatggttctagtggatgtggcgcaagggaagccaagacatattccttatagggactcgaggcttaccttcctcctacaggttaatactgttttgtgatttctttaattagcactgaatagctctacattttttagttatgactcgtaatgtttctattcaattatttaaaatgtaggactcactcggtgggaactcaaagactatgattattgcaaatgtcagcccttctatctggttagtttcatctctgggaattacagtaccttagtttcatagctgacctttaattaacacatgtatatttttttttcagctctcaagctgaaactttaaacactcttaagtttgcccagagagcaaaaatgatccagaataatgtaagcttctttctaatcaatgcagtattatttaatattttgaaggcttggaaaacttttgagttatacttttaaaatttttttcttcattgcataggccgtagtgaatgaagattcttcaggagatgtcaccactctgcaacaccaaatacgacttctaaaggttagagaaaaatttgataattcattcattgcctgtgccatatgtgaaatagtatgatttgaacatcaatggctatgattgtaacaggaggagctttctattcttagacgtcagaatgtatcgagatcctttcctttggtcttcccactgttgaagatacgagagcaagacaagagcaggaaagtggttttccaggacatgtgtgtgacatggatgtagaagatgacgatttgctgaaaactgaatccaaaggcactgtgagaatgtctactaaacaggtatgttgctttgatagtttttatttcgatggactttttgataaatgctttcgttttcttttctatacatgcacaataaatctggacatcaaatgaaaaataagaacttagtttactttgtagtttgcttaactgttaattctatcaacagcaagtaatattttctgtagatatcttgtattcccagttacatgtggtaaaccaatgatttattacagctgaaatgtttggagacaactcttgctggtgccttacgaagggagcagatggcagaaacttgcattaagcaacttgaggctgaaatagagcaattaaatcgtttggtatatatatctagtgtgccattttttccttttcagaactgtcatttggattgtgttttattattcctgtatttataacttgtcaggcacgtcaaagagaagaagacaccagatgtactaagatgatgctcaggtttcgagaagacaaaatcagaagacaggaggcacttgttaatggttctattcctgctgagatttatttgcaagaagagacaagagctctatctgaagagattcaactacttcaagctaagctagataagaatccagaagtaactcgatttgctttggaaaatataagacttttagaccagcttagaaggtactttttgcaaacctcaaccatttctagctgttaaatcaattttacaagtttcattattatggcattgtagatttcaagaattctacgaagaaggagagagagaaatactcttgtctgaagtatccaaattgcgagatcaggtgtttaaaaatataaactaaattattctttcttgccagttgagttgctttatggggcttgtgaaactaaagatgatgcatttgtttgcagctacttcaatttcttgatggaaactccatacatcatagttatcaaaattttatcacagaacctgaggtggcatacttttctcacctcttctattattcaagcttctcatctctgtcattttgtttgtggaaatatgggtttcagtggaagatgatatcatatatagccctttttgccactttcctttcatcattttatcccaagattcttattttaatatatattatatatatatatttttgacacaggaagccatttacatgaacaagaagaatgattctcttactcaagaggtatcacctaatcctttttcgaaggaagttacatattagttatatacttgtagctcatattttgctttgtaactggttgtagttggagaaaactgttaatgaacttgaggaatgccggcgcaacttaaaagcttgtttggatgaaaatgcaaaactcagtaggtgagaaaatcgttgccaagcttcaattgagatagtcctccagttagaagtggtttatgttaattttcacttccgatctcttataaattgctgttttttctggaaattctgcagggagctagaagatgcacaatcaatgttgatcaatgttaagcctaagccttctaatcaagtagatagtgttaagaccacagaggtacatacattttttaactccaagtatatagctcttgtttgagtttttttaaatactcctaaagaagaaataccactgagacaaggaaaagaaattagtctcattggttgattgtctggaccccttatgagctatgtttaggttattaagtgttagcttaacatttgtttatatctaaatttattaatgggaaataacattattttcaggattcacaagatttaggatctctcaaacttaatagtgctgttcaaaatcaaatcgaggagatggaggcaaagcatgaatccattatgactaagaatgcagaagaaattgttaacttgcaattggaattggatatactaaagatcattttcaaagaagtttcagagcaaagagtaacatgcttaaacaaagaacttgagcgtgcaaaagaagatttatttttgacgatcaaacatcatgaagacacaaagacagaactgatggaagctaagtctgttattgaggctatggagtctcagcagattttgtctatcaacgaaatggaagacctaagaaacactaacagccgttatatgcagcttttgagtaaatatgaagttgaaattatggctcttcaagagcatcttgctttgaaggagctaaaggatgtctcacctacaaactgctccaagaatgatacttctttgttgcaggaaaaggtgacgagaatgcaatgttcccttgaaaaggccaagagactgaacacatggtaccaaaatgatcgtgaatttcatgtctctaatgatgaagaaatggatcaggttcgctcacaggtagaagctgaaactgctgaggtgattgtgtgcatgcaggaagagttggccatacttcagcagcaagtccaggatagtcatttgaaagaagtagagatgagaaggaatttaatgctttcagaaactgaattaaaggaggttgatgaaaaagtgaatctcctgatcagagataatgggagtttaaatgcaaagctaaaggagaaagatgcagaacttagaagtttatctgaagaatggtctttgttaactactgagatagaagcaattctttcagatgggtgtgagttactcattgatgcttctgatcaacttgaacatatatctaattcttttcctcagaaaggatttggatatcagaacatgttggtaggatggtaagaaccatatctgaaaaagaattattgattgaagaattgagaagatgtttagaggatgcaaacaacaaacaaagtgacgtagagagtatgctaaagtcactgagaggagcagcgatggttatcactgaagctcaccagcgcgagttcagtgaaaaagagaaagacatcctggccttgacatcactgctgagtgtaaaagcatcgaccatagataagctggaaaatagactgaaattacaggaagatgagctaaaaaaagcatcagtttgtgcaacagttgcttttgtcattgtcaacagattagaagaagtgaatcatcacaaccttgatgaattacagcataagaatatccaacttactagatcagaagaaactaacatgaggatggatgccctcctctgtgaacaggctgttgtggttgaagaagcagaaaaacagatcatgtctttgaaagcagagcttgtaaacttgaaggaaatttcatctgatctaaagcaaaagctttctgatgagcaaaaacgtaactattctatgacagaaaaacttaaagatgttgaagagaataatatattagttgcaaaggaaaaactggctgagctaaaatatggtgtttcctcactcaagtcatgcatgggcacccatgtggagcagtatacaagtcttcaaaggaatagtccacaggaagatcgtacatctttcgatggagaaggtgcaggctgggtaagttaacatctttgtattggttgaggtcctttaattacggatgcatgatttatagttcctaaacctgaatattcttgcagatagataatgaaatatatcaagatgatgaagttgactacgaaatcgttgaggactcaggaaccgacatctccaagtcttctcctgacttagggaagaaggtatgttttcattcatgtgatcaggataagttcaagtctttcccttgtgaggaaaaatgtgatagggacactactattattcttctgagaagggaaatggaatatgcccttcaaagtttacaagaggtgcaggttgagatggaaaagctacgtagagagaataaagacatactgaagtctgagcaatatagtcgcaaaagcatgacatgttttacaaaccaaataagaaatctacaaacaactttgactgactttgaagttcaatccaaactgaagatggaagttttgaatcaacggctagaggcatctgaacagaatgtggtggaagctggctcgcatttgtatgaaactagagaggtgattaaagactttcatacctctaattttgggatgcctctaattcttccatattctactgagtactgaacattgttttgaatattatttaaaacaaataata

SEQ ID NO: 184287 - DNA, 1015 bp, Cannabis indica
ttacttggtgggctttctcttttgtacattacataattacttttcctgtttgttttcctaatattcttatgtttggactaagtattcaaaatcaataggtcatttgtatgattatgtgaagatttctcaaggactaaaaacaagagtgaagcccatttcttctgttagctataagtgaacttttttgatagatgaggcatttctaggatttgtatatatgtagaataaaattttaagatgagaagtttgttaatctggttgcatgagatttaggatttaaaattctgtttctttcatgattgtgtaagcatgcgactttgactattgactgatacaaccagaagtaatggtaatggagtccattggctattagtatcagtagcagtgatagtaaaagatgtggtcgaatcaatgcccatcgcattttcttttgtgataatccatcatctatgtgattataattatgcacgagatctagaagaatgtaaggagatacattttgtattatgtttggggtgaatgagctttcttcttcatataaaagaaagtggcatttctatttttggtctaactaatcttttgattttggttaattgtcaaggaaatagttgtagcatatgtgagacaaattataggactaagtttacactatatcttgtcaaggaaggaaatggtatatgaaaagaagggaacaagtaacctcatgtaggaattacactaatcttcagatgaagcatgtttttgaaaagaaaattagggtgtatgattgttagtgcagtgatgcttgtgtcaaagttcattttttaacagaacctctttttgtcaagttttcttatctaaccccttaccaaatttttatttattcattgtattgatacaagcatggcttaccttacccctagtattggtgtagatttttttttctccagagttgcagttgtcttgaattgataatctgtgattctagatatagacgatgggtgagcatgtatgtatggatgatgtattttgactg

SEQ ID NO: 184288 - DNA, 1125 bp, Cannabis indica
taaaagattttctatttctttaaataatatgattacatagaatgattttatttagggcataaaacctaataattaggaaggcacagaagtaggtaaatttaaaggcgagggttaaccatactctgtcagccaaaaaagtcaacctttagggcaaactcgacgtttgcacaatagtgaaggtgacttgaagctcaaaatctgagttcttcttccaacatttccttattcattagctcactattattgtctcactaagatacacattataattacagaaactgtcagaatctaaagtcaattatactcagttgaggcttgataataggaataagcttagaaaaaattatagttcattccactgagatcaacactactggtgctatggccaaagcatctttaaactatttttttttggaggagagagcgattacctttcaagataattaaggaatcgtggagatgccttggcaaaaaatgtatacttgacatgagcctattttggagatgaggatttaaatgaaaaatccaatcacagtgaagagctcatcaactcttcctctgactttgatgatgacgagctcatgatctcatcagttttgaaaggcagaaaatattgtgtgtctgaactcccaatctcattgactgtatcaccttaagtcaattcttatattgtggatgatcctcctaattaggttatcgaccttgaagtgaccaactcttcttctaagatgtggcacgtgactgttcagagctcgatcttcacaatgttcctcccatggaagagcttcaaactcttaagtttacttagttgcgcttgtcatctcttctctcctcctcctatataggttttttttactcattctgtatgttttgcttctttttatccatattctttgctttcctagctcttgaattactgctttgatgacttgctttaatattcgctacttctttgccttttcatccattttgccaattttcttatacataaagatggtgggaacgttatgcatgaacttatttattcatttccacgcttgcttttaacttatcagtttagattgttctgtacttctaaactttacatgtttcttttctgctagtggtctggattcatcgttcttg

SEQ ID NO: 184289 - DNA, 3576 bp, Cannabis indica
accattcaagatacatgcatacccaacagcataagtattctcaatttttaagtgttctcaattttaattatttattttttacattgtttaggcctggtcgagagagtgacagtgaagcagaagattttgagcatgctgaaaaacttcgccaagttaaagctgtccttgaagaggttccatagtagtttgagatttggcatttttctttatttacttagctagttctaatgtgatccaatggcatagattacctgtgtgtgtgtgtgtgttgagtcctaaattcattacaatataccattgaactgcttctaatcatttgcgaattctaatttttaggggggacatttctctggaatttatagaaaggttcaattaaagccactaaagtgggttaaagtagcaaaagctaatggtgaaggcgaggaggagcggccagttgaggctttaatggttcttaaatatggaggtgtcctgacacatgcaggcaggaagcaggtgctgttgtattacttttatgccttgcttgtttgttatgttgtagttatttttacttatcttacttttcatttattttcaggctgaagaacttggtagatatttccgaaacaacatgtatccaggttactttcatacttactggaatttatgcaaaaaaatttcttgaacatattttccttggcaacatgtgtcctaggtccatgaaaactcatcttaaattggtcacccttgacccaagagtaggtggttttctctcataaggtttaaggtttgagtctatcgtgagttgtgagtatctatgtagcaattactattgtgtcatgttcctcaatacggtagggtatgacaggaatcctagtttcagtgagataaagagaggaacagctattcttgcaatatatctagatacctgatgattttgatttaggcaagaacttcagaagaagtcagcattgtgtgtcatggaggcatacacatttttatgttttcaaggtcaattacagtagcatttgattactaatttttttcttaaggtactttttcataatgggtcttttatacaattgcaggtgaaggaactggcctgcttcgccttcatagtacgtatcgtcatgatctaaaaatctacagttctgatgagggtcgtgtgcaggtacaccgtacatctgcacgagcagtttcacatccttgttcagcttttcaaatttttaaatcaattttttgttgctcgtattgatgattgtaaacttggcaacttcaatgagtaacccgatttttaatccaattataaacagatgtctgcagctgcattcgcaaaaggcctgcttgatttagagggtcaattaacaccaatcctggttggcttttatcttaatgctgtatttactttcggtcattgaggatttagaactgagtctgactgtatcatatttttaaaggtctccctcgtaagcaaggactcatctatgttggacggacttgacaatgccagtgttgagataaaagaggccaaggttgctatgcttattctcattactattatcactgtgtttcagagcttagcaaaagtgaaaaagaaaaaataaaaacatatacatatgtgtgctgttaaatattacgtaatgaagttatttgaatttaattgttattttataattcttggatttgatcagtgaactattgttcagttagcttcaacctgcatagaaggcagcgcttttcagcaatccagagtagatttacaaagcaaatctgattagtttattatttgagtgatcagattctttgtgttacaacatattttagcgctaaaagttgtattgaatatcaaaaaatgttcttctcttcctttattttcaacattggtccagaagtacataatcaatcttcctaaatgtttttgtgatatgctctttcccatttagtaattctttctcttttgcattatatgtttgcaggcaaggttaaacgagatcatcacttctaatgttaagacagcaacagctcacagcaatggatcaccttcatggatggctgatggagctggactgccattcaatgcttttgaacttctaccaaaattggtacttacttttatgatgctaggaagattcttgttaaacatttatttcacggctaataatatatctaaattattttgaattgattcataggtagaattgactaagatggttacagaacaagtaaggttgctagctaaggatgaagatgaagaacttactgagtctagtgcttatgatgtgattcccccttacgaccaagcaaaggcccttggaaagacaaatattgatattgaccgcattgctgctggattaccatgtggtagcgaaggatttcttttgatgtatgctcgctggagaaagcttgaaagagacttgtacaacgaacgtaaagtgtgagtctgtattatttctactttatctttttcgtctcactcttggatgtggttttgcaaattcttgtctgtttcctaataccgttttttcggattttaagtggaattaaatgaattccagaagatttcatcttctcatgtttgaattttttttattccttaaatgtagtatcatgctataagaaggaagtctcttacaagatttaaggaaattattttatttactattctctactctttttcctcctaaaagttttccaaggattaagatccaaataaggcctttatatggggcccaatacaaagacgcgtattcttttggaacattttacttttcaaatttgtaattttttaagacaacagggtttaatctaaataagccttcacttttgttgaaataaattttgatttctgaagccaagattattattcttaaatatgatacatatgctgaatcaccagtctttgatattatggatttaaatgcaggcggtttgatattacacaaattcctgatgtctatgattcctgcaagtaagttacctgtcatcattctgctttggatgcttggtgttggtgcttttacatttttggggtgttaaagacaaagttgtccacatatttttctgtcattctattcacatgggcatatacaatttatgatgtcagcctgatattgtttaacgttttaaaatgcattcgctacaattattatacatctagataccatcttctttaggtctttaaattctattatatatctttagcctgtacaatctttactgctcttttgtacgaagtgaagaaaagaagcagtttagatcagatctttcctatgctgttgctaaaaattatttgggcctctttcttttcttttttttttttttctttatcaattaaattatttgttgttttgaatggtcacttggcagatatgatcttctgcacaatgctcatcttaatctagacgggttggatgagctcttcaaaagttgctcaggtatggaaacaaagctaacagccttcatcattcttctctctcagaggaaaaattcacttcacaagaacaaaaaaaaaaaaaaaaaaaaacgaaaaacaagaaaaaaactacgactaagtagcaacaattgtgtatgtaatatgtgacatatcaactattagat

SEQ ID NO: 184290 - DNA, 2184 bp, Cannabis indica
ttaaatttggatgatgagcagataaaagaatttccgaagaaagtaatcctattctgcgagacaccacccccagaaggaggagaaacaccatttgttccaagtttccgggtaaccgaacggatgatgaaggagttcccagaagctgtggaggaaatggagactaagggcttaacatattccttcattgctctaagcaagaacgacatttcttccatgagaggtagaggttgggaggacacttttggaacttcagatcgtgctgaagcagaacgaaggtaataacatatatattggtcatcttaattaatttggaaattcaattacattttctcttttatattttcttaatccgatattgatgagtcccacttatcaaattataatgtaatttgattggtgcatatgcatgcaatatattgcagagctaaggctctaggcatggagatggagtggctaccgaatggtggtgtgaaggcaatattgaagtcaagagggttgacgaaggtttttgaaggaaggaaaggaaggaaaatgtggttcaacactgtagtaggcatgcatggaaaagagcatagctcagctacaatggcagatgggacagagattccacaaaatgtggtgaagagatgtgaggagattattgaagaagaaagcattcaattcaaatgggagaagggtgatgttcttttctttgataactatgctttgctccatggaagaaggccttctcttccacctagaagggttttggttactacctgtaaatagtactcaaaactactatatatttgatcaaattaagctcatcaattgcatcttcgcttaattttatattattgaaggaatccataattcgactttatataataaattatatgaataattctccatttgttaagaattgcatcttaacaaatcaccatatgagcaattgtatcttttcttcaagttaaataaagatatttgaatttgaatttgaatttgaatttgtctaatactataaaactatatatgcacacacatacataggatatatatacaggatttttttaaggtggggaatttttaaaatgccctatttgtgaggatttattataaaatgggtctcattacatttatgtggatataaaagggagtatatggctactacaatgtggtacattgtaggagattggtattaatttataccttggaactcacttatttaaagatttgttttttttatttgaaaaactcatatttttttttttgagtgagcattgaatgcttgctgatattgacggcttgtgagcattaaattttatctgtgttttggaatttcggtggaaatttttgaaaagtacttgaggaggagaaatgcaaagcttcaggtgtaggtaatgatttctctacactttttttctttacaaaaaatcttaagaaatcttggttgtgcagtctaaacccacaactgagtgattatatataggggatcagaaatggatcttcaacatgttttatcacctaaggttaggaggaggttctttgatcgattgaagaattttgagcttgtgtgagttgttgaagacgatggcatgttagttttaaattgtttcctctttattaagtttcgattaaagtcactgttcttaggttatgttgttgaaatagattttttattttaattttgagtctaaaagaatgtgtttgatgggtttgttttgatttattttatatttttgaacttttcaatttaattcctagttctttgcattctgaattttatttgtggagttcaagttttagtttgaaacaaaagtcatgtgtgttccttaatacaagctagtgtttcattcatgtgcttgtagcttgttgaatggattggtcattagtcaagttttagtctttgtttttgattcattgttgagtggttagatttaagagaaaccagtcacctttatgtttgatctttgtattcattaataccgaattaaaggttcaagctttgatctttgtaaagaatccatttacttagtgttgtatttatgttgttactattttgtttatttgttttgcatgttttgttttcttggtaaactctattaattttagtttgaagcttcatttttgtaaaatagctactatgatattcagacctggctcggcaccactacaattttgttcatttgcggcgcaattattagc

SEQ ID NO: 184291 - DNA, 3167 bp, Cannabis indica
tgatttatttataatctgttttttaatatattttacttttttaaaatttatattattactatatattatccataacataaaaaaaattaaaactaaaaaattaataaatagtaatactctacaagtaaaacaacactattcattactcaacaatttatatttttgacagatttatttcccttctctattttaaagaagctattaggagtgctctaattctcgctaatattgcattagcaaactatattctaaaaacgaataaaatggggacaaatatgcataaataattgcaataactcgaaatattttaagaaaaaatcgaaaaacaaaactctacaagagtaataatttgcgaaaaaaatttgtatccttaataaaatatttatacaagataaaaggcacatgccatatttgctattttcttttatgtgtatacaattcataaaaaaacacaaaaaaacatttaataagaattaaataaataaatgaagtgtatatgaagcaagagcttttcaaatcattccaaactgtatacacacttgcaagaatcatcatatcaatttttctttttctttttcttttttctttctttttcatccaaccccacaatgatttactacataaattttcaatttttcaatttccctattacacattttttaggccttcacctcccaatcattggttttgactttttgctttctttgacttgctcctctcctgcattttcttctttttcgcttcggctgtaacccaactgtactccgatggaatcgcaaaagggtcttggatagtttctatcctactgctcgacatagcgttggatgatgcagaacggtgtaagggagctttaatccattgaaaccacgatgaactcgaaggctgagatgatgctgcagcagctggactttctcggccaacagcagatggacttgacgggggtgttgagaattcgtccacgggagctaactcttcaaactttgtgaatgtcaccattactcttatggttggaacaacgggaatggcaacctgaacatggaaaccgagaaaatgttatgtcatatcgcgcttatagaatcaactcgcccttgtaccactttggtctcaagatcaacatgaacaatcatatcattatcataaccaactttcttaatgcaactaacaaaagtgattcaccatacactcaatactagtttaactacaattgaaatcttagtaaactcagcatatgaaaatagcaaaagcaatgaagcaacataagtgaataataataataatcgaaatcttaccttgacagggaaggttcccaaaggcagtttggttgttagaagctccctcaatcgacgaattgccttaaccttatcggctagaatatcaagcaatggcaatagctcctctgtttgaagtggaaagtttggagaaagccatagaataggcctcaatcctttcttatattcgttctctcgacctacatccttgtggcgatttctgttctcagaagagcttgtggaagacgacgaagctttggtattatccctcactcgtcgaagctcatcccctctcatatgaatctccatagaatgtcttcctggcttaatctgatttcttgatggggaatcaccaagcaaatcactcactttctcctctacacaaagagaatttcttggaggagcgattttcttcggggtttcaattttagtctcctttttcctccatccaccaaaccatcctttcttttcttgtttaatctctacatttctacaaacattgacatcttctatatgaatatccctttgctcgtaagagctatggcgatgcccaacaatcccatcgccattctcaacaggcaattctgatgaatccaacttaagtgcaacttcaagttgtctcttctcatcctcagtcaagatatcatcaatctcttcactatctggttcattatcattgcaagttgcgaaaaattcatcatcggtcattgcccccggtaccctcctagattttatgctcacaactacattatgcatatcatacactttcgccttccatgctccaaccatctccgttttctcttgtcgtctccatgtcaattgaggcaatagaactgcctgagttacatcaatcccgggcctgaaaatgttagtttgtgacatagcaacaacttcttgacgaacctcttcttcggttgctggtgaaccagcaccatccaaagcattcataacctccttatccttgtgtgagatcatacaaagtgatccaggagggaccttaccatcttcagaaccatcaccaaggaaaacaatactctgatcagaacgttgaatcctaaatccatcaaaaccagccaatgtcatatctgctctcaaatttgcaccccttttccaaatcttataagtatctgaaggggcaatcctagaaatgaaagggatcactgaactctcaaaatgaaatgtaatttccatataaaaatctctcatccttctcatagctccaaccaatctaggcaaccttctacaccatttcgcccaagctaaaggctggtaatgcctaactatacacattgcaatagcttcttccctattacaaatagcttcctgtaatgcactccaaccactctcattctgcaagctccaatctgcaccggcaaccatgagcatttcggtacaagtctgatccccaagcttaaccgccaagtgaagaggcgtgtcgcgatttggcacatcgcggcgatcaatggcagccgaaatagcctcagccttttcttcctcagctaaagaaatggcctcatttcgaacctcagcagggtcacaaaggcgcggtagactagccaatatcttcctaagactggcatagtctctcatggctatggccttatgaacaggactatgagcatattttgatacatcaataccagccattcctattcctcaagagaaatgtagcctagtatatgtgtatatataggttatatctatatgctaggcagcttaatgtgcggaagaacaaagacccagttcaatcatttaataacagattgaaaatcactcaaaatcccagaaattatatcaaatcaagagttagagacaaaccccacttcacaaatttgagatatattcccttataacaaactcaattcagattacaacccaaaaaggcaaaacaccacaaaa

SEQ ID NO: 184292 - DNA, 4623 bp, Cannabis indica
ttttttttttttttcttaaccttccaagtgtatctctttcaggtctaggtctacctacaaaaataattgtatatgtatcaaaataaataaattaaagtatgtacatagcaataacaatgcaaatataaatgattaattgaagataatctctaaataaagtgaaaatttatgataaagataacatccacaatctattttctgtttcgaacaaaattgtactactgctacacgtatccgaaacaatgagtagagtttagttgaaagattgaatttataaacgtgtggcataaactataaaatacatatatttacaacattatacagaaacaattcaaatataccaaagcttagcatgatgtaaactggctgtaatagaagttacaaaacgaggtgcttataaaaatgaagatctttatgagttcgtatgtatgtagaggcgtcaatgagagttacttgtgatgacctgattgggatcaagcacaatgcctctggctactccttgtcggcctaagatacctctgcgtggtggagcgggtactaaagatactactggatccacatttggaggtattggagtttcatctgagtggccagagatgcatagattaccagactcatcttggtcccagtatacttctaccatattccctctaagattctctgatgtttctgttcctggaatccccacgaacctagctccaactggtatctgcattaccaattgtaccatttttatgcattagtaataatgcttccaatatatctcttttgtaaaacaaaagacaagcagtggcttacctcaattgatgttcctgaagttgtcaaagtaagaggaacaagtctaccctcggctgttgcactttctagttcggcttgctgtgcgatatttaagaaaacttcttcaagagttgtgagacccagttgaatgtcagctatcccaaactcacttactctatcttggagctctttgaaaaaattctgttcaacaatatatacccaaagaagcataactcaagctaggtgaaccactaaggacaaaaaggatatttaaaaaagaaatacaggcaacaagtttgaacttttagaagcagaggaaccaaattataaaggcttaccggcaaaagcacctctctgtcatgaggaatgacaaaggtaagaaaggatttgttctcctcctttggttcaacatttaaatgctgacagaacattcctcaagttagaattgaaccatttattagtaaaataaaattatgagtcattgatttagtcaacatacatgtttaaagaattgcttcacatcctcatgatgagttgtatcaactacgtccctgttgggagtagcttgtccattggtggtgacagaaaagctcacattagctataaagcccgtcccaaaacgtgacttcagtctgattgaggttccaatgcagcgtagcttacccttcgccataattccaatccgatcacttaaaatgtcagcttcttccattgaatgtgttgttaggacaattgcacgccctcttttagcattctctataatatcccatacatgtcttcttgtaattgggtccataccagttgtctacatatcgaaatgaacagatcagtaaactaatatgatcggtaatgaaactgcaacaggaatgaaataagcattgtagaataacagtctcggctacatacaggttcatccaaaatgactaattttggatcaccaataagtgctattgcaacactaagtcggcgtttcattcctccgctataactgccagctcgtatgttggctgcctcagtgagtttcacctcctcaagtgatttttggataacctgtatttcagaaaagcgctcaagtgaaaatgcagaatctatagagacaccgttgcttaacaatagtatcaagatagtcattatacaatctgagtaccaaaagatgtgggaaaaacaaccacacacactataacaagtgttacatactgattttattgaagatgggggtaggcctttaatactggcaaagagatcaagatgctccttcccagaaagtgaatcccagagaatatcaaactgtggagacaaaaagatggattattcacttttcccaatatttttaaatggtgatcttaagatatccatatattttttgcaagagggtaatgatgtacgctacttggatggtacaagtatcaaatccactatgagacagaggagaggagaatcacctggggacaaacacctatcaattttcgaattttagacatgccaatggagcttcgtacaggtatcccataaatcaatgctgtcaaaatgcaagttaaaggcacagtaagatgacattgaataatatcactaatagtttgataaataaaataaaatgcaacaataatcagaaaattaccatctccattagtcaccggagtgattcccgtcaaacaattaattgctgtggtctttcctgctccgtttggtccaagtaaacaaaacaactgatcttttgcaaagttcacccacaagccctgaagatcatagaaaaggtatactcagcctgttgccatgctaggtttggaaggaaaaccaataacaaaatatcaatattcacctttaaagcttggtaaggtggatttctcttgcatttgcagcaacccatgtttgtagacccaggataagtttttccaaggccacgaacctgcacagcaatgtttgggtcatcaacaccttccatgatttgttgtttcactaagttctcctcttcaaggacatcttcatcatctggggtaatatgctcctgtggtggaagagagcctatgcaactgcaaatgccaccctctgtgaagagcaagcagataaggcattaagctgcaggtatcagtgtacaaggaaagctcgagtaaaagcataatttaagcccaacttacctttcacattgttgccaccttttcctatccagtacccaggatttaaaaagtaaaatacagattttcttacaccagacacattagggataatgttatcaaagtagattgccaacactaaccaaatgaagaatgtagccaccagccaaatgtaaatatcattctgtggatttagtttttttcccccaaatgataaaaataaatcagtaaacgaaatatttggtaagtactaaacattcagcacatgcaacaatgaattctaaactttaagcatcgatgtatttcacttacaattgttatcacacaatcgtcatcattcgcggcgcactttcctctattactccagctgaccccaacatcttggggagtggcagttgcactaacaagtaattgtaaggcttcagcaagaagattaggtgggaagagtgaccaaatgtttctgagtggtttagagatgctagaagagtagggaaatccaaatgctgtaacagcctgcaatgagaaaatggtatttgttgttactaacattatgatgtcttctcttctttaatcttgaaatcattaacaagggaagtgcacctgagttacagtgccaacaataaatataaagaaaccagcagttgtagatgaagatgccttggtaatgaaggctgacagtaagaaggcaacacctagctggtgattcaaatacaaaatagataaacgggtattaaacaagaaagcttggcataagacagaaagtaaaaagaagaagctgtatattaagaagcatagaagttagtcttaccatattgagttggaacagaaagaacaccaaaaatacaacagcaaaactgttgttcaagaagaagtcaaactgaaacatcatgccaacaagaacaataacaagtgatgagataagggcgagaatcccctcccacgtaagccatgacaaccagtaagcagaatcgtaaagacccatcatagacatagcctgcagttacaaaaaataaataaataagaaaatgggtcgttttataaattatctaaaactcctagagtacaggacaaattcatcacctgccgcagttttagttctttttctgtgatcaaagaattcatctgcagtacgaatccaaacatggcagttgccaagaaaaaggacggtcctactgaagccagtgcagagaagatttccagtgcagggtgtgcaaattccttaagtgtgacaatccagctaaagtttggaactaaacatggatgtaaaacatatgtaatactgatacatcagttcatttcataaatattggaaataaaatctttacaaaaatgattaacgaaattgaatcgaatacctccaataagcgaccttgcaatttcacgttccgcggcaatctggagtggaatttggaacttaaatgtggggtcttcgaatgttccacgctttgccagagtagttgaattagtttgaacgccatagctaattacagtagcatttctttccacaaaatacaaagctcccggacaggtcattggatttttgaacagaaagtcatctacttcatttgctgttctaaatgatctgacctgctcagaccaaaaaaaaaatgaaaaaaacagaggaatttgtatcatcaattcatcattcatgtttccttacacctttactgtatagttttttgctaattaaactgtttatatggaattatggatacataaacatataattattcat

SEQ ID NO: 184293 - DNA, 630 bp, Cannabis indica
aagaaaacgtgagctattctattaaataattgttattgtattattatatttatatagtatatggctatggtttggtaagatccacatgaccatggtgtgtaaaataatactaacattagttattagtgaatcttgaatttatgaatgtctgcatataatgaaatgcatgttttgattgttgtatatatatggtttaaatctcaagtctgaaccctgggtacgaaagggatggatttgcaaatgaaatgaaattagcaaaatatcatttgcatatcattttactgtaattgaatttgaagctaataaaaaattaaaaattaaaaattaaagagatcaaaagtaatggaaaattaattagtatttgtattttttagaatcagtcgattcataataatgaaaactaatttacaaatcttcttttaattaaattagtttttattattatgaaaattatttagttgaattggatttcttttctgaagtattcaaattgagaaaataatttttttttctcttttgtatagttaacaacatatttttggttttggcataagacggtacaactcgaaaataatacaaaataaataaatttaggtgacatatttaatttaggggtaattgcggcataaa

SEQ ID NO: 184294 - DNA, 3199 bp, Cannabis indica
agtgttactagtgtgaaaagttacagaaggaaagtgagacaagggaattttagagtgtacatgttctgtgatgtttggctgaggaggacatgttcctggataacatgtctcattaaaaaccacattcctggcaatgtaaatccttcttttgttattttcacacagttaacctttgtgaaaaagatgaatatcccagaagctctgtgaaattttacaaaataggccaataaatagtacttcagatttaaaaaaaattcaaaaatcagttgttctattgtgtagggccagcttaattccgacaatgatatgaatacattaataaatctcttcacgatcccgcaaactaataataagaggtatctcatacaaaacttcatttctttacatctatttaatgcatgttgtgtcccttatgaatgagagcaattattcaagcagaaattgagtattccttctcggacttatcttcagacagttgcaatttggtccactgcgcgcgcattgttattaccatgagggtgacagcttggcatgacagaccacatatcaaaccaatccacaagccctgtacccaaacgcaaacacaaattactagacttattcgtcactatattacaattaccatcagagagaaacaaccaaaaaagcagtaattaattatataaataaataatatgtaatatgtatatttaccttggcatagaattcaaatttaaatccaaggatagctgcaacagtcatgccaatgaaataaaatgttgccaagttcacataaacaaccatatgctgccagccgcatcctctagccacaccttcatttagtggaaggaaaaaagaaatcttaattaaaacccgaaaatttcaagtaaaattaaagtagaaaaaaaattgaaagtagttcctaatcctaatatatacctgataggacaccctgaaaagaatcaacaattatggatattgcaagcagaggagtcatggaagcaaaagattttattatatcagaactgtcactgaataagccagcccagatgttgtgtccaaatcctagagccaacactagtacaaagccaagcagtccacatagcttcaaggtaacgatcattgcatttttagctttgtcaggacggtctgcacctaactcatttgacacccttgtgctgtatatagtcacaatacattgttttgggtcacaaatatgcaaatatatggtaaaagaatagaatttgaaagaacaaaagtttgatctctcccaaacctggctgcagcactgaggccatacaaaatattgtatgctatggattctgtgttcacactgcacaaaaatagccaggaaactactcatcggtcgcaaagaaaggaagaatcagggtggattaaaatgtaacaagaaaaatttatgtagtgcagaaaaagtaccacattgcaattagtgaagtggttacttccgagtttggcatcagtcctgctaagaacaccagaatctcaaatgcccaatattccaagctgaagaaatcactcaagatgtcggattgtgtaacatataatcataatatgtaactgaaggatttgatcacttcaattcttttactattatattagtattctatatttagagtaataaacatgggttctgccttggagaaactgaatttcaagtagaaacaaagtgagcacttggtcacttaccacaccatagttgcagagggaagggcaagtttcaagtttgtgagaatgtaactgaaggattcaagtgaaaatccttgccatgtgagtttaaattccttggagaacatgacatatgcagccaacattaaaaaggttaaccagagtgtgactgatgttgctagtggagctcctttaaaaccaagaggtgttaaatgcaccaaacaatatgtgataccaatgtgaaagaccaatgggattgatgagaacaataccaaaggcctaacaactgactgtgtctgaagaaacctcaaaatattttgaatataaccaaaagcaaatatgctaggtatcagaaatttggtataaagtcctgcagtctcagcaatttgatgttcttggtggagaaagataagtaatggttcagtaaagaaccacaagaaagagataatgattgagaagagggtggatgtgatacaagccgtttgtagatgaatcccaagcagtttgaatgactttgctccaaatccttgcccacatagagtctcaagagctccacttaacccaatctaattacaacaaaagaaaagaacttgagaacaaaaaggccagccatgaagcagctatataggtctactaatctataacgttaaaccatgagctattataacgttaaatcctaattgtgaaacaaagatattttgaattggatattcattacttcaagcctataatcataccaaaaaaaaaagtttaaaatggacaaatctaaaatagcttttgtagcctatagatgacatcaatgtaatatacacggtcgaattgtagaaattacgtggatagaagtagtcaataatatcacaaactacaattcatacacccctttatatgtgatcacaatttattatatcaatttactaagaatacaaaattattacaatattttaaacctttttcgttaaaaaaaatcaaacaaattaatttctaattttaggtagaaaaaaataaaaaaagatattatattattttaagagaaatgctaaagggcacccgtggtgtctagcaccctcctatgtgtcaataccgctattggttcaactaagtatcgggtcccacataatttaatataatagcttttagggagtatcgctagctaatcgcaacacgacatgtcgaaaaggtgctaggcaccactggtgcctaatagcaatgctcttattttaatttatccaagtggccgtatttatgtggtatttcgacacatcactctgtcacaacaagaggtggatagtgtcgtgaggcagaggttttaacgacttttcagtgtctttgagtccccaaagaaaataaaaataaaataaaataaaaattgagtgcaaaatctaaagactgcaaaaacccaaagatgaaagaagtttcttcttctttttggtgcatttccaccacttaaaatccaccttattcttagagattaatcataaaaacagatattaattaaaataaagatagattgaagagagagaggtatgtaccatga

SEQ ID NO: 184295 - DNA, 2946 bp, Cannabis indica
atctattagtatctaaggcacttttgcaatgaaattaatggctactttttcttcatttattattgttaatatttccacacattagagaaaaaaaatggaattttactcattgctatcttaattctgattaagacatctcaatatcctagctttttgatatctccaacaagaaaatcttacccgtgtaacacaatctaatttcctcactaattactactaaataaaatgggtacataatctttttttttttaaatgacataatcattgttatcatataactatgtatttagtttgagggagatcgattctgtcaatcagaatacaacattttttttattttccattttaagggaattagaatacaagattcatcaaacggtaaagtaaattttaggtatacatacctgttgttttatttatttattgtttgaaagagaattttggttgaggtcgttaaagggtaatttatcatagcaattaagttatgtgcagcaaaggcttacacatatatctaaaatatttttccctaataaataactttggatttagatcaaagaaaataaataaataactttggttgttggtagtcattttcataaatgcacagaaaaaacccaaatttataactatgtggataaatctgattggtacgttgttgtttgttgtgcatctttttgcaattatgggttaccctccaccaatatataattttttttttcatttttagaaaaattacatacattcctttcaacaaaaaaaaataaaaaataaataaataagagaaaaatttgtattactagaacatgacatgtggcatcatgtggttagtctccaaaccgtaacgtggaaactaggcgaatcattggatcatctccatggacttattaattattcaagaagaaacagtgaccaaagtccaacttccaacaaaggcaatttccttgttggaagggttctggcatgaggaccccttccacgtttttggtgaaatggataagcttcatcttcatgtgctatatttatatcattcaaatcttaaaataaataagtaaaatattaaaataatatttttatttttttttagaaaatattatttgaaaattaaataaatagagttatctcattcataacagtaccgcgtctttcaaattcctcctcctttttacccttttcagctgtcgattccacacgccttttttttttccttttcaattcaaatatccatccatccatacctgactataaatacccaactatcttctaattccttcctcaaattctcaaaacaaaacaaagcctaaaattttcaaactattcgatcacactgaaattttccttattttcttaatttgatcaactgaaagattttctcagatagaaaatggtcgatttagactggaaagcaaagatggtatcccctgatatgtctagcaagtctccgaaactatcgaacaagcttcatctctccgttcccgtctccgctcgtgccgtacaagccgatgtgtcggcggcttcttcttcggcgtgttcggcttatgaaaactatcttagactacctgagttgaggaagctatggagttgtagagaattccctgagtggaagaacgagtcgattttaaaaccggctctgcaggcccttgagatgacatttcggttcatttcaacgacgttgtccgatccccgtccgtacgccaaccggcgggagtggaagcggcggcttgagtctcttaccaagaaccagatcgaggttatagccatgctctgtgaggacgacgaggaagatgacgagactcgcggtacggctcctattgccgacaccagctccacaagtggtatcttggctcgtgacggtagtcttgccgaggtatggaaggtctacggcgagtccagtgccacagttgttagccggacgagcgaaggaagtctcctccctcgactcgctacttggcagacttcagaggatgttgctcagaacatcatgtattcgcttgagtgcgagttcaggcggtgttcgtatactctcggattgggggaaccaaacctcgccgggaaaccgacactggagtacgacgccgtttgcaagccttgcgaggttcattcgctgaagaagagtccgtacgatcaccaattggagagcaactacgaaagccagacggtgtacaccacgcaacagatccttgagtcgtggattcacacggccggggagcttctccgtcgcgtcgccaaccgaatcgattctagaagcttcgagaaggccgcgagcgactgctacttgatcgaacggatctggaaacttctagcggaaatcgaagatctataccttctaatggacccggacgatttcttgaggctgaagaatcagctccacgtaaaatcaatggatgattcggaacccttgtgcttcagatcaaaacggctcgttgagatcacgaagctctgcaaggatctgaggcacaaggtcccttacgttttgggagttgaggtggaccccaaaggcgggccgaggattcaagaggccgtgatgaggctgtactcggagaagtctgagtcggagaagattcaccttctacaggcgttgcaggcgatcgagtcggctcttaagaggttcttctacgcgtacaagcaggttctgatcgtcgtgatgggaagtttggaggccaaggggaaccgagtcgtgatttgtcccgactcgtgcgattcgctgagtcagattttccttgagccaacgtatttcccgagtttggacgcggcaaagacgttccttggaaatggtttgaatcaggaccatctcgccgggttagatagaagaactcggcggaagcagtaaggttgacaagaggaggtcttcactctgtccactcttacaatttttgggaaatttcatacttggatggaagaaagaaaagaaagattgttatatttaatctactacaaaaaaaaaaaaaa

SEQ ID NO: 184296 - DNA, 6123 bp, Cannabis indica
ggttttattaaattaactccagcaaacaaaacactaaaaatcaaattaatacatcccacgaaaagacaaaatactcaagagcaaaatgaccttttttcccttccatactaataaccactaaaggtcactatggggtactttgggaaattctaaaatcccgacattcctaatgtctaacaatattgccccactatactaaaaacactataatgtgattctaatagccaaacaccacgttccaatgttgtcgggcactgaatatgcaaaattatgaaatttctatatatgacatataaaatgcattctgaattcaaataaataatcataaattaataatttagaattaataaataatttccataattaaattctaattatatgctaatttctgaattaaagcaaaaataatacaatttttcattcttgaagggtgggtaatctgagaagattaatagaatattagaaaacatgctgtagacatatttgataaaggttagattatcttagaataatctccccgtgacagagtgttcgtttaaaagtaataattagatgtaccattggttaggcactcaataagggtggtacgagagaaatatggggcacctattcactagaatgaagcaggtgagaaaagaatacgatagacaagaaagatacaaggaacttataaggttatagagtaaatttgagctatatactcacctcatctagtacacagaaaagcttcgctgattcaaagggtaggaatatcaagtcccaaatgggagattctttttttatacgagtattgcctatgagagggatacgtaggaaggaaagttaaaccctagattccttagacctatagatatttgagtaagtaggccaagcaggctatcagctagctttgattcctgcgttgttcgaagtgtataatgtgtttaatatctccatgctgagaaagtatgtttcagacccaacccatgttttaagttgtgacaactttgagcttaagaaaaatttttatattgggaaaatcttgtccaggttttggactcggaagagaaagtacattggaataagataattccactagttaaaagtgctctagagaaacaacaaggttgaagaaacaacttgagagttagagtcgtaaatgaaagagcagtatcataaaattttcaagtgaattttgaggacaaaatttctattaagaggggatggttgtaatatcccaaagacgtattatgaatatttagggtttgttattgtattatgggttaattaggtagtaatgagaaggattatggtcctactaagctaatttagtataaattatcaattttgctataagtgaataaataaacctaatttattaattacgtagattaatttggaatatgtggatataatgtaagttatttgtgaaataaaaatattttcaggtttggcgaccctggagacccgattgtaggctaacaatgtcacaatgattttagttagtagtattgatgggattcttgaaataaattgattatagacttgtttatatattttagggtactcggagttgacataatatcctaggactaaagatttcttagtgattaagatatgataaaataattattattaataattaagttttattaatattatattattattattattaattttttttaaaacttatatgataatatatatagattaacttttaagaacaaaatttatagaacgaaaccctcccctttccttcgtgtgatgaaaccctcttctccctctattcattttcttcaattttcaacttgaaacctattaattcaagctccaatagtagcgagatagtaaatcattgaagagagaaactttaagggtcgagatcattgtgaatatttgtccacttgggctggccaatatttaccgagattttcgaaaactaattaattagaactggagaaagaaataaaaaaaataataataaacatagggctttttacgtggttcaggcgttaactatttttagtccacgagtctattttattggccttatcagtaagtatgaatattacaaatgtttacattacagaattgaactctatattcctcttgttcctcttgaagaagaagctctcttggaatttcattagagttttagtaagtaaaactttgttcattagactccctagagtcatcccctatctcgtgaaatgtaggggtatttataggcgatctcttcattcacgtgcattctgggctgctcttgctagaagagatccaattattgatctggtaggtggccgctccatcatacggtgtgtcgagataacaacccataccatttggacattccatacgtgtcacttaaagacctttcctttttggaatgcccctacgaatggccgctagaccataggcaagtacgatggtgcgcatgccttgtactatggcctgacgtgggggacaaaaccttgcgtcgtaccaaaaagagcatggacatcacttctgtaatttgacaggtactgacggagctctcctgaaacattgtacggggatacaactcattgtaagtccttccacaacccacctaggcgtacttgaggaactccccagcctccgcagggtgcttggattctactcccaagacttagagatgtcatgtgcattgatactccacgtgttccaaccttgcaaaggaggtatcctttgtgaatgccccttgtgggaggtgggtccgaagccattgaccaactgatgattatcttagcttcctcgattagattctgcatgtcatgcctgcaaaatatggacaacatttactccccaagctttcaggacgatccatggtccgggggcttgcattgtttcctcatgattaacctttgacacgtggggctgctttgtgatgtcatcatgaaatgcaagtggtcgtcagctgatacgtcactgacggaggatatcattagcatcataaactgtcagtgtattaaatgccgaatcttacaattcttgcatgttagggcatgtctcgggagacatcaaaatggtggcaagttgattgaatagacccttcacttaataaacacttttcacaagacgtgtcataatggatgtcaaatgcttgggccaatgcagtcttctcagctccccatccatgagatcttcagatgccattttggtgaatgatctatgtcgttcgctttgtgtggaaggcactcctcctggtacatattaaatgcccacaaaattctcatcaccttttaagtttcaaacttttctctcttctcaccaaactccttatgtcatcttaatttttactttgcaaagctcgatcaatcacaccatcctcagtcgtgcacataaccggacacggtgtagttgagccatccctcgtaacatccttgtcaatcatttagaaagtgttttttattacttgcattaaacttcatacttatcgcaaaatatattgaggctgaaatggtgtatactgtatacgagtctctattctctgaggaggtcgatctcatttgtgtggcctgttgtaaaaagagaaacttggcagtttgatctatgcagaccaacttacctccatattaactgctcatgcagatgctttttgattaatcatgctaggcccaaaaggggacattggttcttcaaatgcagatggcaacaacagtcctcgtgggaagaggaaaaggcaatacactgcctttcttgctacgtcctcgtctgcaccataatcccatgggaaccacccccatcatcatgttcagccgtctttgcaaggccaacaccgcctacacccccatcttctcttcaaaaaatcccctctgtgggattcacgttccccataaaaactgtacttctcgaccacgttgctatgcagaaggaaggcgagattaaaagagctttggatgaatctcttgaggatgaaaagggatttttgcataggcgggctgacatactctcagtcgtgaggagcgccgaagtcttggagggcttccatgcctcagtctcgaccaggacaaaaatttgtgtagaggccccagagaaatgcttggctcccaatgtggggagtgagactgtgccttttgtagtggagcttttggactaagtggccgacgatgggtctaggttgccctttgaggcctgggcaacttgcgtcaacattgatgccttttccctagctcacgctaccaaataacaagcaattgggttagggttttgaacttttctatttcaacttctgccattgtttctacctttcttatttttccttattgcaacaggttgctttgttggccaaaagggccacagaagaggttggcacgctggtcatggagcttcagcatgttaagggtgacaaccgcgaagtgcataaagccaagaagactcttcctgccgaactcgcaaaagccaagactaagattgaaggcttaaagaaagataatcagttgttggaagatagctatgcccaacaaactcgtctcatatggcgtatgagagccgttcattgtctttacaaagagaccatggagaggatgccaggggtaaaatcttcccatcaatctagtagcacccacctctaagcgaccggcccaggtggtggtccttcctgagactaggattgttctgtttctttcaataactgtttccttctttaactttctcattttgcggagaaaatttaattgtgccataaatgcgggggcatttgtaataactttatgactttatacctttcttttaagctttactcttgattcgttggcttgttagactattttaagggttgtcacgttaggttgttttgaagtgtgtggttacaaagaccaacacgccaaaccttttcaccagtttttaatccctcagttgatttaggaacagtccaaacacttaatttcatattttttaggtaggatcacccatagtctctttttagtcagtgcgaacctcgactaatcaagtattttgacattacgagcaggttactaaatttttcccggtccatcaaatggtcgcatagccttagtgcttttcatatgtctttgataattaactgccttttcacggtgttgctcacgagatgctagtcgaagatggtttactctgcgaatgggaaaactttcacattctaagtgttctccaacttttgctccttgtgaaattaggtccctagagtactggttaaaaatgttatcgattctaggagtcactccttatccaagaattgggctggaaccgtgataacactttcaagcagattttcttattccagaccttttcaagcagacaaggccttccttgcatcatccatttcttagggtatacactaccaagcataacacccccaaatgagctaagaattttggacaccctcaaattctcgatcatttgtttaaaacataatctgggtaataacatgcgccaaagtgctagctggcccatttttgggaggccccaacagacttacactgataccccattcgtgtcctctccatctagtgctatccgtgaagggctttttccaaacagtggtgagggctgggttaatttaacaatggtctcacagcttccgcgagggaaggctttggtcacacaaaaattcaagcaagggcttcatgctcaaaactacaggtgaaaactacgttgggcgcacgatggacttcaagcagttccttcctcttgaagggagggttgaagacgcgtcggacccccaagcaatatttttgacaaaaagtttggaaaaaggtccgtcagcaagatagaaactacacagcgagtgcacacatgcctatggaaaccttgtagaattatgtggtggactttagcatccgtgaagaaaggatgaagtcccacaaaaattcaagaaatggtttcatattcaagaccaaagatgtgaaacccagcatgtgatagactttaagcaatccttctcttcgggaaggagtgttgaagacgcatcgaaccccaagtgatctttcccggaggtaaaaacacatgtgccggtgagaaccatcttgaattatgtggcagaatttggctttcgtgaaggtgaaggaaggctgaagttgcaataaaattcaagcaatggtttcacattaaagaccaaaggtttgaaaccccacagcgcgtgtg

SEQ ID NO: 184297 - DNA, 4899 bp, Cannabis indica
actcaatctacaacatgcaccaccactgtcaccccaaaccaaccaacaaatacttcatctgcccctctaccatatagacaactgatccaccaatacaaacactcacaatatccaatcatccaacgcaaactagatttaagtctggtattcacaaaccaaaaatactagctgctacattaataagatccaatcactcatatcttgagcctaggtctgtgaaaaaggctctagctgatccaaaatggaactcagccatgacaattaaattttatgctcttgttagaaacaaaacttgattttttgtaccatacattgatggcatgcaggttgttcaaaacaaatggcttttttcagaaccaaattaaacagtgatggattagtggagaggttaaaggctagacttgtagccaagtggtttcaacaaatagaagtggtcgaatactttgaaacattaagcccagttgtcaagccatgcactctcagaattatgttcacccttgctgtcactaacaattcggaaatacaacaagtggatgtaaacaatgcattcttaaatggggaactcaaagaaactgtgtacatgcaacaacccaagggctttgaagacagtgaacaccctacacatgtgtgcaaattacaaaaagccatatatgggcttaaacaagccccaagggcttggtatgaaaaactcaaattagctctgctctcatggggatttgtcaactctgtttctgacaattccctgttcatctcaaataacaaagggaacttgctacttgttcttgtatatggtgatgacatactgatcactggtcatgattcagaagccatacaacaaataataacagctctggacaacagatttgccttaaaaactatgggttctgttagctacttttttggcttccaagcacacagatttggctccaaattgtatctaaaccagactaagtatgctcaagacatgctaaagaaagccaatatggaagactccacaccttgcaccacaccaatgtgccttggaaacaaactgtttaccaacactgatgacttgtttcatgatcctaaactatacataagcatcataggctcactttaatatctcaccttaactaggccagacttgtcatttgccattaacaggttaagtcagtatatgcaaaaccccaccaacacacactagaatgcatgcaaaagggtgctgaggtacatcaaaggcaccactaatcttggccttgtatttcaacctgctacctcaatgaccattgaagcctacttagatgcagactgggcctgcaatctggatgacataaagtctaccacagggttcaatgtcatgctaggagagaatctcatcacttggggttcaaagaaacaaacagctgttgccaaatcaagtacataattcgaatatagagctttatctaccactgccactgaagttgtttggatcacttcagtactcacagaaatgggcatcaacttatctaaaattcattctatctagtgtgataatcaaggagtacaacagttagcctccaaccatgtgtttcactcaagaaccaagcactagaggttgatgttcactatgtcagagagctaatcaccaaaaacaaagttcaaattgcctacattccaacagaggaacaacttactcacaaaacctctcacactaccaaagtttaatttcttttgtcaagctgtcattagagtatcctccttccagcttgatgggggatgctgaggatactcaagattagttctttggtctggtagttaagttggttatttctgttagtttagttaagtgagttaattagtgtattagctcctcttttccttttctgtattgctctattgtaatctcaactcagcagaaccagaaccagagggatcgacgttaagctactcttatatatctaaaaagctttcatctttatacacaaaaaatatatatacctaaacccacctcagcttccctatatgtatatatatgaattgtttgttttgttatttatttgtaagtagagattgttttggagtttgattatgcagttaaaatgaagatggtttcattccctaataagctgattcttcttccatggactgttcttcacgccctctgtgactcccacagattcgctgaagctcaccaccgcttttcccttttcattcattccggttgtgtccccgacgagcgcacttgcaatattctcatagctcgtttgcttggttctcgatctcccgaccatactttgagcgttgtccgccgtttgattcgtgttaagcctgagtttgtgccttctttgattaattataaccgtttgattgatcagctatgttcgttgtccaggcctgcagaagctcatagcttgatttttgatttgttgggaagagggcattgtcctaatactgtcacttacacttctttgattaatgggtattgtaaagttggtgaatttgattgtgcacagaaggtgtttgatgaaatgggtgagagaggtgttgttccgaattcactgacttacagtgttttgattagtggtgttttgaggattcgtgaggttgagcgtgggagagaactcatgtccttgctctgggaaagaatcaagtgtggagatcatgaccagtctttgaataatgcagctttttcgaatcttattgattctttgtgtagagaagggtttttccaggagctgtttaggattgcagaagatatgcctcaaggaaatagtctcagtgaggagttttgctatgctcaaatgattgattctctttgtaaaaccggtaaacatcatggcgcttcgagaattgtttatattatgaggaaaagaggtttggtcccaagcttggtgtcatataattctattgtacatggacttagcaaggaaggaggctgtatgagggcttatcagttgttagaagaaggcattgaattcggatatcgaccatctgagcatacttacaaggtcttagtagaaggtctttgccgagaaaatgaccttcacaaggcgaaatttgtctttcatgttatgctcaacaaggaaggagttgagagaactagattttataacatatatcttagagctctttgttttatggataatgctgcaactgagcttttgaatcacttgtttctatgctccaaactcagtgtcaacctgatgtgatcactctcaataccattattaaagggttttgtaagatggggagagtagaagaagctttgaaagtactagatgacatgatggttggcaagttttctgctcctgatgttgtgacattcaccaccatcatttttggattacttgatgttggaagaactgaagatgctcttgattttctgtgtagagtaatgcatgacagtggtttgaaccctggcgttgtgacatataatgcagtccttcgtggattgttcaaacttcagctagcaaatgaagccatggagatttacaatgtcatggtaggaaaaggtgttacagctgacagtactacattcactatcataattgatggattatgcaagtcttgtcagatagaagaagccaaacggttttgggatgatgtaatctggccatccaaaattcatgacaactttgtctatgcagctattatcaaagggctttgttgctctgggaaattcagtgaggcttgtcatttcctttatgaacttattgattctggggtttctccaaacatatttagctataacattctagttgatagcgcctgcagactaggattgagggacgaagcttatcgagttgtaagggagatgaaaaggaatggacttacacctgactgtgtgacatggaggattcttgacaagttacatggtggctcgagaaaacaaacatttgctgacgattcagccttaaaattgaatagcagatcacaagagatggaaattgaactagattattgcaagaactaataacaatgcttgtgaatgttcacagataatactgtgttaatcatcacagataacctcttcaagctcctgtttgttgtatgggattaggataagtaatcccaatcccgtgtttggttacattatttgatgggaacagtaatccattggttttatcaaacataaaaccactttccatgatatttgaactgaacctacaacattcatttctcgatgctgatgttctcctccctacgccagttgccattcgtcatccttgttgagatcatcccactatcaccattgacatcacaccaccattctcttgttttcgttcatttcaaacttcatttgtaagtgcttgagattacatttgccaagctagatttgtttagtttgttgattttgactctccttgtgtatctctattttccttttaatttattggaaatgcttgtatgtataggattgaagcagtgtgcagggaacaaccaatggggccgaggagggatatgcagatgcaaagcaaaaaacacacttcccttgaaatttatgagcaaatgatgcagacctagcaagcttgttgatcaacccaacaggcagtgagaaaaaaagacatgtttatacgtgagtcttttctttggaattgaactagttttagtgttttagtgtattattatttatttattttttttttaatttcagtatcttatttggttcatattttgtgtgtattcttaccaatgaaaatgtagtttgttatcttgctaaaggaaaaaaagatgaagttaggacagtaatggtatgtgctctatataagggtattgcagtagttgattccaatggtttcttctttttgtatttggtgcagttatcttagaatccaagtcacttgatttacatttaaagtaaactaggactaatatcaaattgtcataacttgtatcgagtggtgttagaacactaatgtaggggtattcattcaatct

SEQ ID NO: 184298 - DNA, 7643 bp, Cannabis indica
aaaaaaaaaaaattaatacaattgcttgaatggatactcacatttcttatgatcttctcatcccctaaactatatttcgtctacataatgaacaaagaaacaatgaagctatagaattggtcggctaattccaacaaaacgaaatatatatatattataaaactattacgactcaggttgtgccctagaaatgacatggggttggagaggaagcataccaattaccaagcaagcagtgtggcgatatttggaaggcaaagggcatcttcgaataacttgcattcctctactccttttcttgcaattctcttccatttatatccttctgctctgtgatgggatcctgtacctcctcattagtacactttccatcattcgttgtcatctcctcagatttcacctgtttcattcaagcaaatattagtacataacaaaaacactatacttccaagctttataatgtgaccatcatggtaaaccagcaaacgcaccatcatgttatttacaaatgaagctaaccatattacacaatcattattgaaagtaatttaaaattatatcccctctatttaatttgttggtagctcaatgtttacacaactttctaggagaaaatttattgggcagaacccaattacaaagagaaagttcccagaaaatattcaggaaaattttgtgtttctgaagactgggcttccgctaaaaaagtattagacacccaatgcaaaaatgttataacaacaatttgtgacatgtgataaagaaactaaattatagaagcaactgaacaataaaattcaaatagaagggacacagcacaaatatataggttttcacttctctaattgggaatcatccaacattctaattagtcgcatataagctattggcactccaacaaaacagtaactcctacagtgcattagttgataaatgaggaaaccaaccttgttgcgatctctccaaccaagtccaaatggtcgggatagcagactaatctttcttgcaggaatttcttgtgaattatcttgattgctgtgtgcaggagaatcaggacgagaagatctgcaaaacaatgctttcttaccaaattaggacacaaagttcggccttgcatcaaaaggccttttacaacttttcttctctaaaagatgcacccaaaacaaagtgaaaagtttcaacgcacctaggcgaaggctgcgctttgagttgtccagattgatattgcaaagtagcctccaacattgattcagccataacaactctcttctccatatcagctagtgcagcagtggcatcttcatatttttcctgtattagttggaatatagaagatgacaataaacaaaataaataaaacttgacatcagaattcgattaagctctggaaatgaagtatgacatcaataacaaaacatagatgatatgaagtctttcctattcttctatagataggatgcatggaaactgaaatacttgaaacatggaggaataaatgaaataactaggaagagttcaaatataaacaagatattgcacaccatacggagcttttacagcaaaagaaagatgttatttaaaataatatttaaaattagtttattttacaaattattcaccaataacttatttcatacatgacctaattcccttactcttcaaaccacctcgtcagccacaatttgcttcatctaaatcaatctatgacagaactcatatatgggaagttgagaactaattatcgtcaataattgtagaaggcatctagtctaacaacgggttaaagaaattaaagttcaacctgaagcacttgagcagcatatctctgagctgctgcatcctgctctgcaaatctgcgagcatcctctgttaacctttgctcttgttctactcgcatcaagacctgtgaagtgtgcaaccaacaacaatcaccacaacaatgctatatttaagtaaaaagataaaaaaggaatgaaaactacaaattacactattaaagacaaaaataaaacctcttgtcaaaaaaaaaatacctggagcatggcgttttcttgttcttgcttatcagaaagagattggcgaagttcagcaatttcttgctccaactgctcgacctagaaaaaaaatagcgaagacaaaaaattaaacaaacttaggaaaaaaaggccttaaattggacacttctcattctcttgaactgaaagaaagatcatccgactatcagatgaagaaattaaatttcactaacaggagacatcactgtgcaattattgatgtgtatcatattgcttattatccagaaactacaccaaaataattgaaaaaacttagaagatcaaccattaaacatataatagagagagggtttctttttaaacagatatgggaagatagggacacattatcataagtatgataattgagaattaaaaaaatgcatcaagggggaaatacacacaacttatttgaataaataagttccatgagtaaatgaatgcactaaataaaccttggcactcaattgccttcgattgtcctgcgtcaccatctccattaaagctgtctccaattcctcagctctgagaatacaaggaaaatatatgaatattactcttagataataatcaaaaatccatagccaccataagaaaagttatattgaaacatataaatatacaagtatcttcacaaacaatttattgacacaaatggttttttgtattcaacataaaagagaaatattaacacctgagaacagcagatcttttgtcctcaagctgcctgcacaattcaaccttcaaccataccacctgcatttgctcatatattaactctctcattagaatgttagaaacaagatgtattcaaatttaaaacaaaatataattaattaattaaagtatcatcacttctttaacacattaaaagctattgcttgaaaggtccaggtatcctttcagagagcatcaatacagaaaaaatgtgctaaaaatctgtgcgatcatttttttatatacatatttgatgggatgactgataattttccttaataaatttacaaatagaacacagttctagcaagcatcccactagtttttggaaaattttgaataatttatggtgtcaaaaagagttcaaaataaccagttccacacgaatagaaaaaaaataggcacgagcgcaacttactatttgaaccctattttcaacatcgtaagtttttcaaaatttcccaaaaactaacatgtctgcaataactacaatagacgtcgcaatattaaaagaaaaaaaaaaggaattatagtttcttcaagtgttgaaaacaaaaagtgccccatggaaagggcaaaaatgatgtaaatgatgttcttgcctaagaattttcctataaatatataagagatagattaaacggaaaagcaacctggtcttgaagatctggaagagaatctatctccccacctcccgtcaagctaataagaatttcatcagcattagatgatccagactctgagcgagataaatttccatttgtttgtgcatcaagcaatcgctctcccttctttgtttctatcattactgatttaggatcttgtttaaagctataaagtttagatgcaagaccctgagaatctctccatgcacgaagtcccttcgatctttcctctattgcagccatcacaacaggacgatgtttatttctcaactcttgtaacctagcttcgtttacattttggtagcccatacaggcagtcaatacaagttggctgctgtcaaatgttgagccagccagtgattgtaacaaagtgactgcatctccagcatcctttgttgtaaccaatgcagggcctataagtgaccaattaatacagagattgaattacccttcatagtaaagaagtcaccaaaccaaagcacaaaggaacatgtagtaccatataattccatcaaagcaagtgcagttttaaatagcatgacacggtttccttcaaaaagaagcacatcccatactcgaagaactgcatccgaaaaaaattgccatcaaatgaggatgttgcctgtgcaaattatgagtgcaaaatcttgtgtagctaatgccatgaaaggaattctaaatgtgctctctaacaagcctaaaaatcaattctaaagatacatataaaacctgaccactttcccaaggaagcatgttcatgaaaatggaaagaaaccacggtcccgtaacccatgccacctgcactcccaagtaatctagatgatttactgcaaatatgggtaagttgaaatcagtttctatgcaatatgtatcttttaaaaaaaaataaacattggaaaagcagagaatacacaaacccagtttaggaaacctctcacgcaccaactcctcaaaaacgagttgatctacctgacaaaatacaacaatattcaacagaactctcatttttcgtgatgtttcacaagtgaaaggccacaggggttaaataaaaaagaacaaagaaaacaagcattacctgagattctatcatttcctctgagtaatagccatcaaaatagtcatcaagaatgcccatcaaggtcctgatttcacaaattgtttagttaatatagcctgctaacagtaactagacaaagcgaaggaataaatatgacaattattatgtccagtaatattcacggaactataaagaaatctgaatcaggaaatgtctatcataaaaaaggtacattgctttcagaaaaacaaagcccaacataaattttgagcttagtttaaaagaagaacgtcaagaaagagcatcttgtactcaaaaaaaaatttatgaacttaccaaaacgcattctcttcaggcataagaagtagtaacaagccagcaaaaaagttcattgcctacgtagagatcaaatcaataagttgtaagttccacgacacaagtaaacttttaataatatattgtacagttaaccaaggtatccaaaccaatacctggcaatatccaacagagggattatgtcttgcataggcagtaagtagacgcctcaaggcatttctaccatcctcgtccagtgctgggtgacctgggaatgttcgaggcaaatcctgcaaatggaatcacaaactagaagttgggaaaatgcaaagctgctacttataatgagcacaacaagatagtggaacaactaaccttttcaatctgtcctttccatttttcaggagcacaaactgtagttgaacccttggtcttgtctgagtctaaaacatcttcttctacattattgctacccttagtttctgaagttagcagatcctggtaatatttctcaactcgccgcgcttttacaccaacaaaggcttgccaaagctgaaatttagttaatcaagctatgaacgtattcatcaataatgcacttcatgtcataaagatgagtcaaacatgtaaatacgcacctctcccctgagagccattggcactcccccacgaacaagaacttccagctcttctctgcatggaaataaggattctgtaggtaccccatcagaggaaccacctacgatgctgtcacttgaaggggaatcttgaattggatctgatctctcgacatcataaaactcatcctcagaatcctcctcaaacgttcccttgggtgatctagcctcttcaacagaaggaagagacttccctgtttcattgacgtgctcatctttagatatgttgtttttcttctttatgcgagtactcatcatattttcaatggcaagaagagatggtctaatctcagaccatatttggatcctatgaatttttgtctcttcagtaactggtttttcctctttattagaaacactttctgttgaattaatggaaccaggctcttcgcaaccatctccagctacttctttctccaaactagcatctgcttccttctctgaaatttctttttgcaaagaccttttactgtctacattaaattccccattgacaggcaatagagcagactctgcttggagttccaggaaagaattccaccgatctgatctttcctcctcctcttcctgaaaataaaaaacacaatatttagcaaaaagctggaagcgagaatttaacatccttttcttctcgttttcctcttataagcaacctaatctcataaaacaaaatatgagaaagaaaaaaaaaagtgaccttgtaaatattggcatactcccggtatctctgaacgtgctgaggtctcacagcaaagccataagcgtccctgctcaataccaatgtccattaattttccatttcaataaaatctacctaaccctacgcgtatactaaaaacccagacagactcttctctgaaaataaaaatccaaatcaaatctcggaccgagaaaaccccaatgttgaacatggcttaaatcagcagcaatactttgagagatcgccaactctccctcgacaataaatactctgtacgaaacctcatttctacatccgaaaacacaccgacattgcgtcaacgcaatttcaattgaccaaaaccagaccaatattcgacccaatttcttttacaaaaaccaagtcaaaaaaacaaacaactaaaaaatacttgaaaattcacaacaattcaaagtaaaaaatcacccgttcaatcccaagctcatcaatcaaaattctcatagcaaaaacagagaaatcactcctcggactcaacacacgtaaatttaaaaaaaaaaaagtacaacaacaataacaacttattcaaaaccacatggatgtgaattacggcgatccatacagatgtaaaaccctaggaaatgagatagatagtaagagaaggtagtacagagaaagagtacctcttgtgctcgaaggcaacgagaggattgagcgaggctttggtggtggacattattggatcgggttcagcggcacaaagaccccgacgattcagccggtggagatctccgactttcttctactttgattgtctgcaacgaaaggagtttagagagagaaagtagtggtagtgagtagcggtacgtagagttgaaagagtataggaaaggaagagagagaaagtgatggagggcacatgcacaggaaggaggagccgaaatcagcgttcgtgtcgtgatatttacatgtgcgccatttttcattgacacgaactccaatgaccaacaaaaacgaactcaagaaagtctttttctttttttttttattgcaaagaactgaagaaagtcgataagcacaaaatttgtttattttttaattttattttgaaaaagataattgaaacgagaaatttttcatttcttttcttttttttttgaatcaattgaaacgagaaattagtttttttttgttctgatttaagattttttttagaaaggttctgattgaagttacagttttttttttcaaagtgatttacgttaccgtttacttttttatttgttgagtaaattagaattaaataaataattacacaaacttatgaaaatgtgactcggaatttggttaaccaatagaattttatttattgctgataaccaccaagtgtaaataaatagtaaaaatgacaacggcatttatagaggttcgaccttcttatttaacatataatgatctgttaattgtattgattcttgagat

SEQ ID NO: 184299 - DNA, 1613 bp, Cannabis indica
agatcagagcttgatgatgttgacttcagactaaagggatttcagtatcgtcttcatcaccagatctgaagggatcaatttctggaggtataaactgagtttagacacaagttggtattggaaaaaattgtgtcgtttaagggatgatttttctcaggcgaatatagtggttgctggagctgaaaacaaattcaaagcttcaaagctttacaactcatccttgcaacagctaatagacccgactgctaaagctatctggtgcgaattgattgttccaaaccatggctttattttggggcaagtggttcatttgaacctcataacaagggataaattgagcaggtttcagattatggtgaaaaatatcaactgtgcagtgtgcggattagctgaagaatgccatcagcatttatttttcagctgcaatttatcgcagcaagtcctggcaagtgtgtttgaatggctaggtttttcaggctagtctaggaagttcaacaactgatatacttggatcgggtatgttcagaccaactttatagggagaatatttgcgatggtgttggctgcaacaatataccacttgtggaggaatagaaacaattgtatctttttaaatttttttaaaaattgttaatagtttagttaaagatataaagaaggatgtcaagtatagattgttcttgctcaaaaatagaaaagggtccaaaatggagttggatacacttgaaagattaatttgtaattaattgttgtgagttgagtctttccttttggaagtgacttgagggtttatttgcttggtttgattaatgaagttttcttcttgatcaaaaaaaaaatctttccttgaaaaaaaatattgtgtatatttatttatttattatgacttacttttttaaaagatatttattttttaataaattagaaattatttgagtaaattagttagaatggcataattgtaataaaagtataatattatgactagttattaagaaaatgaacacttctattgaataccagtagtacttagcaccttttatagatgtcgccttatcattaattagcaatattctacatgtcaaaaaaaataagcaatattctaaaggaaaaaaaacaaaaaaatacaaaaaaggaaaaaaaattacaaaaatactttgggccggcccattaaacatttatacagtccacatacaaatatttacaaaaataccacatgcactaagccttcagctgtacagagcgaaccatgaagatgaaaatacgcgctcgtttcaaaaccgcaaaacaaccaaaatgaaaccaaaacgaagaaaaatacaactattaattctcgcaaaatcaactggaaaagaatacctgcaatgatctaaactgaaaatgaacgaaaaaaaatcagaaaaactgtgaagaaactgaaattacacatttgttttctattttatttgatcaaaataactactcctaatatcgaaatctatattcataaaatgtagatctgtaacaaacagatctggagctcccactaaatccaaaacaatgtatgatgtaaaaattttttttaaaaaaacgccgttcaatgaaatatacatctacgttatatacagttgtca

SEQ ID NO: 184300 - DNA, 3975 bp, Cannabis indica
tgtatttgtgaaataatcgcttagaaataacaaatataaacccaatcgaagtcataaatgagaaggcccaagcccatttgatattttgaggagcgcctcgcctcctcttcctcctcccgcttcttccaagtattcgaaatatataaacaaatatattttcatctcaatcctcaaaatctcatttctcttatttcgaatctctctctcactctttctctctctctatctttactatccctttcattgcagtaatctagagagagaaactaatagccgttgggccacactaaccctagctgtttcctcatcgactagggttttacagccttatctctctcatcgcctttcgattttaggtatatctctttccttgatgaaaatttagtgtttatgccaatcgtgtctgctgtcagatccgttgaggtttttgattttaactgccgattagggtttatgcttcatagtagtgcttgtttcaatcgcattagatcttacctcttgtttgtcgctatgcctggatttatgcttttttgttttgttttgtttactatgttttcagtggaaaatgttgttaaagtaagtgaaaatggagctggaaattatttcggaaatgttgttaaaatcactctgattttcattttatttgattctgtattgttaaatcgttaaacaagcctacaaaatagttctggcgattgtggagaaatttttgaatttgaattttgtttactttatgctgatgataagtattattttaaagattttatttttagtatttaaataaaaaagtacttgtgcacatgctacaatgttatatttaagcggcattttgtgttagtttagcagcagctaactttccttgtgtttttgttttttctttcgttacaaatctttagtgtcttgctcatgtccttgatttgattaattatatgttttttttgtttttgacagttcagaaagacatggctttggagatcactcagtttctattggcagctcaatcagctgatgcaaaagtgcgtactgaagcagaagctaacctaaggcagtttcaagagcaaaatctcctgcttttcttctgtccttatcatttgagcttgcaaacaatgacaaacctaccgaatcacgacgtctggctggtattgtgcttaagaactctttagacgctaaagatgctgctacgaaggatcgtcttgtgcaacaatggatgcaaattgatgtatccatcaaaacccagattaaggacttcctcttaagtactcttggttcacctgtgccagaagctaggcactacttctgcactaggttgttgctaaaattgctgcaattgagattcctcagaaacagtggcctgcattgattgggacgttgcttgcaaatatgacccagagagagagtcatgctggcctgaagcaggcaacactagaaacttttggatacgtttgtgaagagatatctcacagggaccttgagcaagctgaagtcaacaatgttcttactgctgttgtccaggggatgaactttgctgacaacaccgttgaagttcgtcttgctgcaacaaaggctctgtataatgccctggactttgctgagaccaactttcaaaatgagatggaacgtaattttataatgaaggtggtctgtgagacttgcatgtctaaggaagtagagattaggcaggctgctttcgagtgtcttgtctcaatagcatcaacatactatgaagtgcttgaaccttatatgcaaactcttttttgagctcacatcaaatgctgttaagggagatcaggagtctgttgctcttcaggcaattgaattttggagctctatttgcgatgaagagatagaactacaagagtttgatccagagagtggggagtctggtgctcctcattcccgcttcatagagaaggctcttgcatctttagtgccaatgttactggaaactttgcttaagcaggaagaagatcaggatcaggatgatagtatctggaatgtatccatggctggtgggacatgtttaggtcttgtggccaggacggttggcgattctattcttcctcttgtaatgccttttgtggaatctaacataatgaagccggattggagatgccgggaggcagctacatacgcatttggttcgattttagaaggcccctctcttgaaaagctttcccaactcgttcaatctgggttagatttcttgcttaaggcaatgaaggatgaaaataaccatgtcaaggatacaacagcttggactctcagtcgcatttttgagttattgcacaatcctgccggtggtttctctgtggtttctgcagagaaccttgaacgtgttgtgcagattctgttggaaggaattcaggatgcaccaaacgtagcagagaaagtctgtggggctatatactacctcgcccaggggtatgaagatgctgggcccgcctcctctgtgctcacaagatatatcccaagcattattgattgtctgttaaaaactgccaatcgtgcagatggtggtgacttgaagcttagatcatctgcttatgaaacattgaatgaagtagttaggtgttcgaatattgtagaaacttctagcatcatagcccaactgcttccagctataatggaaaagttaagtagtacagtagagcttcagattgcatcattggaggacagggaaaaacaaggagacttgcaagcttctctctgtggggttctccaagttattatccaaaaactcagcagtgtcgatgaaaccaagaccgtggttcttcagactgcagaccagattatggttttgtttctaaaggtctttgcttgccgtagttccaccgtgcacgaggaagcaatgcttgcaattggtgcactggcttatgcaaccggaacagagtttgagagatacatgcaggagttctataggtatttggagaccggtttgcaaaatttcgaggagtaccaggtttgtgccattaccgtcggcgttgttggtgatatatgtcgtgctttggatggcaaggtgttgccatattgtgataggataatggatctcttgattaaagatctttctagtgaagaacttcatcgttctgtgaagcctccaatattctcttgctttggagacattgctcttgcaattgaagagcactttgaaaagtatgttccttatgcactgcaaatgatgcaaggagctgctgagctctgtgctagaatggacaccagtgatgacgagttgatagactacgcgaaccagctgaagcgcagtatctttgaagcttattctggcattttacaaggattcaaggattcaaaatctgaaatcatgttgccatatgcccaacacctcttacagttcatagaaacagttttcagagataaacagaggtatgtataaacacacacacatatatatatatatatgtactcattttgttgtcatggccgtgtatgctgactgagtgatttgtttgcagggatgaaagcgtgacgagggcggccgttgctgtgatcggcgatcttgcagatgcgcttggtccaaacaccaagttgctcttcagagaaaaatcattttacgtcgaattcttgggtgaatgtctggaatctgatgacgaacagctgaaggaaactgcaacttggactaagggaatgatcaaccgcatcatggtttcttgaaaagaaacataacatccctacgagtctcttgttttcagtaagtttgtcatgtctctccggacttcttttgtctgttgccgatcaattttgaattttcatggaaatttttttagggaaaaggaaattactaattagtgctatgggtgggaaaaaaaagagcttttgaagtttcaagtatatatatattgtcaccacttctagatggaattggttcgttgtctgttgtggaactctgtttagtgtaatgcatcatccactgatcagtgggtcttgtgtcatttattatgttcttccttctctcttttt

SEQ ID NO: 184301 - DNA, 1797 bp, Cannabis indica
agatttagaatacccattaaaaatacatctgtttctgttaagtcaaatattgtagatcactactgccaaaatgatgatgttgatcttatgaatctaagaaagaccagccaaaacaatccagttataccagctagagtaatcaatcggacagccattgtaactcgtctaagaaaaatctcatccaaaatttctagacacaacacaagagaaaaataggtgctcatgacactcttcaaccttttcacacataggacaattcatcgagttcaatatagtttgaaatcgagacatcttatccctagtgagaaggtgagagttcatcacttgccaaagaataaacctgtgtttatgaacagtaaaagaactccaaacagccttattataactgaccggagtttgatccaacctactgttatacaaccagttggttttgaatcgattggtggatcctgtcttaatgatttcaactctctcaaatttcttccttaagtggcatagtttaccgccaataccagttaacatcaggtttaagatcataggcctagaagcaaacagattttaagtagacactatccacccacttgacctaaagaaggtcttatttagtggatatagcccatatgtactttgctagaatagtctggtttcattttatcccatctttaaagccaagcccatcataagtttgagggagacaaaccttatcccaagaagtaatgtgaatcttactcatgtttccaatcattccccaaagaaattctctacacggcttttctatctcttttgtgatactatgtggaagaacaaaaatgttcatctaataatttcggagaccaagtaagactgagtggatcagttgcactttgcctgcaaaagaaagatgcctacttgaccaagtatgcaatctttattttatcttcttgatgatgatgccacaatccttagctccatttagtaggccttaagggaacaacaaggtatttgagaggaaaagaacattcaaataattgaacatcttttagaagtgcaaacctgaaactatgctggactcatcaagagtgtgtttagctccatgatcgaggatttagttcctttactgaacaaaataagatcatctgcaaagcaaaggttaataatttttaaacccttacacatcggatggaatctatagggagagttgtctgctgccataagaagccttctcgatagatattccatcataagaacaaaaagcaaaggtgagattgggtcaccttatcttaaccctttctctcctttgaatttgcgttggatcctaccattcataacaattgagtaggaggttgctcttaagcaaaccataatacactaaataaatttctggggaaagttgtaggcaaccaacaattgctccaaaaaatcccaactaacattgtcataagccttgcttatgtcaattttaatggagcatcttggggaaatgtttttcctgttatagtttttcagcaagtcttggagaatcatcacattgtgggcaatagatctatcttgaatgaatgcacccttgttttgattaatcaatctagggagcaccacaacaagtctggtacataagagcttagaattacactcgtagattgtagcaacaagcaataggtctgaagtcccctgctcttgaaggattctcaatctttggaactagagaaataagagctgagtgaagctctttaggcatagaaccagagatgaagaaatccttgacaacaaaacatatttcagctcctatgtcaggccaaagtttttttttcaaaaaaaaaa

SEQ ID NO: 184302 - DNA, 2928 bp, Cannabis indica
gaacattaaaaaagatttaacaaaaggtatctatatccattttctattagagagtctttttttatagtttggagtttattttttttttaaacttcactccctattttagctaagagtgtatttagttagagagcatggttggtgaacacataactctttagaccttctccaaggcatcgtataaattttatagtaaatttaactaaaaaataatttaatattatatttgacctaaatttataattacactttaatgtgcaaatgacaaattaacccttaaagtcagcataatcattaaatttttattgaaactatatatgttattatgtataaattatttaaatggataaataaaatgttatattaattaaacttcttttgtttaagtctaagcagtgcttgcatatagaattatctatatatattgaatatttctctcaaaaaatattgaacaatcatcacttccaacatggagatccaaataccaatatcatttccaacatgccttttcttttcattcattttcttgttaatggaaatttatgtaataataagcaactcatcatcttcaaaactccctccaggaccatggaaacttcccattgtgggaaacattcaccaactcatgattgggtcttcattattactccatcaaacactcagagatttagccaagaaacatggaccattgatgtacttaaaatttgggaatgttccaaccatagtaatctcatcaacagaatatgccaaacaagtgatgagagttcatgatgttaatttttcatcaaggccctcaattcttttttcgaaagtcatgttatatgatggagctggtcttgcttttgctccatacaatgagcattggaggcagttgcggaggattttcatgcaggagcttttgagtacaacaagaattcagtgtttcaaatccattagagaagaagaaatgtccaacttcatagaatcaatttcatcaaatgttggtgatgttataaatatcagtgagagactcaacatgttgatgtataacattatttcacgtgcagcatgtggtaggacaaggattcgcaacaaagaattcttatcagtattgacagaagtgactgaggtatcattagggtttgaacttgctgacttgtttccttctttgaagttattttatcagatgagtcgttctaggcctaaactcgagaggcttagagaaagggcaacaacaatatttgaagagatcattcatgagcataaggaccaaaaaccaaaagatagaagtcatgaagatttggttgatgttcttcttaagtttcataacaatgatgatcaccttggattttctttgacaaacgaaaatatttatgcaataatctttgtaagtatgtatatatgcttactttttatttcaattagaaacacatagtatttgtttggtcagtcaatattagagttagtcccacattgctaatgcgtgaaaataaattatcacatataagatgaatgagttactcctctcattgccaattagttttgagatataaactcattcatcttatttcaaattctaacaattaattaaccactttgttttagtttatatttatcatcatcaccattactttcattttatgctacttttatatcgattacattactatgtgtgtaggtacataaaaaaattatgtcttattttttataggtaaatataacttcatgtattacatctcatatagaagatgcatgtgaaatattttctcgttattatctcatcattttttattttatcacatatttttcttctaatttgctctcaccttaattacatgctcatcaatctttattttcatcctaacttttccttttcataatactttatttcattatttattacaaagtttataataatttttcatttaagaaaacattataaccaaagtacttatttttattaaacagcaaaatttattttctgttcttatttatgaaaacatacataactattttgaaacaaaacacacacacattgtcaagcaagctgttagtaattggaaaaaggggaaaaaaagaaattgccccaagagatatatattgttaaatattcatagagaaataaagttttaaataataaataattctcaggaaatatttgctgctgggattgagacaacagcaacatctacagaatgggctatgtcagaactgatgaagaatcccaagataatgaaaaaggcacaagatgaggttagagaagtctttcacagaaatggattgggaaatgagagagcacttgatgaaatgaaatacttaaaatcagttatcaatgaatccatgagactacatccttctttaccattgttagtgccaagacaaaatcaagaaaagtgtgagattaatggttatgagataccagctaaaaccaacactataattaatgcatgggtaattggaagagatcctaagtattggcctgaacctgagatttttaaaccagaaaggttcttagataataataattctattgactccaaattaggtaacaagtttgaatttctaccatttggtggtggaaggagaatttgtgttggtatgtcttttggttttctcaatgttgagctttgtcttgcattgttgctatatcattttgattggatgcttcctaatggaatgaaacatgaagatttggacatgagtgagacttttgctgcaacccttcaaagaaaaaattttcttcaggttattcctatcgcttatgaactgtcaaagaccactgcaaataaactggaatgatgagctaataatgtggtgtttacttttttaatgaaattatttacttcatgtgtcttagtgttattcatgatgtaattaaagaataataatttgcattttataagtattaattcctaatgattctaaataatctccatctagatttttgtt

SEQ ID NO: 184303 - DNA, 5990 bp, Cannabis indica
ttttggagttttttttttaattagagaggatggaaaagtaagtaggattacaatccactctatttcatttatattatgtatctataatctaggcaaattttgtctgttctcagatttggctaaaactttaattcattactcaaatctgaagttttgaaaaagttagaaatctgggtatacaacgcatttagattatagctccaacaaagaggcgacttttttcatcttcttttctctctctctttttttttccttcccgttatttatttatttatttttgaaagtctttatttttgcatttcaattttgatgcactacttttgattttgcttgctgggtttgataatacaatggtattgttttgcaggaatttgtgaaaattcaatctgggatttctgcaaatcgggcctttgaaagagaaatttgccataatcccaaaaggggagacgaagatttgggtattctttcaggtgggtatgtaccaactctaatttattttgagttgaaactggtgagagatgacgaggggaaggataagggctaagctccggcagagcaacttgtacacattcaattgcctccggccaagtgccactgcaacagatggcccgcttccgatcccaggtcctggccactccagaactatattttgtaatcaacctcttctccatcgtaagaagcctttgaaatattgctctaattttatatcaaccaccaagtacaatcccattacgttcttgcccaaagcgctttttgaacagtttagacgggttgccaatgtatattttcttttggctgctattatctctctcacggccgtttctccattctctccagtgagcatgattgctcctttagcctttgttgttgggcttagtatggcaaaggaagctttggaagattggcgtaggtttttgcaggatatgaaagtcaatcttcggaaagtgagtgttcataaaggaggtggtgtttttggctacaggccctggcataagatttcagttggagatgttctgaaggttgaaaaggatcagttctttcctgcagatttacttttgttatcctcaagttatgaggatgggatttgctacgtggagactatgaacttagatggtgagacaaatttgaaggtaaaaagatgtttggaagttacttacctttagatgatgatgagtctttcaaagatttcaaaggtacaatccaatgtgaagacccgaaccccaatctctactcctttgtgggtaatcttgatcttgaccgtcaggtttttcctcttgatcctagtcagattctcctcagagactcgaagctgaggaatacagcttatgtgtatggggtggtgatatttactggacatgatagcaaagtcatgcagaatgcaacaaagtcaccttcaaaaagaagcagaatagagaaaaagatggattatataatatacctccttttcagcatgcttgtgtttatttccatggtgagttcaattggttttgctataaagacaaggttgcacacgcctgatgcatggtacttgcaacctaaaaatgctgaagatatgtataatccggaaaaacctgccttggcaggacttattcatctagttaccgctctcatcctgtatggatatttgatacctatatccctttatgtttccattgagcttgtgaaggttttacaagccaccttcattaaccaagatattcacatgtattgtgaagagactgggaatcctgctcaagcacggacatcaaatttaaatgaggaattgggtcaggttgacaccatcctctctgataaaacaggtactttgacctgcaatcagatggacttcctaaagtgttccattgctggctctccatatggcgtgcgctcaagtgaagttgaacttgctgcagcaaaacaaatggctattgacctcggagagcacgatgatgagttttccaacttccctatgccgaaaaatagtgcacctagttcatgggagaataagatggcttcagaaatagagctggagaatgttgttactcctacctacggaaaggaccataaacctgccataaagggatttagctttgaagacagccgtcttatgaatggaaattggttgaatgagccaaatgcagatgtcctattgttgtttttccggatattaggagtttgccacactgcaattcctgatctaaatgaagagactggtgttcttacttatgaagcagagtcacccgatgaaggagcttttcttgttgcagcaagagaatttggttttgagttctgtaaaagaactcagtccagtgtgtttgtccgggaaaggtatccctcttctgttgaaaggtaagaatgtgattcagctgttcaattgggcattctattatatcgtgtttccttctcctgatatctgaacatttccttgttaatagggagtacaaaattctgagcatgctggatttcaccagcaaaaggaagcgaatgtcagtaattgtgcgggatgaagatgggcaaatatttcttctatgcaaaggtgctgacaggtcagcgacacaattcttgattatatctccccttcaataggaaaaagaagagaagttgcttggtttctaacttttaactctctgatcatttgcattatcctttggttaatatatacagcattatatttgagcggctatcaaagaatgggaaaatgtatgaagaaatgacttctaaacatttgaatgaatatggagaagctgggttgcgtacattggcacttgcttacagaaagctggaggagtctgagtactctgcttggaacaatgaatttcagaaagcaaaagcatccatgggagctgatagagaaactgtgcttgaacaagtatcggatatgattgagagagagttgattcttgttggtgctactgctgttgaagacaaattgcaaaaaggagtatgcgcattgaactctttatcttatcttgtttataacatctccttgaaaatcaattttaactcgaatttcttttgcttttgattaggtgccccagtgcatagataaacttgcacaagctggtctcaaactttgggttcttacaggagataagatggaaactgcaataaacatagggtttgtctctaatcaataattaggcataacatttttccaagttcatgtttctcaaattggacaaaatctaagatgatttattataacaaaagatgtaatggagttttgtttcatgatataggtatgcatgtagtttactgcgacagggcatgaagaggatctgtatatcaacggctacctcagacacattagcccaagatagcaaagaggtatatattttgcttaaaaagtgtaggtacttttgttttttggagattagtttcattttaggttagacctttttgttgtttgccaatgaacaggctgtgaaagagaacattctcaatcaaattactaatgcctcgagaatggtcaagttagagaaagatcctcatgctgcatttgcactgattattgatgggaaaactttaagctacgctttagaggatgatatgaagcttcttttcttgggattagcagtcgactgtgcatctgttatatgttgtcgtgtttctcctagacaaaaggcaatggtaaggtttaggtttacttatcctaagattttcatttgtcagtttcaagaccacacaaatctttctcttgttttttttccgcacactactcacaatctttcattttgattgttacttttttaatcaggtgacaaggttagtgaaagaaggaaccggaaaaaccaccttagcaattggtgatggtgcaaatgatgtcggtatgattcaagaagctgatattggggttgggatcagtggggttgaaggtatgcaggttggtgccatatctgactgactcctttttatttaataacgtctttataattattttcattgacattaaaatgttcacatcctgttttctgctgttagaaacaatgtatatttctgtatttacaataaatctcattaactgtttgtaggctgtaatggctagtgacttctctatcgctcagtttcggttcttggagagacttttggttgttcatgggcattggtgctacaagaggattgctcagatggtagtaaacatgtgcttatcatatgtttttgattttttatgttaatacctgcatctctccactaaaattaacttgctcaatacttgcaagatttataaatacaacaaattggaaggtggttgtattcggtaaaagtttttcttacaaaggttgtttttttggcattaggtttgctatttcttctacaaaaatattgcatttggtctcaccttgttttacttcgaggcatttacgggcttctctgggcaatcaatgtacgatgattggtacatgctatcattcaacgtcattcttacctcattgccagtcatttcacttggagtatttgaacaagatgtgtcatctgaggtctgcctacaggttagttctattagtttttactttagaaagtatgtgtacgttttcaggtaacccttctattatacttattgatcatctcttctacagttccctgcattgtatcagcaaggaccgaaaaacttgttctttgactggtacagaatattggggtggatgggcaacggtgtctattcctctctcataatctttttcctcaacattatcatattctatgaccaagcttttcgtcctggaggccagacggctgacatgactgtcatgggaaccgccatgttcacttgcatcatatgggccgtaaactgccaaattgcactcacaatgagtcactttacatggatccaacacctcttggtctggggcagcatagcaatgtggtatctgtttctcttgctttatggcatgatgtctccgacttactcaggcaatgcattcaagattttgattgaagctctcggccctgcacctctcttttggtcatcgaccctgttagtaacagctgcctgtaatctcccttacctagctcacatatccttccaaagatgtttcaatcccatggatcaccatattatccaagaaattaaatactacaagaaagatctcgaggatcaacgcatgtggacaagagaacgatccaaagcaagacaagaaactaagatcggattcacagctagggtggatgccaagatcaggcaattaagagggagacttcataagaaacagacatccatcatcattcaaaacgcagcagactctacgttgtgacatacttatcaattttgatttattaattttgatttattattttttttctttcttaaattttttttaggctttctcacagtttgcagtcttatataggagccgctctttctgtttctttcttggccatttgtttattcagttaagtggggtcgcttaaagtcccattcattatagagagaaaaacgttggagttgttgtatgtactatgtacaatatcttacaaaatttgaagagttaaacaacttgtgaaatatagttgatacctatatctacatctggctgtttcttttccttttctggtttctattgtattgtataatacgttgtatttattatttaatggcaaaaaaataatgcatccaaaggttatatataaatatatctattcattgttaatgattttgtttgtgatatgcctcttctagaggttctctgacaaaagtcttgttgtgtaaaaacagacctacgacttagatcatcaattcgtttgactaagattgtttgaaattgttaaaagtggtaaatttatagtattaatgggtttggagaaatcattcaaagcctgaaatgaactaacaaagttggtattatccaatgttgtttttgcttgttttgttctattatagtatatatgactaacacataatttagttcagtatatgcactgaaactgaaagtagattaccttatttgacttgaggatattatatcatatctactgctgcctcatgattttgatttggtttagatgtatatata

SEQ ID NO: 184304 - DNA, 1493 bp, Cannabis indica
aaatcaggtatgaatactttcatgttgttcattaaaaaatatctttactattcctatcttattaataaaataattcttgttaaactaggtttgaataattttagaattttgaagaaaatcttggactttagtttgattttgagaaactaaaagacgcgaataaggatagcttgaagagttttttgtattagtgttacaaatttaatgaagtacggtgagatttctaatcttaacaatgaagacttataccaagagttatttatgatgcatcaaagtgtaccaaatgataccaaaacaactatagatgtcttaatctatataaaagaagtggatcgttgttatccaaatgcctggattgcttatagaatttttctaactatacctgtcactcttgccaatgcttaaagaagcttttctaaattgagattgatccaattatatctccgcttaacaatgtctcaagaaagattgagtggtttagcgatgctgtccattgaaaaggatatggttgaaaaacttgattatacaaattctattagtacttttgcatctaaaaaggcaaggcgtgttatatttaaatgatacaataaaatcaagttaataatcatatgaagtagtatattttttgaaacgaattgatcttattacatattaatttaagctcacaaaaaaattttagctttcatataatatatatgtatatatattaattatttttttaaaagggacccaaaatttaaatatgtctaaggcccctaaatgtttagggtcaacctatttcagtatctaaaagaattttttcgtatttatttattataattttataaatcatatttgttaatataggataaattattaatttttgttttaaaaaaattagtactttatagttaaaaaaaagttaaaatgttccttttcttttatataaatacaaccgtcattttcccaaagtaaaaatatagatatcctttacacatgataagtgctatcgtcaacctcctattttaaattaatattcaaccttagcgttgaaaacacataccaaatgttttttttttctaattagttttgatgacgatgttcattaaagttacaatattaagcctattaatttttaaaaaaagggagaatactgtaacgacaacaaaattcatgatatttcaatttacaacgcgtgttcataaaatttcaaaattattttgggcatggtaaactatttaaaatatttcaaaaaaaatcaagtatgatattgtaatggtaacgaataccgtaaaactttacgcagagttccattactattaatgagtggcttcacaatttcgtatgggcacatgcatcccaggtaattcagccctatggtccttcatgatttgcgtatggtcctttttgcctaggtgcccgttttgtacggatttttagtctattgtttctcttcagcgagcatggttattggcaagaacttaataaattcatcgtttgggctcataataaat

SEQ ID NO: 184305 - DNA, 2484 bp, Cannabis indica
ctctctctctctctctcaaagtcacctctccaaagaaaaaaaaaattaccttgcaaaagttgagtatggtggtatttatagatcaaggatatagatccttaagtcggtggctgcagtaactaagttcttaagtcagttacaacttaacaaactccttgtaacagtatctttacgtcagctcaagattaagctcttccagatgaaaggcacgctccctggacaaaggaccgaagtgtacgctagtggaacttcccggataagaataaagacatagagtcaaaattttcttccaggaggaaacagatagtcatccggaacacctttccgaagacaaactagcttccttggagactcctcccggatagacatgttagacttctgggagtgccttttcggatgacatctaacttttcataagacgaacatcttttagagatcttttcatttggaagaattatattacaatcactaaaacataaactgcatataaattacgttggagctattatgatttctttctaagaggtatttcttttttgttaccagaagcacgtattgatttaggaaagactgtaattgacaaagaattagtgaagaaggtgagttacatcatattccatcaattgtctgtaaattattttagtattatgcacattatgcagcattcttcatgccaaaccaagctcaatatctcatctttgttttttacttgagcaggtctgggataggattgctcctggtctagctgctgagtttgattctccgtacacagttcctgctattgcaccacgtcctctgctgattgtaaatggtaaaaatcatacaataacacatatccatttttttttgtttctgccatttactatttgggatatccatggctattaggacaaaagtgtacagtttctttcttatttgtttaacagggaacggcaggtcttttttaaaaaaattattatattacaagtcgtgttaaccatattaaaagtttttatgtgtgccaattctattgagtggacacaatttgtgcccataatgcgattttgttcctactcatttagaatataatgatgatttagtctcatttatgagcattgttaatgtatctcgataaaagcatcctcccgagtcacgcggcacagcgggattggttgagaaggaagcaaaactgctgctcataaattacatcctgatagaagcaccctcccgttacacgtgaggttgcttcctcgggatacataagcattgctctatgttttcgttaagttgttattataggccgacaaagttaagtcacatcactatgcctttattcttgattacaggagcagaagatccccgatgtccctattctggtttaagtattccctgttcaagagcgcaaaaagcatatgaagaagcactctgtgcagatgattttaaggtatggaattggattagggagtatggaacttaatttacgtgcttaattaacattttcaatttcctgcaaaacccaaaaaggagatacctcaactcagacctataataaatagtaccttagttaacatgatcagatgaatatcatttagtccttataattctctctcaaattatcactgtaaatcattgttatagcattattaactattgccaagctctggtattggaagtttctcattaagtattcttcatttatttaatatccagttcatcgctgaacctggaatcggccaccaaatgacaccgcagatggtaaaggatgctagtgactggtttgataaatatctcaagccttgaccctcttgaagctttatacattgttccattttaattcgtttgcatctgaactttattttcgcattttgtttatgaattttgttgtatccaataacctctgcttcaggcggttcaagtgttgatgtttatgtagtgttgcgttgaaagaggttcagttatattccaataaacattgttcttgttatattatttataaataatataatggcattttgttttatatatctcataaataaaataatgttaaatgcataatgccaaataaattaaggtgtgacaaattcaattttgccaaaatgtaatatatgtagggaagttaactctcaaatatgtactgtgtagtatgtaatgaagagtttcataatattaatttgaatttcatatgttagattcggtatgatatatagttgttgccttgttggacacattaactcaaagtttttggaagttacaaattcatgtgtgaattgatttggggtgtttttggaaatatggtaacaagttgagattttgtaactctagtcggagctgtgactaccattgtcaaaggccttgaccgggaggttggctgaaataaaaaactcagctcaaacctagcagcttccaatgacgtttttgcaccccaaatagttctcacttctccaattgaactctattcacaccaatttatcatgggatttttacatatattgtcatttttttttt

SEQ ID NO: 184306 - DNA, 4389 bp, Cannabis indica
tcgtgcttacgtgtcatgctttttgtgcttctcgtggcatgttctgcttaaggatatacttttcgtgtcgtgtcgtgccaatttgtagtatcatgtcgtgtcgtgctcatggccgtctttttttatgtttagtcgtgctcatgcttttcgaacttgtgccaattttgtctcgtgtgaaaaaactcaacgcgtatttataacactattcgcaagtgaaattaaaattataaaagcttccaagaagaattgaagaaatagattataaaggattgtaacaatttgaacaatattgattttgattctcattaagatgaagaactagattttgggccaacacaagatgacaaccaatatatgtttactattagagatggaatagctcaaaaaaatatgaatacaagagaaattaaatagacttaagactataaagggaaaaaaattatttggtgttgtgaagtttttttagttttgctagctctggcgccaactattaataatagaaaggtatttttttaaatgtgatgtgtgtatttgaagatgttagagttttattgtctaaattttcagatacagttttgttccatgtggctcgcgataagaattttacagctcgtgctttgataaaatatgctctttggttagacgatgagctatcttaattcaaggagattccactgccgattgtggtttgtttccttattaatcatgtgtgactctgttcaccacataaaaaaaaaatagactcaaaactacgaaggaaaaaaagttatttgggcaaaacatctctaaggcttctttttttttttctttgtgaaaacacctctaaggcttctttgagtaagatgagatttgtttatattttaaataggctaattaagatttttacctctctaactttgacatgtaccaaatcatgacctctgaacttttctgactgttaaaaattctcctaaactattaaaattgttagatttaaggactttttttctaatttcatttaattttactattttagtgattgtttatatactaaatcatgcttcccagactttgatatctaccaaattatgtccctcgaacttttacatgtactaaatcctgtattttgaactttcatccatgttagactttttttttaactaaaattggataaaaatctttaaaatccaacaatcgcaatagttcagaagacattttaaacgactttaaaagttcaagaacataatttagtgtatgttaaaattcatgagtaaaaattcaaattagcctcctaaatatttattgcaaactaatgtatacaattaaacatgaaaaaaaaaaagtcacatgcaatgtgtaattacacaaataatgtgtagttcttttttcagcatactaatttaattacacagctgtcaaacacaacctcagtagttttaatagcttttttatttctttcaaccttgcattttcccagggaagaaaaccttggaatttgaattacattttactcaatattttaaaattattagattaatggtagaaaaactattctaaagtctatagtcattaagaatgaaataaaaatgattttttgtcattccatcaatcctttctctccagaataaaatgaggcaaataacaaaccacaaagtaggcttaaccagaaattctgggggcaataattggttataaaaaagcaacttgaattcacatgaaagttattatattgcaaattgcaatttcaatcaaaaaaatttgaaaaagcaaagtgaaaatcaacaatagttccagtaatccaaattgttgtatccacccatctaattcatttctttagtggccatcctcaatcttcttcaaacccttcatgtctgtcgtttccaccctggatgacaagcaaaacgacacaaagatcattcagtctacctctataatataatacagccttttttttatatatatatatgggactgacatttactacttgagaccaaaaaacatgatgaactctatcacaagtgaggttagctcagatagctgacagtaacgaagttgcaagaatacaaatgaggaagaaaataaaatataacaacttacgttgtgccgtagagacagattttttggacttttgtaacttcagaatcagattgattgtcctcaataaatattgtcaagctgatacaaatacaatgtatgaatacttgcaagtaataacaggaattaagaattaaaagagaggataaggaaaaactagcatacctgcgaacgttctgaaacttaacatacttcaaaacaactggttttccctgcagcaacacataatgcatgcaagttataacataaaaccttcattaacatatggtaaaaatgtcttaaacaaaacaagttaattttactcaaattataagtaggaagtactaccgtaagactatcaggggacaaaacggcagtgtcacttggtgggtagtcattgacattgctgacaaaattaaaaagacatgtaagtgcttgaattttgattatttctattgagaaccagaactgttattattcctacaaatttacctgaaccccatgtgctccttgtttgaaaaaagttttacagtcttgggacctgtaagtcaatccctctatgtcaaatacaaacaaatgatcaagttcatcactaaatggctaaaagtgttttagtcatgacttgtatgagaaaaatatatcggggtctcattacataattcaaaggtgtgtgtgactgggtttcatggaaaaacttgaggcagtgttaaagacactctattgttaggaaataaattaccaaagattatccatatattttgttttattatgcacagtgaaaagaagcctttgttttaatttatgtaacccttgtaagtgaaactagagataaataaggatatggttcccagtaagaggggagcaaataactagaaaggaaaacagtaacataaaagaactaaaggtatgcaatgcattcatgaatacttgtattttaaagactattaatttgtaccttcctcttcaggtcccttgatggcaaaagaatgcaatttcaccacttgattaaaaggaatgtaaatcagaagctgctcatctgcatcactctccagattcaaaccatcatcttctctgtaaccctacataatcgttgaacgaagaagccaagaataatttcattaccttagtctcactccccatgttttatacagcagaaaatagaaaaagaaagaaaaaaaattgtgcattaacatttcataattagtgtacaacttcatagaaaaaaaaaattatccacttacttacaaaaggaatgatagcaaaacacttaactaatcttgtgcactaacatttcacaaaataaaggtattaggtaatttaaagtaatattaatattcactaactcggagtaacaagcttaggtaactcagtttcttattccagagtagcatattcgaagtcgataaagggaaagaattataaaatcaaagagatcttccccaaacccctccttcagaataagaccaccaaaataccttggtaattggtatcaaatatcaaatacagattttggaacattcaaacataataacaagcataattcagcgaccccacataactagaaaagaggcaaatacaagagtacaaacaataacaacggaaaaattttttaaagaaaaaattaaaatcctaccttggattttatggtttttgaaagtatttcaataaaagcacaagagagatacccagatcaaggcccctgaattatatttacaatagaaaacacccaaaacttacctgcttgagagcgtttgcaagagagtgactcgtgctttggttgaggcattcaaccccagaccagtcaatgaagtccaccagatcaacctgatcattacaaaatccatcgttagaaacaacaaacctccccaccacagacccttggttactaactaagcctataacttgggaatctgagaaaagggtcttcaccctcaaatacccagttgaaagatttcaagttctcttcatatttttctttagtattttttttaatttttttttgtttaaagaaaaaagtttgggtttacttacttggcttcttggaattgcagtagccgattccgcagacatgattaatgataaaaacaaaaggcgaactttgtagagagaaggaaggaagagcagagaacgatagaaagtaaagaaatcatgaaatggaaccaaatgtgtacatatacaatacaactgggcaatctcctcaaaagatgctttcttgtgtacccgacattgtgaaacggcgccgttgtaccagcaaatttaattttaaatttaaatttgattttttttttttgaacttttttatttttacgctccaaaacaatttttttttctattttt

SEQ ID NO: 184307 - DNA, 6311 bp, Cannabis indica
aataatcccaccttaatatatataataactctttctatatgcaaattaagatttattgaaatgaaaggatccagcgatatatggccttaactaattagtattttttaaaaaataggaatttatataattaaacataccttgacaataataataaataatgaaggtcaaaataattaaacaatatatttttttttttgttgttgaagcgccttcatatattttatgggtgtctgattgaccaaccattttgattggaagtgcataaagcataatagatgtacaaaacctgctcgcacgtcccaaattcatgaaatctccatcaaagacatgcatgtaaatgaacggctaggatctctggttagttgattagtctgtgatgctaagttatcttaatgatcatttgtaataagtatccgtacacctcattgtaaggcaaggcaatggatacatgtatcactaatattaaatactaatcaagcctcttaattttgacttggaggacatgatcaattatatcaacgtgaggatcacgaagctacgtctaggtcttataaaattattttctcaattaatttatgtttttctctgcttattagttttaaaattttaaagagaagagttatataagaagggcaatgtacatattctctccaaacaaaaacccttttgttacatagctaatcataattattaattaagctaacaaaacagtactatggtttctttaggtcgttcatggcctttagttggcttcttctttgtggtatgcatattagtcggatcaaagggtgcaactgctgccatctattatcgaccaagtccatggtccaatgctcatgctacattttatggtgacgaaaccgctagagaaactatgggtatgtataaatatataggctaattatgatttttcccttaaactttaacatgtacttttttactatttcagtgattgtatatgtactaaaccatgctccctagactttgatatctaccaaatcaaacctcttgaattttgacatatactaaatcatgtcccctgaactttcatcgatgttagaattttttaactaaaattagacaaaaattcttaaattcaaccgtctcagttcacggagcatttttaacgaccttaaaatttcaggagacatgatttggtatatgtcaaaattcgaggggaaaaaaatcctaattaaccaaatatatatatatatatgtatatatatatatttatagcttttacgacttaattatatttttccaagtttgaataataatattgggttgtgtctaattgttatgtatgtatacacaggaggagcatgtggttatggtaacttgtttaccaatggttacaacacagatactgctgcattgagcacaacactatttaacgatggatatgcttgtgggcaatgcttccaaattaaatgtgttaataatgcaaaagcatgttactcaggcttcaccacaatcactgccaccaacatttgcccacctaattggtccaaaccttccaacaatggtggctggtgtaaccctcctagggttcacttcgacatgtctaagcctgctttcatgagaatcgctcaatggagggctgggattgttcccatcatgtaccgcaggtattatcaatgtgttactacttttattaatatatatacatatattaggaaaagagactcaaacttgaaacttccttttgtgataaaatgcatgtgtaaaagttatgactatacaactaatacatactactgtagaacaaatagatgtttagataaacaataatattgttattgggtacggttaaatgttgtatataattaattggattatttttttttcattttaaaaaatatatatagttttagtgtttttcaaaaataccacttatttctttttcttgagggtccaataatagtaattttttgtcctaaagcccacaaattttcagggcgttgcatgtttatattatataattaacatagttttatattgtgtgtgcgtgtatagagtgccttgcatgagaagtggagggctaagatttagcttccaaggaaatgggtattggctattggtgtatgtaatgaacgtaggaggaggaggtgacatatccaaaatgtgggtcaaaggtagcaaaaccaattggatcagtatgagccataactggggagcttcctaccaagctttctcagcccttggtggccaagctttatcctttagaatcacttcctacaccaccaaacaaaccattacactttacaatgtggcaccctctaattggcaagtgggaaagacttacaagggtaatgccaatttcaaataacttagtctcatcaaatccaattcaatccaaatattcatacatatagtctttttctttgtatttgatttgctttttgagaattttcttatattttaaaaatctacgatcaaatatgattatcgataaagtataaatttgatcattcatctgaattgtattttgatgataaatgattaaaattgtatttaccgttgggattttaaatcatatttatttcgtagaattaattgtcttatgtttcgaagatgcgagagtagagatcgggcagatggtcatttgtactgaccagctatttgttttggcaacaattaagctgtattgcttattatatatatatatacaaaaagaaaagaaatgttattatctcatcacaaggggaactgggactgaatgcaatcattttgtttttgcagagaattaattataagacggtttcatttcattttattttattttcatataatctttgattcaccgattgttgtattcaacagcttattttgttcttagctagcttgaaaaacatatacaatctgctgaggatttctgacaactcagttgagctgtatccaatgattttgtgatggaaatatagtcaaaatgattaatttgactatagacaaagtaaacgacatgaactaccacataaacgactcatgtattggcagttattacttacttcacatattattattattattatataatatagaaacattacatttgagttgggaatctttgttacttacaacaaaacacttgggcccatacatgaaaacaaactcatagccatgcttccgaacgtgagacccacatttcctttaaagtgtgactaagtctaacatgttaattagacacccttgaaaggagaaaaaacacaataaatatatacacacatatatataaactatataacataatacaatcaagataggatttagataaattaagatagaattcagataaattaaaatttacttgggttttattttgatgatgttaaattaggttataaatattttattttgaatattaatattgcaataaatgtaagatgacattttattgtatttattgaagaatgtcgcaaaaggtttaaaaaaaattattttgccaagtacaaataattctacacaaataaaactattttatgtattggttcaattgtccaaatacaatttaataagttccttccaaacaaagtataagaataaataaaataatacttcccattcctagtcaagtagtcatagagccttgaatcaattaatgagatcaaatgatacttatttgttatctcatcaataggccaatctctaaagcaatcaaaataatactagacacttgaagattctaataattttaaattttatgtacttgatttataaaattttaaagtggtgttttgaaaataaatgagaggttgtcatagaagcacatttaatttcattaactaattaagcacgccaaggctatctttagcttactaccaccaccaccaccacctcctatagtcatcaagtgccattatcgcccacgctccaaaatcatttcttcccagccttgccatatcaacttttttactttactttttctcctttttaataaaaaaaccctttcttgtttgacattctcactaatttgttcgccaacacagtcaagcattctctctctcttactagacaaattttacattaaatttcagtgattaataatcgtctgattaattattaactgagccacaatgactattacaactactaatatatttgttgggttttagattttgtcacaaaccaaataaattttgttatgtactctacattattaataattggctattaattaaattactatacaatacaatacaactattataattggctgttattattattaactacatgtgattttcaacaccgttatcccgtgttgtctttggaataattattgatttttctatgcttaattatgtacacaatgtaattaatatttttcattttgatattctagataataaattgtattgacaacaacatattatagtataggcattagtgatgatccaaaacaccataaagaaaacaacttataaggcaactttatgtcaaagttaaccaacaatagtctattatgtctaattgtctatctcaattttctatcttataagaccaaaaccaaatatgatgagaaagaaagtaacaactttgttattccttttaattgctttatctttaatccaccaaaccttttcaatcatctatatcgaactttcccctttcaaactttttcccttttcacacatctacaccaaaaaagaaaaaagttgatctaattttagatcactcctctcatagaaaacgaaagaagaaaagaaaattaaatcttgaaccaaattctctgtttattttttctcatatgggtactctggtttctctcactactgttataattctttcatggattttatttagtgaagctcaggggatcagatcagctcgtcttctcgatcttctcattagagactttacgtttaagtctttagacaccaacgtagggactggactacttcactctgtttcgttaccgaaaaatttctccggcatcggagtcaacatagcaaggtacagatgcggtagtctccggcgatatggtgcgcaggttaaggaatttcatctgggtattggcgttacgattcatccatgtgttgaaagggtcgttctagtgaatcaaaatttgggatataattggtcaaatatttactacgaaaactatgatttatctgggtaccaactagtctcccctgttttaggtcttctagcttataacggcggttccgacgtgaataccagcgaccctttcgaggtcggaatcatcgccggaggaaaacccatttccgtaaacttctcaagcatcacgaagctcaaaaacgaatcgggtgtaacgccgttatgcgccattttcgaaagtgaagggaaggtgagtttaacaaagcaagcttcgccgttcgtgtgtttggctaagaagaacggtcatttcggattggtgacagagaaaccttcgccggctatgttggacggtaatagtagtaatggtggaaagaaagagagtaagtggaaagtggcagtgggaagctcgatcggagctgctttaggagcttttctactgggtttacttctagtagcgatgtttgtgagagggaagaagaggacgagaatggaagaattggaaagaagagcttatgaagaagaagctcttcaggtttcaatggtgggacatatcagagctccgactgcttctgtcactcgaactatgcctaacaccattgaacatgactataaacctcctaggcggcaccgttgactgatgttcatatttgttagttgactttttcttttcttcgagttcattgtcctctctcgtcaattatgattattatcgtaatattatttttttgtaacattaacagagaaatttttgaactttgtagtttggttttgaaacaaaaatggtagatttcagaaccttcttttttctatagtaatagtctaatagatatctttgtagcttagaggaggtgaaattatgttcttacattttcactcatgaggattgttactaggtattcatagtatttaatactacgataaaatataacgatttttcataatatttattaaagcaaaacaaatagaatttgataataaattttattaatagcgatattacacctcacaaggatgctaaacaccataagtattctttaacatttctctttcagacataaatttgttgattcttattctttcttatggtattgaacgacaaatttaaccgtgtcgtatttgaggtttcaggtttcatattcttttttaacatagaaacaacactttattagaaccagcaaaaaagctgaaagagaaaaataccatactacagaacatccaaaacagaggaaataacaaaaaatcaaaaaaaaaaa

SEQ ID NO: 184308 - DNA, 1728 bp, Cannabis indica
agagagagagatgagcagatgaaaaaaagaagaagaagaaagaaagaatcacaaaaacataccttagatgggcggaggccgttggtggtcatgtcgacgtcatgggtggctacctgggccaccaacaagaagattagagagagaggaagagactagggtgggcgaagggaagggaagagggaaaaagagattagggttctttttatttgagatttttcgagttgggatgaagggtaggtattaggttagaaaattaattaatagtgtaggtgggtttcgggtgagtccgggtgcaacccgagttctgaaactgtctaattctcaaatctgaacccacttgataactgggtttcatcacctgaactcgccctataatttttacaaccttattttttgggtttttttttagtttcggtcaattggatttctcaggtggttggattttcgggtacaaatatttcgccctcggagccaaccacattccttagtgggggtaaaaaaattatttttggttattaataaaaaaaaattataattttatggagaaaaaaataattatgtgatgataaaaataaaaagaacaagttttatagggaaaaacataaaattgcatggaataaaataaaattatgtaagaaaataataaaaacaatatgaaatttataaggataaaaatgaaaatatgtaaggatacaaatgaaaaaaatatatataaatatattaattttattgggcaaaatgtattttttaaaaatttatatatagaaaattgagggatggggtaagtttatatttttttaaaatggtacaaaataatacactaaactcaattttcgtcatggcaataacaccttcaaatcattttattatttaattttattttgatgataattaagctcatagtatagattatattattttaaaaaaaatacagatctaaattatcatttaacaaaactagaaaaaagtctaattgataattttacaaaatacaacacctaaaataatagtatttacctcatagtagtttctcactcatttgatgaaaacaaaaataatggttctaccaaaaataagcaaaagtatgatcagtgtcccattatagatataggttttgtagaacaaggttggaccaaaatgacatggttgttcccctgttttttttattaccattgtagtgggttggtgacctttttctatgtctgcacccaaaagtataagaaagaaacaatatctctatcctctatctctaaagtcatcactacaccaaaattaactttatgtttacttaaatcatcttctcttcatcactttcatctttccaacttttttctatatacatatatttgctcatctattcatatgtatatataaatgcatgcttttaaaattagtaacttcttccccacccattaagctaaagtgaaaagtactaaccattttcttaattcccctctttctattaattacatcacattatatacataatttatatactaaattttgtttgtaatttgtttttttgagcttccaatgatcgatgctgtttataatccaatctaatacaaaagttattatataaatttattacaaaaatattcgacataactgtgaatatttatttatatttgaacatatatatatataattatataatacgtaccctcgaatgaagtaaccatgtactattggttcaaattgatcactcaaatttttgtttcctttatt

SEQ ID NO: 184309 - DNA, 1108 bp, Cannabis indica
ttaaggcctttatataggaaagcttaatcctaattttcaaataaaatccttaaatatttgtatattaaattgataaataacaaaagatttaaatgcccttaaacctagatatttttcaactactttattgggctgttaagtccacgtgtaaagctgtacagaaaatcctgccaggtcctttcctagccggccaagcacctgcagggagcaagctagctggccatgtgttgtccagaggctagtcggccatagggtcggccaccccctctgaggaagctggtctgtcacttggtgtcccgtttaagagccggggtccctgtaggctgaggtactgacttggccttctcattggtgagttgtactgccacatgacactgattttttctacgtaagtaatgccacgtcaagtgggcaaaaatcatgataacaatgtgtaaatcattttataaagttgcagatttggcaactagagatgagatcaaatgcatattttgttgaaaatggtcaacgatcttaagataaagttactacaagttgatgatatttgtgagaaaggagctaaatcaaattttgaatttggcagtaagattcttgatctctacagttaggagcaaaggatatccgtcgttcaagagaaaataatctaaaattgagtaaattaatagaaataaaaaacaaaagaatactcaaattagctcgaaggaaaaaatacaaagaaggttagtacattttttttttcatttaaaaagtcagatttttttttatactaatattatgtttattaattagtatgatattttttttctttgacgacctccaagaaaatagtaagcaatgaaattgcaatactagtcagattacaacacaagaaattatcaataaaatttgtagaggttactttttgtttttttgatttgatttatatttaatatgtacacatatttattataagtacagggtgttcaaatttctcaagatacatatatatgttgatggacaaattcaaagaattgattaggaacaactactatatacaagttaatgaacaagagagtgatcatattattggagatcttaatttgtctatgtgacctatgaagaattctat

SEQ ID NO: 184310 - DNA, 3408 bp, Cannabis indica
taaagaaaaaaaaaaaaataacaaaaacaataaaatggttacaaaaatacagtatgtaagggtgtgcataaatcatccaattcaatgacaactgaccgatttaattacaactgactgtcaaacattgaatatcgaattgtaatcggatcggtttaatgttatttttgaatatccaattggatcggatcggatgttggatagggtgtccgaaaatctaatacatccaacatctaatcaaactaattagtatttttatttagtttggatgaataattaaattttatattgttatacgtaaaatatatatgtacagtatatataaaaattaacgttaaaattttactctatttttcttggattggatggatccaatctaatccttggttcaaattcacctatccttaccttgaccaaaaagttatcccttttcaaaatggctgaaacagtttctttgtcaaataggtgattcaatttttgaatgttccaatcaccgtaatccgtcataagatcagccactctgctaccaacagcatctacagatccattatacttaggataaaactccaaaccatgaaaaacccaaggatcattccagattttagtatcccttccatccataatcattctacaagcacctttctttaaaatagatttagctttcaccacatttttctaaaaacataaatctaagtctttgtacttgcgagtaaggaaatctttcccttttaggtacttcgctttcgaaacccggcagcaaagggattgactaccagttaataggttccacccccacttggctaggtaagtctggttcatttctttagttttttggaatcctagtcaaccgctggatttaggaagacacggtttatcccaagtctttaggtgaattccatagtttcctttctcaaaactccaccagaattcgcggaccatgccatcaatcttattaacaagactattcgagagttttgtagtttagtttgcatggcataattaggcatggatagtcccacatacttaataaaagtagcccagctttccacccctgtagcgtagtggtcaaatcatccaaataaagttatagtacgcatccttctgtctagatcttactacagggagccccaggtatttagtattccccactaggtctccaactctcagagcttctttgatccctctcttcaccccatcaggagtgttcttactgaagaagattgaagttttaagtttcttgacccattgacctgaccatagcagaaatcttctaaacactaccaataacctctagcctcttccaagttagcccaaccaactaaaattaaatcgcccgtaaagaatatgtgacagaatcggaccctcttggcacagtctaatacctttaataatctcctttcccaaggtttcttccaacaaccttgatagaatttctgctgtccgaataaacaaacagataagaagaaagcgagttacgctacacgagggcctaatcttaccaacttaccctccattaaaacaaacattcagagtggtgatagatatactgatctatccaactactcaatttttccaagcaccataacaattaatcacatgctttataaaatgtttggtattaagagaaagaaaaaaaaaagtgtgatacatcatacagccaaaacgaaacgtttcatttgaaaaaaaaaatactattgagcgaaagaaaaaataaatacaaaatgaatactggcgaaactcaacggcatgtcgttgatttattctcaacgtacaactatataaaagaaagagtagcatcattttaatctcaaacgacaacaaatttcaaataatcacacgatttgggacgatccaacacgttcggctcagcttagctcagctcactcgaaagagaggaaaacccggcacctgagcctgtaccggagaactcttttaccgtcgcgaagaagacgatacacagctcgagaaatcgcttcttcctcgatttcaaatccagaagaagagaaacgataaaggcagcgacgaaatgtcggtacaagagtatctggacaagcacatgctttctaggaaaattgaggacgccgtcaatgccgccgttagggccaagacttctgatccggtcctcttcatcgtaatgttcctcttttctttcacctctttatgtttgtttccctaggaagtgggagaaaattttgtcgaacgagctacaactttgaatttcctgcataattaagccccttttaacgtactctagctaagttttgcaaggttcttcttttgatttggttttgatcttggagtcatgatgtatttacagtcgaaccatatgaagaaagcggttccttcagtgatcacgaaggtaaaagctagacagatcctcgatagccgaggaattccgactgttgaagtggaccttaccactaacaaaggaatgtttcgtgcttcagctcctagtggagattcttctggaatgtatgagatatttcaatctttatctgttatatatttccccgtattctctatgttcttagtttaattaccagagaaaaaaggggggaaaaaaaacaatcatgaattgaatctttagttttatcattgtgtatgtattgaatatactgactgttagtgatgttttcggtgcataactatattaccaaaatactaaccgcaatttatgtataacctgactatgccgtttagactggttatcattcaaatacgaatttcattgagcttcgaaagttgaaatccttaatagattacttatctcaggtatgaggctgttgaattgcgtgatggtgacaagggattgtatttgggaaatagtgtgaatagagctgttaagaatgtcaatgaaaaaatatctgaagcactaattggcatggacccaacacttcaatcccagattgatcaagccatgatagaccttgataagacagaaaaaaaggtattgtattgtatttctttatagttggattttatccaattcaaacttttggataacatgttcccaaaagttttagtacttttagaagataaataagtctcacacttcgaggtctagttatgtagggtatcaatgctctctattgtgcttttatctacgtctaataacaaagcttcaagattattatagcttgtggtacttgaaagaaaggagacttagtactgattgctttatgatctggacagattatatgaatagggtatcgttttaagatgcataaccgcttgggttttgtcaaatgtacattacttgcatctgatttaacagaaaatatctttacttcattgagcacagagttaactttgcttttcttttgaatggggtgatgtttcttacttcatgtcatgttttagggtgaacttggagcaaatgccatactagctgtgtcaattgctgcatgcaaa

SEQ ID NO: 184311 - DNA, 2608 bp, Cannabis indica
ttatgttttttttttttaaaattaacccttgattatagcatttggggtccaaggatgaaaccagatgaattaagagccattctgttagccctgcagtttgctaaggctatcgactcccctaatgtcatcatcaaatcagattctgaagtgactattaagaggcttcatcttggttctctatcttttggttggggtcataccttgtgtttgttgagtgtattaatctgtgtagaaaatttaagtttgtggatgttattttcatctctcgttgtgtgaatgttgcagctgatttgcttgcccgttgggctcgagttgctaagatcaagtctcgtggcagtggcagtttaagggaagtggccccctttgtagtcactaatgctttcaataaagctgcttgattatcaaaaaaagaaaattatgtttggaatcaacctcaaattatttcccttttatgtatttttgcccaacacttcattccaaacactatcatcattcaacaaagctcaccaaacccatttgacaaggatgaccttatttattacctcaacagttgggaatccaagtcctccttatcaaaattttctaatacataaacaacatcatacacatcctaacctcatttattcaatctttcttttgccaaattctgatctactttgtaagtttgagggcatccttaaatatgttcacaaaattaattaattgtacaatgtacaacaaattacaatgaactcaaaaacttgtattttcacagaataataactgatacaaagcttgtagttgcatagtatcacacattaaaaaatagataataacaacaatcctaaagaggccaaggctgaaccaaacacaatattccaaagttgctacataattgtttgcacgcgaagcgtgtgtcgtcctcctgcatttacggaatatgactaggatgatgaagcaacattgactgtaatgtcggtttctcggcgaaggctgttgtctcgactgtaaggagctttggcaccctggaaagtagaagaaaattacattggatgacaatttttcgataatattacaataccaagtaaataaagagatgcaaaggaaagaagagacttacttggaaaattgtcccaaattttttcagtgcttgggcccgaagcttcagaacctccttaggtacggtagggtctcgaatgacctgaaagagaatcagttgacaaattatttctcgaaatctacaaaccgagtttgtcatttagaattcttaacttgctttagttaatcctctatgcactacttctgaacatcttttgattttcaattttcgacaacccaaaagaaagaagttttgcaactcaccgcattgcagacacgagacaaagttgactcgatatcaacaacattaatttgccatagggaattaagcatgacatcctttttttcttccattactttcattaggttctcctctttgttttctccttggtttatcttcttcatgtcttcctgaatttgaattaaagacacagcacctgcaaattcgagaaccaccacgggcaaccgagctaagtatctaaagtttgatgggaaccaataaatcacaaatagaaagaatgccattatgaatagtgtacctgaagctgccattacttgagactttatctggtgtcctttatctcgcacccattccgccagaaagggaaccttcatgaaccgtttatcttttccgagttcttttgcagctttccttgtgtaaatatagccaattgtatgcagcattgcctcaccaaaagctaatgaaaatgtcaattatgggctgatgaaccatatattaagcatataaatctagttgtcagcattgaaaagaacttcattactcgaaaagacaatagaaagtatattcaaaattagcttcacaagttaaaccaaatcgtttcagctcatatactagtactacatgatcacaacactaagcaatatacaagccaaaaactcggttacaaatgcatgcaaatgtaatttcctaggcaagaagaaatcgactagaggtaaatgataagataccaaccaatctagataaaaataacactccaacaacttcttctggattgaaaattagaggcctccctcttccatagtcggattgactctactcatgtgtctcctaaactaatagcaaagagatttacccttttcactttacacaaaataatcacatattctctaagtaaggcctcctgattagtgtatatacttcgcattcccgccccaaacatacaagacttttaaactattcaatttacccttgttacgactcaacagcaaattagaaactacaattaggacggctaagcataaacaataaaatgaatcttttaaataagttttctattaagtctcgagtattgggtcagcttaatttggtggccgaacatagaaaaaaattaaagacagtaacaaatctataaaatagactgttaactattaacacacagaaacacccttagtatgatctctaatcctattcgccttctaacataacctaagggcaattgtggttcaataccaaaaaattctacagacaaatgatctgaagagcaaaaaagcgaaaaagaaaaaaaagaat

SEQ ID NO: 184312 - DNA, 5000 bp, Cannabis indica
atatagagttacacaatacaagcaaatagtaacaaactatacaactaagtgttacttacataatgacagcaaactaactgtcataacagaaaaccaacaccttaggttccctaatactacttcataatgtaaataatctcaatgtgcctcttttgatttggggttttttcacttactaaccttgccatcatatactagcaaaattgaaatcatttccttttaatcaattaacttcatcactcgatgtagtgtgctcatgatagcaggggcagcatcagaaacagttgtagctgctgccgtttcagccttgagctttttgcttggagaggtatatatagcttgttagattcccatactttttagtgtaatactggttcttgaatcttgatttttcatcaacttctgtgttacattttgcatgtaagtatttcatactgtcttgctggttaatatcatgttttgtttgttctagttctgttatggtgcaatcatatggtgcaagaatttggagtaaaaggaattggtcaaaacagagaagatggatgtcccaggtgctaatacatttggtgttgagtgttaatacacataatttaattgtataataattaattgtttaaaatttgtaatatttcataattatgtgtgattatattcaattctcatggaatacatcataatacaacccaaacttaataaatatcaaatacatatattcaatagtaatttaaacagacactccaaacttaataatcattttgaattaaagactatttgttttgctactgacataatttttttccataaggtaaatactttcaaaagtgatgattactttccaaacgtaaattaattaaagttagtttagtgtttcctccaaccaagaactggtcttaattattaattaatacctttctagcttttagcgttgtgaaattaccatcttcttttggcattttgatggcttccattattataatatatatatatatatatatataaaagaaaatagaggttgatttgaccttataaaagaattaaacagtagaggttgacttagctccaaccaagaactggtcttaatgattatcttatctgtatactgaactccacaaagtggtaaagatttcttggtcaagagaaaaaaaaagaaaacccatagattatcttcaaacttgatcagatcagtgttgtgttaacaatggctgaagcagtgatttcagtggtggtagacttgttgggttctcttcctcttgagaagctaatacaagaagtgagtttgctcaacaaagttcaacaaagggtggaaaatttgaagagaaatctgaggtcaattcaagctgttcttcatgatgctgagaacaaaagatggactacaagtagtcaaagtgtcaaagtttggttggagacacttgctgatgatgctcatgagatgggaactgtgctcgatcgatggaacactctcattctcaaatctcaaattgagactcagtttcgaatcagaaattcggttagtttcttcaggccttcttgttcttattctagtttttgttttttcaaactgaataagctaatttctcaccgtgagatctctcaaaaaattgaagaactcgatgagaaagtaaccagaacagctaatcaaataggtcaattggggttaatagaaaccatgactagagttgattcttatggggtacaaaaagttttggggagattagaaactacctcttttattgatgaagctgaaattcatggtagagatcaagataagaaggtgttgttagatatgttaatgtgtgaggagagaggccatggaattgaccagggattctttgaggtcatttctcttgtggggatgggtggacttggtaaaaccactatggcacaattgacattcaataatgaaactgttaagaaccatttttctaaaaggatttgggtttgtgtttctgagccttttgatttactcaaaattgcttcagcaattactgaaatccttcataagggtaataatcaaacttatacccaagaagaagatgatttgagtcaaacccaatgtaggaatccaccaacatttcaaaccttagaagcagcttttaattggatttctgttcgcctaagtaaatgtcgttttcttctagttctagacgatgtatggaacgaagagtatagtaagtgggagcctttagagattatgctgaagaagttagattgtgtagggagtaaagttttggtcactacaagaaaggagagtgttgcacttgtgatgggatctagtacttctcgtgtaattaagttaaaagagttgaatcagaaagagtgtcaattgatattcgaaagacgggcttttagaggtagaaacagcgaagaaatcgaagaattaagagatgtttcggtgcaaattgtgaaaaaatgcaagggattacctttagctgcaaaaactttaggtggtcttatgcatttcaagaaaagtaaacaagaatgggaaggtgttttgggtagtaaattgtgggagttaaatgttcgcgaagttgaacaatatcttttcggtccattgctattaagttatcttgatttgtcatcttatgagaaaccttgtttgttacattgttctgtatatccaaaagattatttgatcaacaagagacaactagttgaattgtggatgtcagaaggttatctgaattcggaggaagaaggggcaagagtttttcaaaatctaacaatgaggtcttttttccaagattttctaagaagcaaatgacatatatgatgatagtaatgtgatttgtaagatgcatgacatattacatgacttcatccaatatttgacaaaaagagaatgtgagatcatagaagctcttaatatcaactcagatgttatgaagaagtggagccttggtgatcaaagtactaggcatttaaccatagcaatggagtctaaagctgagtttcctaatttggaattgagttatgggaacaaaaggtttcttcacacccttctaattttaaggcaggaaaagaatacctctgttgataattccactttcttgactctaaagcatcttaggacattgaatttgtccaaatgtggggtcaagagattgccagagaatattggtgagttgatacatttgagatatcttgagttgtctaacaatcctttggttaaactaccaaaatcgatttgcaacttgtgcaaccttcaaactttcaaattagagtcctgtcgaacattagtagaggtcccgaaaaggatgggaatgcttatcaacttgaggtctttgtattgttacaaaaatggtgctttcacaagactaccaaaagggatttcgagcctaacttcgttgcgatttgtagattggattgaacttttcggagataaaactaagtacttgactcttggagagttaacgaagatgaatcgcaagctcaaaatcgattacttgactattcatttgaaaagtcttgtaaatatagaacatgcaaatgaaactaacaaggtggatcttacttcttgggaacttgtcaatgaactcgtcgtcatataccaaggaaatcgacatgaattcgatgttgcaattgatttcttcgaaccccatccaaagttgaaagttttgaaagtaagacattcttgttgccgcacattctcaccaaaatggataatgtccttatatcttttgaaagagattgagttttatcattgctatagcataagttcattacctgcagcattaggaaaactaccatctctcgagtcacttcgattttggcatttcgataccagaaaacttggccccgaattattaggaatagttgaagaacatggtgatgaaagtattaccctattccctaagcttaaactactcacattcagaaatggagattacttggaagagtggaaaacagaagtaccttgtaatgtaaagcttatgccatgtctcaaaaccttgcaatttatgtgttgtcctagtcttaaagtgttacctgaatttctacaaatggttcctttggaatttgtatacatatactatgatagtgttcttatggaacattgtagaacgagggaagggaatgaatggcccaagatttctcatgccaaaaacattcttcttgatgatgttcatgtgcaaaaagatggtcgttacatcgagtaaacaatgtgataattagtgttggtttccaatccatgaatgcacaggtaactttttttttttaataattttgtttcttggtttgattcttataagtatgcatgttaaataatcattgttatgtgaaaaaattaagttttgtgaatttttccatatatagagagagttgtaggggccaaagtgtaaatttatttttttatgtaaggggtctaattaatgaattttgagaagaaaaaaaactatatagtagagatggtagtaaatttaacacttttcttagtaatattataatatgatgaaattatctatttgggctagggatgaaaattgagtgggtaataagtgggttatgccccacttattcttaatctcccataagtttggggtaggagaattttcattgggcataaagacttattgggtacccattaaaattaaaacaaattttgttgcttaatttacttgttatcaatggttttttatgagacaagtgtacaaaataaattttgcatgctttaaattggttaataaattaaattttgattaaacatttaaaattatctttatatgagaatatttagtttttacttaatttaggttttttctttttgttggttgtgtgtcaaaatcaaaagaatccccagcagcctgtggcctactcatcaagtgggatctctttcatatctagccgagcaatgcacaaagcaggcctaatgggcttccattctcaaggcacggcctcaaaactaagcccagcagcaatgggcagcaaatcttcggcggcagcccacctacttctccccattccatttaggtatatttcaccgaaaaaaaaaaaattacaaaaat

SEQ ID NO: 184313 - DNA, 5068 bp, Cannabis indica
agaggaagcatggtattgttgtttaattttttcagttattagttaaaagttgttctcatgggccatgttatagtaagtgatgtttttttgttcttttagttattcttatccccaagagaagcatggttgtaactaatctaccatatactgcccatgattatttcttgcaaggtaattgattagcactgagaatcctgatatgcctacatgttactctatgatataatcatatatcaataatgagaattagtacattgggaaagaaagaggatagctgaatttgtatgcatacatcaacaaatataaaaacgatggaatgaaaagctgacccttaatctatcaaaatattccttcttcagcctccaacaccatcatcatttggaccagcttacagcaatttccaagttgactcttttaaattgatggagcttcttggaccagagaaggttgatcctgctgatgtaaagctcattaaggataagctcttcgggtattccacattttgggtgaccaaagaagagccttttggagaccttggcgagggtgttctttttattgggaatttaagagggaaccgagaagaagtgtttgccaaactccaaagtcagctggttgaggtcactggagacaagtacaacctctttatggtggaagaacctaactctgaaggtccagacccacgtggagggccgcgtgttagctttggcttgctgcagaaagaagtctcagaaccagggccaacgacactttggcaatacgtaatagctctcttgttgttccttctcacaatcggctcttctgtggaattaggaatcgcatctcaggtatagactctctgatatttctcaatgctactattagatatcgttttattaattattgctgataacatatgtttttgttaaacagatcaatagactgccaccagaggtggtgaaatatttcacggatccaaatgcagttgaggcaccagatatggaactgttattcccatttgttgattctgctttgccattagcatacggtgtgttgggggttctgctattccatgtgagtaggattttttttccttggcttttgctttagttgacatttcacatgaaaataactaggtcctctgactaacatcaacactccaaaaccttcttgtccatgaactgtcgtacattgataggaactgaggtgatgaattaaatatactgaatgttatttcactaagttgagttctttctttagagtttctaaatcaaaagctatatgctttttatattcttttgtattaatgtatctccatatatgtcatctagaagagtcattaagttcacattggttttctctaaatgcaccattttgacatattatcaacattatgtacaacacaccacctgttgtgtggtgtagtggtagggaagcttttactggcctcctcccttgcttgggtcaagagttcgactctcacccgacccctcaattgtgagagattatgtttgacccttgaaagctgacttgttgtggagtggactatctttgggataggaaccctcatgaggtgtaagtacccaagtaaggtaggatgaggtataagacccctatagctggaacatagtccctgggatctgcaccacgtgttaaaaaaaaacattatgtgcaacacagaaataacacaaaaacactgctagaacaaaccatatttcaattctttgacatattatgaattgagtgcaggaagttgggcactttctggctgcatttcccaaaaaggtgaaacttagcattccttacttcattcctaatatcaccctcggaagttttggtgcaatcactcaggtgcgtactgcgtacatgatgtaattgtttcctcattagatatatgcttttactttgtgtttataattttttcaagtggtgtttcattatttttgcagttcaaatccattcttccagatcggagcacacaagttgacatatcacttgcggggccatttgccggtgctaccctgtccttttcgatgtttgttgttggtctgctgctttcatctaatcctgatgctgcgggagacctggtgcaggttccaagcatgctgtttcaaggttctttgcttctcggcctaatcagtagagccactcttggttacgcgtatgtccctattttctctttcaatctttattatgccgaaatgatactttatctattatcacatttgtaattaaagtttcaccattatgaacgaatgtgcagagcaatgcatgctgcaacggttgcaattcaccctcttatgatcgctggctggtaatttaactgtaacattctcgggtcatccttagatttgttcctcttcgccataagcacttcatggtaagtcattcttgcattttgcaggtgcggcttaacaacaactgcttttaatatgcttccagttggatgtcttgacggtggaagagccgtacaggtaaatattattcttcactttctctataatcctctgcaatttttggtgcaaccaggttttgaaccctgtgattctaatgagtggcaagtcttatgtttttttttgacaaaactttcttcaagataaccgataaatctaaaattcactttaaagtaattgaccatatgtttaaggatacttctacaatgcaccctctaaaaagggtctaccgatgcacactctttctgtttttggcatctgagagaattttttagtccaattttttcatagtcatttacgttgtagttatttaagacatcctgcaaaatttaatacgccaaaaataggattcaaacagtcggttacaccatattagaattacttcgagcattttgtcacaatctatttacatgtatccatccacagggtgcttttgggaaaaatgctctaattggatttggtttgagtacttacacattgcttggattaggagtggtaatgtcaactttgaaccttaccttaatgatttcgctttgagtatttaattccattagtcctttaattatactccttgctaaatatttgttctttttcttctggtttcaaaagcttggtggacctctatcacttccatggggattgtatgtgcttctctgtcaggtacgtaaaactataaattgagacgtgtgtaaaatagaaaagtgtaaatactatttcgaaccgcgtgttttgtaaaagatagtttttagcaggaacaaatacaaataatatttaaccaatcgggtcataacagttcaaagttagattattattaagttttaatttgacgaaaattatgttgggaactattacgtaccattttgaaaaacacagggttcgaattgtcatttaataaacgtaagatttgatcattaaatttttcgaaacacgggatccaaaatagtgtttacttaataaaaaatttgaaaacttgattaattgattattgtaagattaataaatgaacagagggatgcagagaagccttgcttgaatgatgtaacagaggttgggacatggaggaaaggttttgttgcagtggcaatcttcttagttgtgcttacacttcttcctgtatgggatgagcttgcagaggagctaggtataggtcttgtaaccactttttgatttttataaaaatataataataaataattaataatgtatatgaaattcaattttgactctttacatcaatttccatggtcaaaaaatgagtatactaccttgtaattattattcttattttattactattttttaaaaataaaaaattattagcttttagaatacatactcttcaattatttgcataatattagttattaggagtgtttacattatgattttggcataatgcaaaatatataaattgtgtgtataaattacttgtgtcatactaccattgaaaaggaaggtttggctttggaatgggatatcattcttaccatagtttatgattattgagaaattttagtgtgcactctcaaaaaaatatcaatgcactttaccataataattcatttttatagagaaagaatagagaaaaaaattcataggtacacctattttttttaaatcgatacatcctaaaaattgttagggaattttcccaccttttatattttacccacatataaagtaaatatctatttatgtttattaattacattttgtataattatggtaaatattagacaaagattaattaccaaaaatatttggaagaactcaattaaatgaatcagaagagctcaatgtatcttcaaagacaatacattatttatttaagaataagtaagatttttatccccaattttttttttaaaaagacaatgttcaattgaaattagacttcttagttattacatacgatatgttcaaaaataaacgacacattaatcatgcctgcaagatttttaaaaaaatgtccacttagtaatattgtgagcgtaaaagtatattacaaataagaacatagttaccaatacgctagtttgagggattctcgctcaacgttttgatagcaatctctgaattgctttcgatgataacaaaacaatgcttcaattcagttgctgtttgaagcgccagcacacaggccttcacttcaccaatcaagggatcagagtagacaaagacttagaagcaatctacaaaacagttctcgcatggtcacaagctaactctacggtacacatcgacccactctccacttatacatcatacttaatcttgatccaatcaacatgaggaggagactaataaaagggcatcaacaagaacaattgcaaataaagaagatttataatctgcataataataagtgatagaatcaatatgatatgtaatgttatacaaatcattattgtgttaaatgatgtgcacgaaacataatagaaaaccatataaaaggggttataaccaaatgataatagtttgtgataaaataagatgacgacaatcaatgaacccactcaatcaaaacgacaacaaaacaacaaacgacaaatccacactctctcttcttctttttcaatgcgctgaactactccttccatcggctaaccccaacacgaactcgccaacgtttcactcac

SEQ ID NO: 184314 - DNA, 739 bp, Cannabis indica
atatatatatatttgatttattatttatagtataaagtatatataggtgacatattatttgtgttattggagaaaagaatagagagagatgatgtgttagtcaatggagaggttattttgttaggtccatatatatagcaatagtacaaagaatccatattcatcctaataagacaaattagcctaacccttctcatcttctctaccatctctattctatgctgttattacttctttctgactcatgactcgatcatcttcttcatcatttttattctattttatattttgaagaattaaaacaaaaaaaaaagaagttaaatttggcatttgactcataccaataatattatttttgtgtgaaaaataatgttaatgaaagggacaagttgagagcatttcaataattcatgtacggccatgtgatcgattagcaattcattcaaattaatttatatttatatatatatctctttactcttcttcctttttatatacatatatatatatatatatatattgatcaatatgatatatcatcatcactaaattaaaatgatattttagttgtttaattgaaatattttacttattcttatatatataaatgtgattttgattaatacttttagaaacatgacaaattaattaacttctatgactaattaatgtaattggatcttataaaactgcataagagaggaaaaataaaaaataaaaattggcaatataaataatt

SEQ ID NO: 184315 - DNA, 6992 bp, Cannabis indica
tggtattctcagtcatttatctttgcattcaactgctacaattgcattcgctatgtctttgagagatggttcgttgaatctcactaatacttggacacgccaactctctgaaactgcatctggaaatgtatgtattgctgttttattttctatttctggctgagtcaaaattatgttgcatacatacacataaagctactgacctacactatgcttactcatgtctttatgctatctcgtacagttgtattctaatgaattgatctggccactaatcttttttactttttatttatttattgcctgctatttaacagatacaacttggtttaggcccggaatcatctattacggtaggatggcaaaagaaagcaaaaacaatgtcagcctctggagaagtaaaggtagttgtttgggtcctcttttacgtttattccccaataaaagaatctggtagaacttctacaatgaaagcaagtaatttgaactctccatattggtgggattattccaaagcacaaaattatagtgtggcaccgaactaggacagtatactagtttcattttgttgaaattctgtgcattctttgtgtgaattattatttggtaatttttttagcaattgattacttgtaaaatatgtatgaactcctctttctcttattatgcttaaagttaaaacacgaaattctttttttattaattgggactcatcaattctctttataaaaccatatggatgtattgatttcatatctctcactttcattccactatcacagttgggcaccagctctttcggggcatcagcacattacaatcatcgattctcatccaagtctcatggccgtatcggaggcaaagttgggaggtatttgcaaagtagattgtattactattttagtgtagatgctttatgctgacaaattgtatttgttattccataaatcctttgtttttattggctactttgctttcttctttttattttcagataatattcattagtaactgatattggtatcttacttggtcttgtggtgtgtgtaccttcatgtcctgtgctatcctcttctgactttttaatattgttgctgcagcaccaatcttgaacttgaagttggcgggggaaggaagatatctagttttagcactgtccgcatgatgtattcaataggaattcaggtattgaaaacagaaaatgtgttcaattagctttgccttgaaagtgatacttcagcctttcggtttcatgtgctctgatatatcaaaaaatctaatctttcattatttttttgtttgcagggaattttctggagatttgaactgcaccggggtggtcaaaagttaattgttcctgtaagcacaatcctactcctcttgctatgaacatgtgtattgatataaagtcaaatatataaaaatttattgttgatataaagttatttagcagtcacctttcctaactttccttggttttagttatttattacaaagttgattgttttaatatatttgtcagatactttttattatactacagtgtgtttgttgctattaatgctggacctcctttacttgcagattttactaacgaggcatttaaatccagtgtttgcaactggagctctcgttgtccctacatcattatactttatactcaaggtttatacaataccgtactcatgtttttttaactaatctatcaacccgtttaagtatttgtcctatatatttttctttccaattctctctctctctctctcttttctttttttttttgttattcaaggccatgtaacttgaactttgtctcttgaagctttatacaatctttggatataatgcttttcttactggcagtaaaccatttggcttaatcgcataataattttcataatccgtttttgggctttaatcaaacttttaagtgaaacactatactagttaacatgtaatcttttgtttctctacaaagattttcaggcaccatttcttgttattgtgtcttgtgaaactaactgccaggattatttttttatatgatattttaattggattaagaagtttgaaatcgctgtactctttgttgcttgcagaaatttgttttcaaaccttattacctgaagagagaaaaacagaaagccttggagaatatggaaaaaacttccgaaaaggtatgttgacatgagcggagatttatagaggcttgctttctttgtgctggtttttatgtaaacatataattttatatttcttatatggaagtattgaagaatttaagtccctattatgtatacaggtaaaagagtcaagagcagcagctgagaaagctcagcagttacttcaaaatgtagccaacaggaaaaaagctaggcaattagagagagatggactggtgatcaccaaagcactctatggaagttctaaagctttgaagaaaattaatgaacctgcagaaggaaacgaggacgaatcagcttcacaaatcatagatgtcaccttacctcttaattttctggtcaatgattctggccagctcaaggtatgcatactctttcgacattcatagtatttgaaatcatgaacacttacttgtagtttagtttcgaaagcctctttgaaatttgatctgatcgtcgtcattatctgatggtgcagctccacgaaggtgtaaagaagtcgggtatcatgggtttttgtgatccttgtcctggagaagccaagcaattggatgtggaatacacttgtggtcatggaagatatgaggtagagtgtaaatttaagttgtattgtgatgaatgtgatgaatgtgttgtcatattggtcttttaacccatagtggttgtttgttgtttcaggtggtggttgatgattttggggagttgatactacctcaagaagttcacagagtttaaatatacagtacaaattattgtcactttaaatttacaaaccacctcttccaattttgtattgtttttttatatatatgcctttgagtttgaggtgacccaataactaatcaatcatttattttcttttttatacattacatttacattcattccaagtcggttggtgtatctctttcttctccctttttttcttctgttgttgctcaaagtgaaataaaggtcattgctttatagtttattttcacaatgctactaattttacttgattttttctattttgatttactagcaaagcaaggtttttttttttttaataatggaattttattaatgacaactaattgaaataatagtctccaatccaattggaacacctcttcgtttggttaaagacacgattaggattagaactaaaaaaatgagttaaataatcaactgtctaattctcaaattgcttgacaaaaaaattaaaataaaatcagataacatcacaattaactataaagacaattatattctatttcatttattgctcacaagacaacagtagaaattattgcatcaagttcattcaatctcgtagcttgagcgttcaattattgtgtaaggtacataattacactactagcaactcctcagtcgcaaagaacttgttatttccaaccattgataacgatttgatggcgaactattgaagacaaataagaaccaacaacgaaataaaacaaaacaaaattatatcacacaaacaagatgaaaacacttaaaccatgtcacatagacaagacgaaaacactcaaatctatgtcacagagacaagaataaaacattcaaaaccatatcacagagacaaaactaatggcagtagcaaaaattgaattgcagaagcaaaattcaatctcgaccaagcccacctaagcctaaaaaaagttgcgagtctggcaaaaaaagaataatactcttatagctatagatactaattttacagagagatagtttggtatgaaatgagggaaaatgatgagaaataaatgagaatacaatacagccatctctccaatctataaattaataaaagaagaaaaaaaaaaacaaatggggtttgtgtcaatgaatgaattggtgtttactctaaactattgataatgatgataaatacataagaatgagtcactatgagaaaacatgtttgacaatgagttcaccatttgatggctcaaaccatgcctccatcactactgcacaacattcacttgagcttgatgatgatgatccttctattccaactgccacaggtttcgccaaaagctttactccttgcttccaatatctctcctctgaaatttttcatttcaaaaaattagttcagtaatcttaggtactagtttgaacaaaagtgtgtcagcagcaactgttagtataataccaggaatcaaattttacctggaccggtggacaagacgatggagttctccaaatccatcacccagtctatccatagagcaaatccatggcacatcccaggctcatcaaattcaacctggtcaaaacatcaaccacaagactcagctttcaatagccactgttgaaattctatattccaattcactacattacacaagattactaccatttacaatattagatttcaaggggaaattgtagataccttgatctgtccagaacatgggcttattggtttcgagaaatcaaactccattattgtaaaaacactactgagtttctgttaaagacagcatcatcattaatctatctaaaagtaaaggtacatttcaatacaagagaatatgaatgaaaaatgagaccttatattttccagactgccaaacaaaacaaggcagacaaggaccctcttgcgggaaggtaattcaccgcacgctcctaaagtggtatttgcaactgaatgatcgaaaccttcaatcttatctaagcagcgacggctactccaaagatcctgcaagcaaggtcgtatatgacatagttttagttctgtttacaagaatcattggcaaggtctcatagggatggcaaaaccaaaacttacagggagagacatggcacaagccttcaaaacccctttacaaggcattatcaatgcgtcttcagagaggacagagttgagcattgtcctttccttccttgtatcagccaaaaaccaagaaaaatgacttcaagagcaatactaatgagagaaaatgacacaatgaaattagagataactgttaattaccaaaatcgcaagttatgccatggaagcatgccctcagttccggtatagaaaggttctccaatcaacaagtcaacctacaatcaacattgcagaatcaacatcttcttccttgctaaacatacagtctaaattatgaaaaagaagacctttttgtggtttgtatcgagcatactcgagagtgattgcttcttttcaagaacttgcactcggtccatagagaagccattcgcatcagcaacagcttgcaaatattgagcacccttggcccgcagacctgggaacaatgatattatgttcgatgtgtttgaaagttgtgcgacgaggattgttaagaaaacactatcatctgcaacgacacatagtggatcaattcttccctttaactgaaaagaaagcaaggtgtcaatattcagaaaacaagggataacaaacttaaggcttgttgtcgattgaaattcggtgatcatgagtgagatagagaaataaacatagagagcttactgcatttcttatggctgtcaacatgattctcctccaaacatcattgccatagattgcaattctttcaggcgaaagtaagagctgagaatctacacccttgatgccatgcatcttaatttcagtttgtgattgtttataaagattataagagatgctagtttcatcatggacagcttgcaaatgaacctcttcatcattggaaacgggaatgccttggcccggaacaaaccagacacactgtttccagtggtcacaccatccttcatcacctgctgaaccataacaaaaaacaaggaaaagctgtgttacccttgaaagtaacatcaatcattattaaaacaaatcaaacttcttaaagaaaactacaagttttttaaacagtttaaaggacactcatgaagcatttcaccatggacaacatttccaaaaatacaaacttttcaaaagaaaaaaaaaggccaattttttttgtttaaatatcagaaaacactatgctgctacactattgccttaaatagttcaactttcttccgagattttgttaggcactaggattagaaaggtgcgctagcatatacaagtaaataagtttttgtttgggaaagtagtattgagtgagaaattactttatataggtaagtaagggaagaattgggttatgcaatgaattgagtaaaactctttgcatcaaaagggcctaagagctcccatagtttgtaattctggttctctatagttttactactgttctattgtttttctgctactattgctgcagttggtgctatttgctactgtttgtgtgtgtgtgttttgctactggtttggttgatcgaaacagtgtcatcagattttctaaagcattacagcaaaaagtagattaaatggttccattcactagtgaaaaaaagtccatagctcacttttgtattttgcaaagtaatccatctcggggcagtagaatagaatatcgtcccttcacgatcaagctgaagtacccacctgaatatggaaggaatcacagaactaaagttaatataacaatgttcagaagtgaatgcaaagacaagaaaaatgttaatgttaaaataattaccatgaaactacagcatgaatttgaccatcattagttgcttttatactcacttgagtttctccatgactgtctggccttttccaaaagtcaatttcaaaaattttgaagggttcggacagctggatggatttaaatcgagtaggaaataaaccatttgtatgattccaataacattattgaagatcaaatgatcatatagttagttaccagttttatttctttctct

SEQ ID NO: 184316 - DNA, 1839 bp, Cannabis indica
aagtagaacattagaagaagagagtgccacctcatttcttcaaaacccttctttatatattgattgataattttgctaaatagggttgttttatattcaattgtaagggcttgtttggtatgccgtataagggccgtactgtattaaataataaataacactatgtttggataaaataatgtattgtattaattattacgactaaatttttaatacataaaaaatggtccgtattagcttgtattataatatttacaaaggatttagggtcagtctcaatctccgacccgaactcgaaaccgaatctgaatccaaatccgggacacagactcagaccgggactcagacacgaactcaggagctgaacccagaccccgacccagaactgggagccggaccagaacctagacctagaccgagacccgtatcgggacccggatccgaatccgacctagacccaggacccaggacccaaactcggacctgacttgtagttggtgttggagtcgagtgtattgaaaatatactataactttacacaatctattaataaagtcaatacaagacatagtattgtattaaataatattaatataatataatcaaacacaatataatacaataaaatacggcgtactaaatgaaccctaaaataataaattaaggagaagatataagaaagtatacaaacaaaatcactcatattttttttgttttgtttttaagaaagaaaattaaaacattataggcatttaaaataaagtaaaatgtggtttgtattgtatagtatgccaaagtaaatgttgacaactggtgcttcatttttctcattcgtataactggtgcaacaacaaacaactgtgccaaatgacaaaattagataaatctattcaaaacacaatttaaaataaaaaccataatgtctacttcaaccttttgtatatagtaacatatttacatatttaaaaagactatatctatatatctatcgacttgtgagtttaacgtcaaaggtaatcacgagaaagtttagactatgtttctgccaaacacttgataacaaaataataattaatgaaatctgcttaaacgagtatattttatatcaaatatatatatactctcgttaattctaaaaaaataaattcaaaatggagatatttttttctgacaaaaaaattataatctgtgttttagaaaagggcactatttttgtaatgttaaaaaattatatattaaaattccgacataattaaatagaattatattaatttgagttttgtttttaagataagtctgaacagcgttatgaaagtgcggttaatcttgtttaatttaaacaacataaaataatagtattatattcccttacattaaaaaatagagaagaagaagaaagagtaaattgatgtgggagggaggcagtactgagactgagaatttgatcagtttaagacaaaagaagcagtccacgtcagcagaatggagccccgtgaagagacgagggtggtgttaattccgcgttcttaattctgttttctctccacactgtacgacacgttctctctctctatttccccaccgacaatcaaacgcgttgccgtaggtgggcccctctctcaattattaatacagatttttgctatttaaaaaaatattacaatttcgttacatgagattctttttctcggtttatcataatattttctttttattttgggtaacatcaaaaattaaaaattctaaaatatatctcttatgtatatatatatatatatttttatgaatgattagtatttttacatttaaagttttaacacgatcttgtctttaaaatat

SEQ ID NO: 184317 - DNA, 3017 bp, Cannabis indica
aacatttttgaagagaagaagtgatctaattaagaaagctcacatggcctaagaattctcatgaagttaggtctctcataaatgattttacataacttccattgctcaaaaaccagcttcaaaaagacttcatactatggcagatttcttaaaggaaagaatcaagaaagtaaacacaaaaatagggaaattaggtcaaactcaaactatgactactaccactactactactaatactagttcaaagtctaagattattgtccttggtagtggtagtaatcaagaaaaggctatcttagaagaaagttacattgctgagctcaatggtagtaaccaactggctgaatttgtttctgatttggataacaaaattgaacaagtgaatgagagaatcaggcatttgattcatctcaaataaaaatggactgtgttttgtgtaaagtctagttgggcacttcatattctgagtatttgagtttttaaagaaagagaatgaccaatttaataaaggagcacactaaaagatctatctttccgtggttcaagctatctgtagctctatggttatgctttctatgtttggcaaagttattagtgattgtaagaccttattatgtactttgcataatgtttcttttcattttataaaatgatcagcaaatatagcggttcactcctttgcgagagcctctatatcccaccctgatcgccttttcaacttgaacactatttcgattgatttgttaccaagcttggtaacataaagagcatcaagcaatgatttgcaaaacaataccaagtaagattaccatgatcaatttatggatgagaagatctttttcctttgtctactctctaactttcgtttaacagattatggtaatcctttattcagttaaagatatgaaaagtcattaatgaaaatcatataaatacttgctgctacaccatactaaagttttaacttagcttcaccatacagagtgaatggagcactcaatcaaaatatacttttttttgagaaacaataagaagatacttaaacatgcacacatagtagtgttttgcatgttacttatgggtcccaattttatctcacatgttggagcaagaatatgtcatatagttttaagtgtttatatatattgttacagctgctgagatgagagcattttagcagaacagtatatacttttgacaacttggtttgcattttgtcctttcatttttagtaaattaaatccatgtagtgctacaatgacctgacaaagccatgtgatatgaggctgagcatgattatcacaccactttcactttcactttcccatattcaatcattccttgtttgcctcttatgtttcctcttatgtttcctggtttcaatcaaaatatcttacgacacaacatcccaattccattctccttgtcaaatttgaaagtctaaaactgtcattaatagtatttaagaaagaggtgaccatgcaagcaatagaaattcaaaatgagctatgaatgagagccaagactttcacgtgtaacatttaatgataataataataggattattgataaccatttcaggacttgagcggttttacaaacacatcaaagccctttgaccttcaaattttaaagagggtcaaaacatagctatcatttctctcagtacatattttgcttcttcttttttctttttttacttccttaataatataatgctctcaagagtttacacaaacttacacaagtggtcttaaggagactcagcaacgagtaattattcaccaggctcactcgcattaaacctacttaacaagattctctctaccagacttcatccccaaaagcttgcgctgtacggaaaatctgtgagaagcacaacacactgcccatgtaccacaaaacctacctaagttgacatattgttgccagcgcttagtttatgctgccgaacctgcttgctcgcataggtccaataaatccagtgtctgcagagtaatttaaagttaaaaacaccgttagcatgtgtacgtatagcattcttagcagatacctatcgaaatgttgaaaaatatctatcatacctcaggaactgagagctcaaggcgaaactttggaccatcatagtgatgtaagactggcctaaatgaatcttcttccaaagccttgcacacttttctaacacggatcctcacctgcaatagaaggaaacatttggtctcaatgttgtcgtctcccaaatattctaatcgaactatcataagaaatttctcaaaacaaatcttacctgagcaggaaaccttgactctcctttgcacttcttatcttcccaggcagttggatcaatgtttgaaccaccaaaacttgcagcctgtgaaagaacattacatatgaaattaaaataacatgagaagaaggccgcattcaagaaagaatcatctaccaattgtagattagatattaataagattttttaacctaacatggttgttttgcatataaaagtaacaaatagttaaagaacaaacctcaaagataccatgtagctggtgagtagtatagttgtagagaaataagggtaagcctggtgttatggcacgaacagaatccctatatcttggaggtaaacctatcaaagaaacacaataatcaactcaaaatcatggataataaaatgtgacattcttaacaaatgctgtgatattctaaacatacatacaaagatcatttgcagatacagcctaagaatgcagtgttgaattattaaaatagttgaatttaccaaatagctgccgcttcaaatcttcttgcatagtgtcattgttgcaaacgaaaatgtaacctcctagcacttcatttcgagggagggtctcagtagcaggcaaggtcttgaaccttttgtcagctacattgtttgcattaccattgtcactattgttgttattgctgatgttgatagagtccttgtggctcaggttgtttccactatacttgttaatggtcatattccccacaat

SEQ ID NO: 184318 - DNA, 4223 bp, Cannabis indica
ttcttactcacaatatgtaccaactttcttttgtctctttttgtagcaaaatttcggttcaaaatcctgccgcattgccctcaaatccgaagcaaagagtggttgcttcatgggaaccaacagttttagctacaatcattattcctagtgagtaagctctcatacacccttggcattagttttaattggctatacaaggcatttacttgtctgacttttttcctctgccaacttgaaggtatgtggggcctattatcaccctttgctctgagcggagaggggagcaactggagtatacatttattgacaggttagttcttctgatattaaaaaggaaattattgtacaagtttagctgtcttaattcattccatcgatagtcctcatgtgataaatgaatgataaatagtggggacattgcagcattttatggtatttgtgttcaaaaagtttctcttgtatatatttttatattttagtagtgctaagtaaactctattcttatacactctcctttattaatgcatgacatgtaaatattatgtaaatatcatacataatatagagatggtgtaaagtacagtctaatatagagtgcatttagcattcagtttctgtattatttgatttgaattaaagtaaatcttttttaaagatgcaatgaattttcgctgagctgaaggtgttatattaatcccccttctgtttatataaatgcagcctacgagttttcttgaaatatcgcttacctttgagggaaatcgttgttgacttttataatgaattgaagagtataacatcaggttatgcgtcatttgattacgaggactcggagtaagtgtctaactattctcaacacatctacctgcgcttcttgtcaagatcagatacagaggaacttttttacttcatatatttataatgttcacttgttatgtgtggtatttattgacagatatcagcagtctgacttggtgaaacttgatatcctgttaaatggtcaaccagtcgatgcaatggcaagcattgtgcataatttaaaggcgcaacgtgttggtcgtgaacaggtggagaagctgaggaaattcatagacaggtatttttatctgtaattagaagttacatgttacttcttttgtcaatgttgtccttgctcaggatgttctattatgaacaggcaaatgtttgagataattatacaagctgccatcggatcaaaggttgttgcaagagaaacgtaagctcttcactttagaatgtttggtttcgattttgccctcaagttagaccattcagctacttatttctattcttttattaggatttctgctatgaggaaaaatgttcttgccaagtgttacggtggggatgttagtcggaaaaagaagctgttggagaagcaaaaggaaggaaagaaacgaatgaagcgtgttggttctgttgatataccccaagaagcatttcatcaactgcttaaggtttcatagaaaggaatacccaacaacaaacagccatatctgcaagtaataaaactggcttccactgttttcccctgaaatcaaattcatattgtgttcctcttaaatagttgaatatagccttaacaagagagccagtaaccgtgaagcagttacatgctatggtatgatgcttgatgatatttttttttaaattttgttcgaaagatctcaccatgaggattttacaacagataagtaagaagtcatacataacattttggagctatgaaagaagtaaagaggggtgccttggctccaagaactcctatcgtatgttgtcaacagacacttttcatttttgtccacacttttttctttcccagaccataacccatgaggattatgtgtacataaaattgtaactcaattttgttcaccatagaccaaatgttagaaaataaaaacagaattcttttattaagcagttaatgatgggatttagctttaaaatttcagcaaatttgtagttatcaatttaattttttatattatttaataatgtgtcgttaattatttttccgctagtcattacaatagagagtaacacaacacaaactgtcatgcaacacaaactgtcttatttacagatcgtttgacaaaatataaacgacagtcctacaccagcaacccgaaaccagaaggcatattaacgtttggtcaatcatttaccatatatagtttcttaaattgataacgttgcttgaatttttataattttgttatgtaagatggtacactctaaaaagaaacgtcgaacttcaagcagagaaaaatttgtaaaaactagtaagaatatcaatattatatatgtatattatgtgataatataatgtggtagcgtttcaatactgttacatgaggaactatatatatatgagactactaacaattatgaagcagtgttgatacgctgccacaccatatacaaataccactatacgtacatattatatatatttatgtaacaacattaatgctatattatgtaataaatctacaaattcaagactaagcttagaacttaaaagtttgaagatgacaatctgttgaagtagctagaagaaagtccttgaccattctgcagagtcaacggattatgtgaaacagccttactattattattattagtatttgcagttgtagctgtagtagtagtaatattagtattagtattagtactaacatcacccaaagtcaaccgttgacttaacttctcaactccatcttgcttccggccaagatgggtttcaccacctccaaccatggacgagattgcagccgcgataaccgatttgaaagtgcttgggtcagaagttatagccttggtcaacgtttcagtcaacgtttcatgtgcagatgaaccttgattatgattattattattataactcactatcttttctgcacaacgttggtaaatgaattcttgggcctgtttagtaccaccaagattcaaaggcccattattagtttgatgggctttgtcgtaatacattgggccgtaatttaagtagcccacattattaccccaaagtggtggttgtttgggctcagatgtgggcccaaaactatggagtgatgatgatcttgaatttgatgatggagcaaaagctgatgttgttgaagaggttaattgtggtgtggtaagatcaagagtgatagttgggaacaaaggagataaactagtagaggaatagaattgttttgttcttagggtatgatcaaaataattgaagttgttattattttgtacaagcccatttatcatgttaaggggtgatgagtttttgttgggtgtgaaaaatggatggtcatgatgattagatgatgaggttgaagagccagataataacatagaggccgcggccgaagtggtggaagccatggccgtggccgtcaccggaagggggtggttgtggctcccttcataggtggtgataagtatggacatgtcgtccgcacatctttgtacctgaacaattaattaataaatattaaatatatgcacaaaattaattaattaaaaaaaaataatcgaaagtataaacttcattacgaaatcaaatcgttttgtagtagaataaaagctctaactaaccacccaattcatagattgtttaacatataccttaaaaaatcatattaattggctataagctttcattttattttggtttttaataggtaaattgaacaaagtacattacaaaaatatatattttaaaaaaataaattttatgaaaaaattgaagaaaatgttataaaaaaaatgagtattgagtaaaaataactaggtaattttatggtaaacagatgagtaactaattactataaaaaaaaaagtaattagatacctgatagtgtttttttcatattttatatcttttttctaaaactttcccattaaataatgttttttttttagaaaaaactatattttcccaaacttatacttcaaaaaccataaaaataaaaactaccctgaaaatatagctcaaaaaccaaaattataactagctaaagataagtaaaatatttgatttatgttttttatttgataactatattttaaaaatatgtttataatgaaaagttttaaagaattttatttttttggatatcattcaaaaaataatattttttgctagtaaattataaatttcatataaatgattgttttatccaaattaacaccccaatatt

SEQ ID NO: 184319 - DNA, 2927 bp, Cannabis indica
gttacatctttagagcctccattggctctcttcttgctcggttttttgggtggggcatctgaggtgccaaaggtaaacgatgtcggtgctcccacaaatgatttattagtatccaacagagggattgaaggtcgaagtagggcagtggaatggttggcaatgaagttggatgagttgcctgaagaactggagtgagaggaatggctaaaacccaaaatcagagacgtttgttggtctgatatgttactcgtggtggtattgagcaaggcagtgaaagaaggtacaagttcaatatgtggagtgggaactggaatagtggtatggggtggagtgttgttccagggtgaggggttttgttcagtattggcattagcaaacatgtaaagacctgcaggttgagtggaggctaagtttgctatgaaatttgtcaattgcagtgacgaaaaaatcactgggctaacttgggtggagacgcataagccactagctggatataactgactccaatattttgcaccaatagaaaaacacacaaatttgagttataatacagagcctctcttccttacaaatatccattagaattattgaggaaattacattgtatacctactttattttatttgtttttttttttacttgtattttcatattctataatatataccaacttttatagataatatatatccccattataccttttatgttaatataaattatgtactagacttaagtggatggtaaaggtatattggacaacccacccacaaaagtgagtacattttaatgaaatatagtatgagagtatttttgattaataaatatataaaaaaaaaaaactatatttctcaacttatttcaaaattatatgcgaattaattatttcaattttgaaaatatcttctcaaaactactcttttcaacaagatttttagaatttcctaacttttcctaaaagaatagttttaaattaaaaaattatgtgtttatttttatccacacaaactcctacaaggtactttttttttttctcaattgtaaaaactgaaaaagatcacatctaagtcaaaccagccattaaccagctataatataactgagaaaaatagctagaattgtaatttccaaattaatcgctattcatttatttcataaactctcattactatttgtataacatattgtagtacatgatcaacattatttattcttctcttatcaccattaatatatatatgtatatataggaattttgtctcacgggcagaaagtgatgagatagttagcaccaaagcacgtaaaggtgctgttcttatcatcataagcgtagctgtaagctttcagggcatttttcctcgaagaatttagaaaattcagttggaggacacgtctctggcttgtcattcgcccctttacaacagtacttgtcctcgttgaacttggcacaagcgctaagacacccaacgacgtcgtttccagatttgacctggaactgagccgggcatacggcgttgatattgaccggacatgatgactgcttgcagtcgcctctaccgccttgcggggcaaccgaggcggccacattgaagccgtctacattgctgacgtcgtagtagtcttttccttctctatcttcgatggtgaattcgatgagtgtggccggaggttttccagtaccaccgttgcactcgaccttgcccgtgccgcagtctccagtggcgcaagtgaacttgccgaagggctcggctgagcatcgagttctggcccagaaacgacctttccaaagtccctttggaatgtccaccgatcgggttgcaccgggtttcaactcgaagccagtggttgatagttggggtttctggtcggcagttagggttgctggccagataggtcttggacagttgtttttcatggtgatggtagccgcatttgctcctgaaataatattcacgcaatgcaccattaatatttatatatatagattaacgaaacatgatttaatatatattattgcaacgtataaataacataaatatatacatttatatagaaacgaaaattcatttgtatattattgcaagatatatgtacaccttatccatcagtttttactattcaaaaagggtccattaatacatttaattaaaatatatatacatagaaaatgaattttatccatttactataaaagagccgaatcatcattaggtgatgtaatataaaatttatttgatatagcctaacccttaaatttactgaatctaatagtgatcaaagtatggagacaaattccaattagtttttttatattatttattaatttaaaatgtgtgtgggatgtgaatgcttgatatttaaggtagcccttagcctttttctatatatttgcaacctgccatacactatacaagtagttagcaatagtataatcaaccaaattacatgaacaaagagaaaagaaactaataccactataatgtagtgttattcatttatagttataaggagataaaaataacaattgtcattgtttattttagttttgaggtgaagcatatcgggcgtaagatagcaatgtacaattaaaagaacaagcattgaaaaaaaaaacaaatttattttacctgcaacaaagaaaaaagctaaagctagagagaccaaaacagttttcattgtgagcgaataatatataaatagctttatattacttgtttgatatatatgtataagtgatggattgagttttgattcatgaattgagaggaagcataaggtgttatttataggcttaacgaacccattttcttgggttgggtgttttagatttcttagtaaatttcaattgcgggtctaacttgctatgatcatttaagaaaattacaaacggttgtaaaaattacaaatatattgtgatatacgtggcc

SEQ ID NO: 184320 - DNA, 2809 bp, Cannabis indica
tttctatttcaatcaaacataaaaatgaacaacaccaaatttggattaaaataaaaaaataaaaaacaccactccaatcaatccaaatcatattaaaacaataaaacatcctctgttttactcatttcacaagttaaaaacaaaaaatttattaataattgtagactttgtggaggaaattgactcatttagggtttagcagagcagagagaataataaagagctgacctttattcatatactattttaatggcttttgtgagtaaaaaatcaatctttaaagagttttaagagagagaaatgaaaaaaaggaagaagccaactaccgagttgactgcgtaattatatccaatcatggagacacgcttttcttgctggctgttgtttgttgaggttgagattaaggacgaagatgaatatgatggtgctgtaaatagccaaaataaaaaacattaaacaccctttccttatttatttatttatttattattaaatttaatttaattccccatttttatagccatattttatgagattattcctcttgtctgatccattccattccatttttactactctctctctctgtacatctatctattattcgttcttggctggatcatttgatatatgtaaaaccaaagttgttatccccatctgggtttttttttctttgtagattttgattctccaaatgggtactggagattcttacttttgagtggaaatctcgatgtgggtattctcaagatttcatttttaaggggaatatctggggaccaggagaagattctaaattctttcatgactggtttcagagattaggattctctatttgagaaaaagttttggaattgatcagtcttctgactattttgtttgatatgacatttttgtgagtttcattggaaaagagattggatttctctcttttgtgtttttttatttttggtttctcgaagttgacgatattaatttattcattaactcatttgacattgttgtcaaaatcttttcttcttcttcttcttcattctctgtctgttgttttgtttttttattcaattagagaacacattgttctctctctttcgttaggaattatatggttagtgaggtcctaaccgatgtaaccaaatagctttcttatgtacgaggaaaaaaatattaaaaagaaactgttgtgagagggtggttactggtttggtgcaaaggaagaattttgttacacaaaaaggttacttttttattcatattttttcagtaccctttatctaaaacttttgggatggattaaggaagtggttgttggtgttcttcccttttgatgttccattcaagagatataaggagctctttctttctactcagccagaagaaagctttaataccataacataaccattactcaatgaaatttctaagcattgtggggaattcctttggatgttcagcatctggggaacgtttagtttcagctgctagagatggtgatcttcaagaagccaaggctttgttggaatgtaatccaaggttggttaggtactccacttttggtgttcgaaattctcctcttcattactctgcagctcagggtcaccatgaggtagtttctgctatgatttttcttcatatatacatacatatatataggaatgtttatgtttggattggtagtgattgtatatctctatgttcttaggtagtttctctgttgattgagtctggagtagatattaatctgagaaattatcgtgggcaggtaatattcaaaccttttcaatatgtatttagattgcttttatctcatgaaagattaaagaattgtgtttttacattttggtgaatagactgctttgatgcaagcttgtcaacatggtcattgggaagttgttctgattctcattcttttcaaagctaatgtaagattattattatcatcattccttgcaaagttttattttgattgataagattggtgatgtgatgagtttcttggcaatctaactatagattcacagagctgattacctgaatgggggtactgctcttcacttagcctctttgaatggtcatactcggtgtattcgccttctcctggctgattatattcctagctccccagttttcggtaaaacgttgaggaaagctgtagacaaggaagaatctaatccagattattataagaagtaagttgtttctctcagattatcactgttatctttaaatattttccaatgtgttctacttgagcttgagcaatctcattaagttgatttcttgttcctgttttgtgtacactagtgctttgtctcagattattaatagccctgctgatggaggggtaactgctctacatatggctgcattgaatggccacattgaaagtgtacaattgcttctagatctaggtggttcggtttctgtagtaactgtggaagacggaactacaatcgacctaatcggtacttaatcaattataccatttttcttgcttggaaatcaactgtagtcctttatgagatcaattatgttgtaaccattcttttagtgagcgtagattggctttgaaatatcaattctcgggttctttcctggtaaactttgcagtatctcttgatgcaaaattcaatgtcaaaagtgttctcattgccccttttaaatcttaagaaatgatttcaaacctgcctgcagaactttcgggttttctacaatgtatatgttcttgcatacttgttagtatgtcttttcaattttcattaatttatatcatctctatagttcaaatcatagttcatgatgactaagt

SEQ ID NO: 184321 - DNA, 9083 bp, Cannabis indica
ctttttgttttgttttttgtttgtgcgtgtagtaaggagatgtttgggataaaccccccgtctctcttctaactaggagagaaagctctgcgagcttcccccttgctctatagaaatggaaggaaatgcccgcccgttgttccaaaggcgtcttggagcaagaacctccgctcgcgggcgggcttccctactattggatcgcgaaccgatgccgtatggaagactctaaccactgagttaagtaggtcaatgagagttcctattcgatccatttcttttcttcttcaattgatcatagcccactaggtgtaaagtgactgggttccaaacctcacccttgataaaaaaaaagagatttaagctgcttcatagatttctgtctttttgttacgcgacagcatcacggttgttacagtcggcgctctgcgttcatgatactggggtggggttccttgatattaaggtgtcaaggcggtcgggaattggctgaggaagaggaagaaccaacacttttcttatctgtagctgttggaacaggggcggttgaagaaagtcgtctggggactagagcgcccgccttgatcaatgcgaaattgatcgagatgggatcatgatttgattggaaatgcgtaagtaagaggagatgggagtaaccgggcgttctttatactatgaaaaacctttttcatttctttcattttatagaaactagtgatgcacttctatagcctttatagtgaagttcactcctttggtattgaaacctccaactcttattttagcagcagaaatggccttcttctttgctgctacagcggaaaccttcaaatcagaagaaacttcctctttggctttgaagctacagctaccttgaaatcaaaagctgctacaacgcgcggttgctattagcttatttatttacttgagacataggcataggcgggatagggatagggctttgtttgctttagcatagggctaaaaaataagctctataagccgaaatatagtacccgtaaaccccttcgttcctcttctttaccagaggggctaaagctatagaaacaaaaaaggctacttactagctttagtagcttgtgtactagcctcttaaaggaagcagggggactttatttgggctgctaagtagaagtagaaactataggcgaattcgcgccttgctgttaagtaaggtggaagctagctacttgcttgttaaaggtgcttgcccgcggctattcgtagatctggagttctatagccgattgtgctactttcaatccttagtagcgggtattaggtgagagggcgcctatatcatagcggttactgtgctttctggatacctttccatgctttaacaagccagctacgcaccttgctcttctcttagttgcaagttgctttgatttgggaataagctggaagtaaaaaaaaagtagtatgggttgaagtgaagggcgctagtaagtaataataagtagagcggaacactgttggctgaacaaaagacgtatgacttgagaaagtaagatcggagatctgttgtcgggaaaaggagctccaatggttctttagaataagaataataggtccttttagccaaatccaggttttgagtttacttctagttctggaccgatgggaactcctactcataaacgactagcttccagcttataacaccttttgggactctaaactaagtaaggtcttgaagagccttcgggtgtggttttgaggccagagagcgcgtacgtgtagaagcagaaactgcttatccgggcctcggtacgcttaaaagctcctcgcttttgttcaattataaataaataaataaccactttaatggagatttatagcatcattcaagtaaatacagattaagatcgtaaaaacataagcttgtaatatagctacacctaattccagaccggttaatgcaagaactataaataaaggaccaagatcccctataaaaaaaaatatatcattcatacatagcatagtccaagcgaacccacttaaaatctttactaaactatgaccggccatcatattagcaaataaacgtattcctaagcttaatgcgcgaaaacaataagaaattagctcaaggagtactaaaaaaggtgctaacggcagtgggactcctgcgggtaataaaaagcttaaaaaatgaagcccatgtctttgaaatcccactatagtaatgccaataaaaatagaaaatgagagacccaaagtaatgagaaaatgacttgtaactgtgaagctataaggtatcataccctgaagattacaaaataacaaaaaagtaaaagtgaccaagatgcaagggaaaaacttttgtttcacatttccggaaagaccacctatttgttcgtttaccaggttcagcacgaaatcataaataagctctaccaaggattgccaagcatttggtactaagtttcctcctccgtttttagtaacaaaataaaccagaagtaggaccaaactgagagttagcagcataaacaaagctgaatttgtgaatgagaaatacaagtttcctatattcataggaatcaatgggagaatggaaaattgctcaagtgggctggggaccaccgctagattcagagcatctgtataggctgcactattgactccgttttgggtcaaatcttccaagaaaaagattcttttcattatactatttaactttttgactgctcccccccaaaaaagaagagagacttgttcttgctctaaaaatgaagaaagacttgtcggaaatcgccggttgggttggtccaaccaagaaaaacatgggagtctttgggcattaatgaacacaacactcagtcagctttttctatttatttcgccttctcaggtgtttgttctctatacgagatttttgatttcaccaaatcggaagctatagtacagttttctcaggtgtggtgtgctttggtgtaaccgggggctggggccaaagaaagactgtaccgggtgtcctttcctctcgtcaggcaactatctttcactcactgaacactaacttaatccttattcttttgacctttagctttgtgtaattgagcttgacttagttggtttcaaaggggccccgtggcaggcaaccaagtctgctaaccttcactcctttttttctggtactgcttgctgagatcggcataaaagatagggatcggatggaggtttttattactttatttctttcacttgaacacagaagtgagctacctctattctatttgaagtaacggattcacctgccttagacagagacgaagcctagctttcttccttcacttatgaactagaaccatcccacagatcagatttcaaaccttacttgaaactctttctcgcctaacgtctctccgtgccttatgaacattgatttgccctcgagtagctgaactaggggaactcaaaacactcaccaaggagaaaagcgctggcctcaacccttgggttcactagaaatggtttctctctcttctcagccatcaaaccctgtcgctataaccggctcatctgtttacccgagttagacgcatcttaccttacatcaaaagtccctacccccatctttctccgtcacgtcgaatgagttttgggaaatgtgaaagaaaagaagatagatgcccggtgtctcattcaagctttaggcttgttcggaaagtcctatctttcccgcctctagccctatctttcgcctaggtggagaggaggcctattcgcagccttttatctgatacaatacgcaccttacctgaagatcaaattccccctggcgaactattcatattagattcaccggctggattcaggaagcgtgaaagcggtcagatggaagttcttcttactttcgaacggagaagcaccaactccaactattcatgccatcttcattgggctgacaagaaaaggcagcttccaagtcatatccccccttccctcgtccagtccatggcccggtctttcttttgaaactcttgccagagccttttctcctcataagcgtcagtccatgaactaaaggcggtgtgttaacccggaatattctttatatgtcactgccctctctgctgggaaatccctctgccttggtcaataagaaattcccgctctttcatctccttctttgaatctgattaattaattgacttgagcacaaggaatgggcttctgcctggaagaatgcattcccctaaacgagtttgtcgtcattgaaactggcgaaggcacatcaaccgaagtcagagcagaggagaaggctaggcaaagacccgcatcgagcttccccgggggcttagagagagttgtctctaggtattctctacctacccaccagtgtctccatctctggccaaggccaaccgaactatgaatctatctttccatccccaccagcaacttacccgccagcctttctccgttctgtagaaaaggatttcgagttgctagccggctcgtccttagatagacgaatcttctccagcgccttccatagaagagtcctgcttggagtgagaacagcttgataggtacgcctgttcatatttacaatcctagccttgaacactgatccctattgcttgaagttcggtccctactgccgagatacggaaactcgttgatgcgcttcctgcctctggaactacaggaattacggatttactcctcccgcctggactgctgaacttgattatattcaatagctactcccttccctagcatcaaaaaagtcttaaagacttccggcacaagcgcagaaacaggaacacttctacctagaccgcgttcaaccgattactttagagactgatacgcgctcactacggaaaaacaagttgagcaacttcccgcctctctttctcaagtgagacaaaggcattcaagatcgactgctaaaagacagatcttacctttactttacatcgcatttcttctttcagaaccttactatctattgagcttgaactactaaatatctattaaaccatatcaggtttactacagtttcactgccctgaagggagctagccctgcttcttcttcagtgtttgctaactgcttccgtgcttaatcccgcatgagaagagagaggaggtttctgaaacggacacggactcaaaactccctgagcctatacctccctggggctgagaagaaagcttagaattcgattggaacatttccttcgagggcactcataactaaactaaagtactggctcgcgaactgccagaattcggttttccctagtggattcaccagtcttgcggactcccttcagcttacttacgatcgaaatcactattttgctttctgagctatacgaaagaactagatcacgatctcgcgggactaagcacggaagcagttagaaagggaaagccaatcgtacgtcctggtttccgggactttcttcccacaggttattctatacaatttatgaaagagaggagaagccccactcggggagatgagtaaaagctttctcttatttgttgtgatgaatgatattttttatcctatttttgagcctatctcgctagttcattcaagcttatgaacaagcttggacagttctccttccttgtacattctgttcatccgaccaccgcccatgcttcaacatctaagttttcaccagaaaaaacccaatttttcttatggaaaaatagttggtagggcagaaagattagattcagttcagggaaaccaaacaaagaaagccaatcggaaatgattttatcactacgaatcaaaaagaaaactcggagcgagaatcaacatccttacttaggattaggctaggtcgcttgaggcttatggcgcttcctctgcggcttgtcgcgcttaaagaaggcaaaaagctgtcaacaagggcagtaccgggggaaggaagcagatggaatccagccggacaagcactggctttcggcagactagctcgctgctccagataactaatacaaagaaataaaaataagaatgaatgtcacgtacggcgctgccgaaggagctcttgaaagagcccacctcggatactaaagaaaggagtggctagacaggcaacttcactccgtgcatcctttggttgtgagccccgcctagagtgaggcgctaagggaagggcgtagcgttaaatctgcctcgcagctcgtagaggcaccgagaggtgatcgcgcaatcacactgtctcatgcagtgttcccgcaatttcagtccagtttagtcttcccacatatggcttggtggaaaaagttccttgccctgtagttagaaaggatagctattcaatcccagtcagtttgccgcaccgggttttcccttctatttagcttagttctagaagctgaacagctagcgtggttttgaggagcagtgccgggcagcagggattgaaagaagtagttccttctcggcttcagaaggaccgaaggttgcactacgttcagggattggtcttcctgttctttctcagccgctaaaggaagaaagatctctgatccagtggatgcttgaaagtgaggtaagccgatcccatgagaagggttcgagccgagctgctttagctggtagaaagcggttagcgcctgtcgtaaatttaggttctgaaagaaaaaaaggttagccgggttgtgacaatgaaaatttttcctattgattaaatatattcataactaacttagtgcaaaaatacatctagaaaaaccttttcagtaaggtaatactccccggaaaataacatcccaaaagccggtcctctctacaatgatagtagttgatttttatcctgattatcagttgttagagagattagggtaaggcaacgggaggttctaaccaaccacactgaataatacacgttcttttcatacctcacccttggtcgtcataagaggaccatagtaagcatcactatacccggttcactgtaccattacgaaaaaagaaaagattatcatgaatattatcattactatatgccctcgccgggtaactaatatgcgactgtacgtgctcctacaaacacgtgcttttattactattgtaggaaatatatcttttgattctaaggtaggaaggagagcttttgctaatgattctggtgtcaatgagaagagtaaacttagattgttttggaagaatttctacaaaatgctggatcaaccttctatcaatatgtgtaataacagtaatattaataaatatcataatgaagttgtgaagggcggattataaatctaaatttcaggaattaaatatcaataaagattatgagttgcgctctttacagacacaaatcgaagatctaacaatgaattttgatgaaaatagtgtgtttaaaagttcaattaaattgataaaaatgttaattggggataattccatttcagcaaaggagtatctaaagcagaagaagtgtggtctgtccgaagagtgtttaacttatctgaatgtgttaggtctatatacacttgaggcaataataattcattagggtctgtgttcaactgtttaaaggatttacccgtcgttaggttatctactttgatcgaacaacttgataatacagtaagagttcaagctggaatgaagatagcagcgaagttaaataaaagcaaagtgagtaggaaagattatgctatcggggtctgcttggttgagttcttggttgaacgaaaattgattattgtgaaaactgtaaacggctacacagaagatgtattacaagtatataaggggaagggtgcattaaaatgttacgctatgtgcaattttgacataagtctccttccgattaaactcaatctacccatggtgtgcaagccattagattggacatctaagaaggtctctcgagcctagaacgttagctgatattgaaggtggatacttaagcggagtaacgggggatttctataataggtttcgtctattatcttctcatgactatgagaatttctatatcctgttgaaagatccacatcttatgtgcaatgtattgaatacacttcaatctcaagtctttgagagaaacaataatgtattatcatacatattgaaatatcgtgaccttttagaagaggtgggtattcttatggatcgacgtctagcgaaggtgaatctccaaggtgcatctgacctattgaggtcatgttatgccaataacgaaggtattaaggaagtgtgtagctgtaagaaattattaagtgaattagttaagcgtgtgcagcgtgctaggtatgaagatttcgtattaacacttgcgagtgcatactcgggttatcaattttatcttcctgcgttcatcgacttccgtggtagaatctaccgcgcctaactcggaaattaatcaaatctctcttcatgccattgatctatggtaagactgtcatggctatgtctaaagatatttctcttcattatgaatccgtattaggtagaaaagaatgcggtgcgttagcctcactaatcaataccttctttaaggcctgggataattaatctaatggggcaatattgcatggtttatatcacaatacgctgatctgtctcggactaagcagataaccgtggaatctaacttcagaattgattggcataccctaaacattgccaaaaaggtcttgaagatccttggaactaaggtgggtaacaaaagggaccctgtctatgataataacaatgtttgggtagacacacatcctaaggatgtaatagacatcgatggtcaatatatatctattctcatatatgaattgaattgtcttcaggatgaatatgctttgcttaaaaatcagtatacctttaaaggtcaagaaagtgatccgctgctactctggagtctgaaatagctacactgcatgataaaattcaaacgatgtctgaagctaagaagcttcctaaggaaccggtggtgcgccctattactgagtacccaagggttccaaaccccgacctactctgtacgaaaaccctcctaccaaggcaaagaaaaagataagtaagaagaagtcaaatgctaagaaaaagaaaaagaaaccgaagga

SEQ ID NO: 184322 - DNA, 762 bp, Cannabis indica
gaatgttacttagatacattaaaaggaagattaaaaccagttttatcatattgtaagtcaaaagtgattagtgaaaataggttcaatcaaaatgctacaagaagaagatcattttatataatgacattaagaatatctatattttacttagcgccattaattcaataaatcattgttctttgtcaagaaaaattctgcaaaaagagattattctatcccaaaatatgtttgtgtcagcctatatttcatgattagttagcagcaattaacaaattagatttgaatgtataccttcttagagaagaagcgaattcctttatcaggaaagttagcttaataagttccccctaacaaaggatttgaaaggcttgcaatgctgaccttcaaacgaagcatatgcagacactgcaaatgcaacaacattcaaagccctttggatgttgtccccctaacaacatcacaaactcatggtccagtaagattaaagttccatcataaaatcaattaatgctaactaataaagcaactctttcctactaaattgtaattctcataagtttaagcctcaattgtaattctcagaaaaagactatgaacggaatgaggaatactaattctcaaagtttaagcctcaattgtaattctcaatcgtaatatatatatatatatatatatatatatatatatatatcctcaatcgtaatccacaatcaaatttgatttttagattgctaacatgaaagaagaagagtcaatcgcaat

SEQ ID NO: 184323 - DNA, 4538 bp, Cannabis indica
tccctattaatgtagccattacactgactgttccctcttgcccatctagctaaggcatcacaatcaacattgtcttttcgggagataaaataaaacttacaagtttcaaacaagttacataaattaaggacctccaaagctaaaggtttcaaggtccacatcggagggaacttcctctcattcaaagctgaaactaacacctttgcatccgaggcacaagcaaacgacttgaagtctctttgacctgcaatttgaagcgcccattgaattgctaagagctcagcttcagcagcagacgaagctgtggcgtttctcgcaaaccaccaggaggtgttactttgtctctccagtataccaactgctaaccccgctacgccatccttccaagagcatctgtcacacaaaaagcctgaccgtttgatcctatatagcccctcttggcacctccgctgttatactttggcccatgtcgagatcagcattggcgagaatcaaacactctgcataccttctcaaaatgcagcatctaacaatttcaatattgaccattttacctttgaataagaattcatttctggcattccaaatgccttcaaacaagcatcctatgaaggtgaaaacccggtcaacaagctcagtaggcagagaggagagaatccaactcaaccttctcttaggagaatcaccactgccttcctcaaaacacatgggaaacggaccactgaaccataaggctctcgcacaaggacactcctagaagatgtgtagaaccgtctcaagattattgtcacagaaggggcaagacagatctcccacaaagcccaacttatctccagtgggcacacaacccgtgatcactctccatatcatcatcgagtgcctagagtggacttcctttccccaaacttgcttccaaagcctcctatcttcaaatgatctaccctactgcgtagcaatgcatcctctcttgacagtgaatgtcccatcagccgcctccttccacactagggaatcattttgatcatgaggcagacgcttgatagctccaattctgttacctagagtctctccaaacatctctttaagtaattcaatgttccagctcccattgtcattagtcttgtctgctacggatctgagatttaagaacctcggtctcacctggttaaggagttcaatgaactcctcgtattccagccacgggatccatggttgcgtccatatatccaccgagtcccctcttcccaccaacgtcatgcacccttttcgaattatatctctagagttcaggatgcctttccaaaatgtcgaatcacttgctcttgcactagtgctccaaaaggattccttcttgcaatacttctcatttagacaagtcacccatggtctgtccatttttgaggcacactgccaggccaatttggccaccaatgccttgtttacagcctctagcttctgaaatcccaaacccccagccgtcatgggagaacacagcctatcccaccccaccaaggccataaactggtccttctccttattcccagtccaccaatatattctgattactctatcaatgtctcgacaagtagaaaccgggatcttgttagtagacatcgcataaagcgggatcgaaagtgctactgatttcaccaaggtagtacgccccgcaaaggatagaagtttggctttccaaccctcaatcctcttcaccaccttctctttcagaaacaagtattcttttctcttcctcctcttaaaagcaaagggattcccaagatgtttctctccgccatcacactcctttacattcagtattttgaggatgttactcttgagctcaccacccacattcccgaaaaaaagaacgcttaatttcaccaaactacacttctgacccgaccacgactcatatctatggatgcactccaagagatttgtcgctatcctctcatttgcccgaacgaacaaaatagtgtcatcgacgaacatcaagtggctaataatcggggtcgtcctcgaaatggatatgccatgtatctggcctctagattgctgcttaaggatcagttttgaaaggaccttatgacataagagaaataaaaaaggagagagcgggtcaccttggcgaagaccccttttaggcttgatttctttgtgggactccattgattaacaccgagtaggacaccgttcgaacacattccattataagctcacaaacccgagagtcaaacccattgcctttgagaacttcatggaggaaatccattcaattctatcataggcctaaagcatatcaagctttattgccatgagaccccctttccctttcttcctcttgatcgtgtgaaccaactattgggtcagaatagaacactcagctatccatctccctggaacgaaagccgattgaaatggagagattagcttgtcaataaccccccttaatctggtagctataatcttggagataattttgtaggtgaagttacacagactaatcggtcgaaacttatccacagaacacgcattctcctccttgggaatcaaacagataaaggtgtagttcaattgcctctccaaagacccagtagagaaaaaggattgcaccattcgaataacttcactcccttctatatcccaatatcttctataaaagcatctcggcataccatcaggccttggagccttcaaaggatgcatagcagccacaacgttccaaatttcgtctcttgcagggatagttttaatcataaaattctcctcccttgtgactgctggagagaaaaggtcaaaaaaagattcatctaaaaccgctccatccgagttatacagatcatgaaagaatccattgaaaacagtccctattttttgagactccgtttcccatccacccacagcgtttttaatggcagtaatctcggtccttcgtcttctaatgactgtggacgcatgaaaaaacttggagttccggttacctactttcaaccacagttcccttgatttttgtctccacatagactctttacgaatccacaattctgcgattctagtttgcagggaagcttcctctcgcaataaatcttctgacaaaggctgtttctggatccatccaattttctcctcaccttctttatcaaacatcacaatctccgaaaaaccccttttttcacatttgtgtagcgcgcaaccgagtatcccttaaccttccacatatgaaatctctcctgttacctctcaatctccaagcctgttcaatggatcctcacacgaattttctctcgcccaagcctcaaagaaaagaaaaggcttcataccccttagacgccccctgatcgtgtcaatgagaacataaccatgatccgagattgtaataggtgcattcaacaccttggccgtagggaaccttgtaatccaatctcccgaggcaagcgcatggtcgagtctttctctcgtaattcctccaaaaaatttattgttttgccaggagaacttacacccccgaaaaccaagatcgacaccccctgtcttcaacaagaaattctggagaatcgaagtatcatgaccagaaactcttttcccaccacacttctcccacggatgagcaattaaattcaagtctccgaccatcatccacggcctctggcacctgataatcctatcctccatccagtcctaaaaatattttttttcactatcatacggcctaccatagaccgcaaacaaattccattcccagctagagatcgggtcctttagtcgagcttcaaagaccccccccactagcttcaataaccttcaaattaacactaccattccaaagcaaagaaaaactgcccctattccctcagcaggaataattgaagagaattgaaatcctagtaagctaacaatctctacaatcccttcttccttacacttagtttccattaaaaaaatacaatctggattaaatcttctcacccaagacaacaaagcttgggacgtcggggttctacgaataccccggcatttccaagataggagcctcatagcgacggagggggcttgataagggccgcctcctcgcccgtcagactgtgagactcatgaatagttatatcaaccaaattgttatcaaaattcagacctttcatacttgggttaatcgattccactttactcccactgctcagcttttcacctcccttacttcccacttttgagcctcaggacgctcttcctgaacttccccctccccaacttcgagaataagttctttttttgatgctcgtcgtatcacggctactacttccaggaacaaaggtattaacctccaatgtaggtagcatagtaatcggggtcgccagcgttttctcccccagagtttccactttgtctccatgggcaataactggaacgatagacacgcacgccttttaatctactaagttttgaaagacatatcaacgacattactacatgaactataagttttgtaacacttaatcccgtaaattgattttttttcgtggaaaaccccttcaaactaccattcc

SEQ ID NO: 184324 - DNA, 900 bp, Cannabis indica
ataatacaatacaatacaacacggtacggtatgccaaatgaattcatcatgttactcgtcatgttttatgctgtaaaataaatagcgtgtattaccatgattctcattttagtttctttcttacaattatcatccacatcatgttctctccattttatgatctaggaatatgctatgctttgccctcacaaagaaatatgctttttttaacagttgtattaccattttcatatgattcttttgtgttttaaacagcattaatatgcctctttataatgaagttgggcaagccacattgagctgtatccatcaatttggggggtgaaaaaaatctaatggcggaggaggaacaactgagtaactcattagagtttaccccaacatgggttgttgctgttgtctgctttgtcattgttctcatctctttatgtgctgagcgttcacttcataagctgggaaaggtacataattctcatgttactataattgaattttttataaatcttaatcctataaataatctcttgttaacataatagcattggctaaaagttgatttcagttgataatgtctcttgatcttcttatcagaatatccaattcacctttgttaaagctgtagcctatgttgctactatggtggcagacatacatatatttatgttcaatccgaatcaaaatacacaatctcattaggtagaatgatttaactatatagtttaagttagttaggcattatttgtcaagtggtaacctgggtgagaatagcatccataaccaaacattattagatggtggtgcacgatagattataagattttgattgattaaagccttatttggtccacaattatcataagttcagttatcttgtaattattaattatttagttttttttt

SEQ ID NO: 184325 - DNA, 2699 bp, Cannabis indica
ttataatgtcttcgacaaagaaagatatggataggatcaaaggtccatggagccccgaagaggatgaggccttgcggaggcttgtccagaactatggcccgaggaactggtctctcattagtaaatcgatccctggtcggtccggaaagtcttgccgtttgaggtggtgtaatcagctttctcctgaggttgagcaccgaccctttactccggacgaggatgagacgatcgttagggctcatgcgaggttcgggaacaagtgggcaaccatagcccgcctcctcaatggcaggactgataacgctattaagaaccattggaattcaacactgaaaagaaaatgctcttctatgtttgacgattccaatggtgatgcccaggatcagcagcctctcaagagatcagccagtgtcggtgcgggtacagtcgttacgggtgggtttcttaaccccggtagtccatccggatctgacttgagcgattcgagtttacctggaatgcctttaacacaagtttcacacccctccctttatcaggacccattgctccgttgagtcatcatcatcatcatcagattgatacttcatcttcagctaccgatccacctacttctctcagcctctcgctgccatcttccgattcatccgaagtatcgaatcgcgggtctgggtccgcgttcggatcggttccgacatctgcgagtccgacccagactgtaccaccagctctacatctacaaccattagttccagccttattgttgcagcgagaaccagctcaagtgcccagtcagagcaatcagtttgagaaacctttcttcagtgcagagtttctgggggtgatgcaagaaatgataagaaaggaggtgaggacgtacatgtctgggattgagcaaaatggtctgtttttccacactgaagctattggaaacgccgtcgttaagcgtatgggacttggcaagatcgagtagaagagtactgtccatccctcatgaaattctagtttaactttcatagttaaactgggaggacagttgcagaggagtacgagagctagactgatgcacaacccggtctttttttattaaaattttccgtttccttttttcttttttaatatatatatatatataccatgaaaataattttggtagtgtacagcaggacaattgggggtttaagtctatttaggttttctttatgatagagaagaagagggacattggctgtggattatggatattgagattgaggaacaatttcctttcaaatgttgagaacccagaaatatgaaaaaaaaaaaaatcatgaaaatctcaaatgctttacttctagagtttcttgttaaaagaaaaacatttaaaatgaaacattatttcaataaatagaaaataacaatttggtctctaacttctattaaaaaaataaaagaaaaatgaataaaacaaatgaaatcatcaaaaatattttgaattaagttggttgagagttgagactgacggacagaaaggctgtaaccgtttttgtttggttgctaattggaggtggccttagaattaaggccgttgaatttatggcatgtgacacacgaagttgcacctgtcaatttcattagctattaactattattattcaccttcaattctaccactatgctccaaattatcgagtcttttcgatctttgatttttttttgttctaacgtgacatttttaagcaaacctgttaggcttattcgaagatatctatataaattggttggttattgctgcatttattcgaaactataaattcgacctcacgttttcaaaaaaaaaaaaactgaaaattattatttgaagagctcgtacgagctcgggagtatctgaaagagctcgggagtatctgaaatgttggctggtcgaagcactcttcatggcaacgatcacaaattgacaaccacgatcacaggagaaaaacacgggatttagaagtttacaacgagagaaacccaaaattgaaattcgtttgggttttcgaggtctaggagtggctcaattcgaagcttggcttcgacaagtggctcgcgacgaagaacccaaattttttatttcaagagctcgtacgagctggagagcatctgaaacattggctggtgagagcattgttcagggcaacgatcacggaacgacaacgacgaaccaggagaaaaaccatgggatttggtagtttacaacgagggaaacccaatattgaacttcgtttggctttacgaggtctaggagtggctcagttggaagctcggcttcgacgagtggctcacgacgaagaacgcaaaacaatcatgattatgaatttgacctcaataaccttttaggttcccaaagtcaaagcaatagagaagcatcatttaaaataagaggatataaatttgaggctttttcatttttacactttaaatttatttatttattattttatttttttttttgttatttttacaaaattctacataaaaacatctatagcaactaacggagcaaccgaaccaaaatccgtatagcaacccacatagaaactactggagaaaccacttgagaagctcaaactgtaaatttaaaaaaaaaaatagtaaatagtatatggtgtaatttttctataaatttcatatttgttaaactatatccccaaccatatataagtatatgttgggttttatgc

SEQ ID NO: 184326 - DNA, 4720 bp, Cannabis indica
tgaactaagctaatttgtcaccacttggagcctaaattttagtgttgattggggaaatttgttgtgggaattcgaaatctttggggataagatgagttcgacagtcaccggtgaaggtttgatccatcaaggtaagcttcttattcacatagctgaaaatggacgttcattagtgcttgagtgtgatgagtccacacttgtagaaaaggttatgaggtcgattgaatctgtttctgggattagttttggtgaccaacttgtgctctgtttggatatgaaacttgagccacaaaggcctctttcggcttataagcttccggcaactgatagggaagtgttcatatacaacaagtcaaggctgcaccataattctcctacaccaccacctgaacaagttgaggtttttgataatttggaaccccaatcgccgccttcttcgcgggattctcatcctttggatgatgctttggaccctgctcttaaggctttgccatcttatgagaggcagtttaggtaccactgtcataggggcaatgcgattttcgataggactctagcaaagtatgggacttgtgagaggcttctgagagagcttaaggttcaagagagggcattggaaattgcaactgggaatttggatcagtactataaggtgattactcaaaactgtagggatttcatgaagcgattctcgatgcagcatcggtggcattctgatcttttggcgaatttcggaagggatgtggagaagttgagaggtgttaagcttcaccctttgttgcaaactagcactcgtaaatgtttgttggattttgtcaaagaagagaacttgaggaagtctgctgagaattgtagcagttctcataggcagtttgagagtaaagtctcacagtttaagcaaatgtttaatgagatacaccgcaagatggatgaagttttctctagcagggcttctcttcctatcaggaacttggaacagatgatcaaagatcaccagcggtttatcaatgaacaaaagagcataatgcagtctttgaggttagctttccttttctttttaaccatttttctatttgttgtttctgtttcataataatttcatcagatcagatgtcatagctgcttaattggtttaaattttacctataaagttgaatatatgaatatctgtatgtatgttaaaaaaacagatgcagagtgtgattgatgcatcaatatgactctgtgatgaagaggtttaatgcctccaagcaacttgttccttgtgacattgaaagctttcttgcttgttggtacttgttgataacgttaaccataaattatattatgtattcatgcagcaaagatgttggcacagtgaagaaactagtggatgattgtttatcttgtcaattgtcttcgtcacttcgtcctcatgatgcggtttcagccttgggtcctatgtatgatgttcacgacaagagtcatttgcctaaaatggaggcttgtgaacgtacaatttcgaaacttttggactattgcgtcgataagaagaatgagatgaacatgtttgtgcataactacatgcaaaaagtaacatatgtttcttacaacattaaagatgcaaagttccagttccctgtttttagagaggcaatggcacgccaggatgatatctttgcggagctgaagtttgttcgtggaatcgcccctgcatatagagcctgccttgcagaagtagtgagaagaaaggctaacatgaaactttatatgggtatggctgggcagttggctgaaaggcttgcaacaaagagagaagttgaggtgaggactcgagaagagtttctgaagaaatgtggatcatatgtgcctaaggatgtcttagcttctatgggattatttgatacacctaatcaatgtgatgttaatatagctccttttgatactcatttacttgatattgacattggtgatctggatcgctatgctcctgaatacttgggaggattttcgtctaagggggaaaagcatggaaccttcaaagcttcttcttctatgtccaatgacagtagccactctgtcgaggctgaagacagtagtgctacagagttgcttgtgggatgtgaatctgaggagctatatgaaggctctgagctgtttgatatcgctggaactagtaaattggaagttgaaaatgcaaagttgaaagctgaacttgcttctaaaattgcattgatctgtgctttctgccctgaaatcgaatttgaatcattggatgatagtaaaatatagtttgttaaaaaatgctgccgataagactgctgaagccttgcatcagaaagatgagtacgaaagacatctccactctatgcttaagatgaaacagttgcagtgcgagtcatatgagaaacgcattaaagaactggaaaacgagctgtcgaataatagggatgtgaatgactttggtattatggatggaaagaatgatgtttacaagtcacagacattgggtggtggagaaacccacatccgttgcctatctacgtctgagcctatggacgaggtttcttgtatctctaattctttggaatcaaagttggggcttttctctaatcaggcttgcaaagggagagatggggtggatgaaaacatgatggattcttctggagtacacaatcctcagttggattcctcaatgatcgagccacatcgtgatggagacaaagatgggaaagataagatggcagggcagttgggcatgtcattgacttgtagctccaccgcagaaagcatgcccgagccttcaagtgtcttaccttgtgaggcagctgctgaacgaggcttggactcaaaagttagtggtaatcaattgttggaattgcaaagtgcacttgcagaaaagtcaaaccagttgagtgaaactgaagcaaagctcgaagctgctatggaggaggttgtgatgcttaagacggagctggaaactagccggaagcttcttgatgaatctcaggtatcagggcatgacaaacactgtctattcttgctttgtcttgggacttttttaagtgaaaaatggtatattgaaaatgcatctatttgcaaatcaaagatagaatggaaaatggtgggaatggcgaacaggattaactttggattgtgttgtttattttttttacgcttagtgtcattagttttattatatgtacaaagtgtctggtttggtatctcaagttatgcttagaggcatatttttgtgattatttagtttatttatattccgatatgatttacttgcgaatcgtgtcataaattggttattattttaacttaatattggtttctgcataacagatgaactgtgctcacttggagaactgtttgcatgaagcacgagaggaagctcacactcatctgtgcgcagctgagcgaagggcttccgagtatagtgcactgcgtgcatccactctgaagatgcgcagtctctttgaaaggctcaaaacatgtgtatatgcacccggtggggttcctgcttttgctgacgctctgcgtattttagcacaatctttggccaagtaagtttctgaagtatttgttatgccttgaacaatttgatactctgcttctttctctttaaccttaccattttcgaccctttctaatgttatagcttttagttcttcatatgctggtctaattcgccaatttaagacgagcttcactgtctttgtttcaattaatgacaacatagatgacagtttcatctgctttaaattgttccagttcaataaatgaaaatgaagatgatggtactgccgactttagaaaatgtattcgagtccttgcagatagagttggtttcttgtccaggcatcgtgatgagctactcgacaagtacccaaaggtagaaactgcaagcgaacaacttagaaaagagctggaagaaaagaaagagcttgttaataccttgtatgccaaacatcaacttgagaaacaggtactttgatcaatatcttcatatcatgctatggtggttcttatggaaaaaaattctcttagtcatcttaaataattcaaatgatcttttcttgtaacaggccaacaagaaaagatatcttttggaagaacgcaagtgcacgaaatcgctgcatttgttcttaatacaaatgggcattatgaggcaataaacagaaactgctaactattacctttcttctgaatctgtagccttgtttacagaccatctccccggtcgacctaactacattgttggacagattgtacatattgaaagccagacagtgaagcagttggctacaactctgtctggtcccgagcataacttggcaactgaggcggggactgatcggttgaccttgaattcaggctcaacttcaaatccatatggtctccctatcggctgcgaatactttgtagtaacaatagccatgttacctgataccgccattcattcgccaccctcgtcaacttcttcctgatcttaattcagacatataggcgtgatggaagaatcccaagtgtacatattataaatataacattcaaaaagcttaaaatccttgtggtgggcattgaaactttttttattttccatttctgtacagctgattattcaatagttgtttttaaatttctcctaatttttgtaaatactgcttagtcttttctttgggaaaaaaaaatatgtataaaaactgtgaatattattatttagctttatgat

SEQ ID NO: 184327 - DNA, 3342 bp, Cannabis indica
tatatatatatatatatatatatatgaagtagctggttaccctaattgttttcccatattaactagttttttttttttgaatgttttccacaaaataagttttcgggaaaaaaaaaagtctcatatttatataaaactctgacaaaaagaaaatcataaaaaatgaaaaactttttcatgatatatatgaacaatgaggtcagtttcatcaaaataataattaaaaaaaaaaatgaggtcacttccactaactacaaccaagatcgaccctaagcatagattggattaagtcaaggcctattcttaagacccttatttaaattgggcctaacttttacatcattttcttttcttctatacaagaaagttgtaaaggtgcaagtattataaagggattttcacagctgaaattttttactttttatcttttttattttggggtgaaatttttttttaaaaaaatactgtatactgtgttaagtttcactcttgttttactgttattttttagctgtttcactattatttcttattattttgtttgttgttttatagttattttataaaaatatcgtaatttttgtaaaaaaaatcatatgacaataaaattgtaagcttttatttaaaatctaatatttttataaaaacccttataaatattaatttttgccttgagtgggtcctaagcataaaaatggaaatgaaattgcttttttctctttagcaaaaataaattttatttattttataataatccaaaaattttgaacttcttaattattgatgtgaatgatacacaactttctcacatatatatgcatagatagcttttatgttaataatatctgatcaatcttgtattatatattttgtgataaatacagatgcattccttaccgggtgaccaaagatgaagaagattattacaacatacaagttcttatggtttcttcaccaaatcgtaatgatctagtgtttccaaaagtaattaattatacataattgaattacataatgtattcttctttttatccttgatggcaataattaaagttaattaataactctataaatattaattttgtcaaatagggtggatgggaagatgatgagactcgcgaagaggctgcttgccgcgaagccctagaggaagcaggagtgattggaatactcagagtaagctattttttttttctatatcaaaagttatgacatattgagaaatgttaaaagatattaatagtgcctagcattatacataaaagtgtcatcattattggtgtaatttaatatgaaatctcatacattttagtttaataattattgattaataataatataaaaatctagtaactacttataaggtgtcattgagtgctctaatatattattgcaaaatgatagatatcaaatggccaatttacttgctttcattaagtatgatgttcaaattttattttgtagcaactatgttggagggagagtttagaaatgagtgagggacaattcaaattttataattttcacttaggcttaaataaaattttgtaattttatacatgagtattaaaataatattttgtctattattaacacaatagtgatcacattttcattcaagatggattgagcataacaaaacaatattcatggtggttgtgctttagttgtacactccttttcttacatttgttgttgattttgaacttcatttgtgaatgaattaggcttttactagccaactcttttttatgcatcgctttcctccttcaagcagttagcgagcttaattttttttagaaaaataaaagtacttaagtaaggagtaagatggatagttcaaagaattggtttacttccacaaagtccaagattcactaaagttccaataaaattaaaggattaggttgagagcttagtttgaaaaagaaaagtagtaataaagttaagataagatgagccctaattttgaatatatgtgtttgtgtaggaaactccattaggagaatgggaatttagaagcaaaagtaaagagaacaattgcaacatggaaggaggctgcaaaggctacatgtttgcattggaagtcactgaaatactcgaagtctggccagagagacaaaatcgtgatagaaaatgggtcagtattttatattggtagtgaaattacccaaatttttataataaatactcattgcattttattttctcctatagctaaagatagacgaggcatttgagttgtgtcgttatgaatggatgcgcgaggcactaaaggcatttcttagagtgatggcggccgaggtagatgaggaagaggagaagaagaaaaatgaggaaagaaaagaagatcatgagatagtagacactcaaataatgtcttcctcttcttcttctacaactacttcttcagattgtaatgttgtaaagggttcaaattctaatacaagtcacaaacatgttattagccattcaattgggatatgccttgccactgacatgaccaaaaatcctagtggggcctcaaatgatatctttctatataattgtactgtcaaagttgattctcaattgtaaattagtctatatggacctatggtgaaatagtgtaaaataacttgttgcttaataataggtcaatagtgaatagtggtgtaaacatctccaactggggttaacttaagcttttcatgactttgggtatgtattgtatgaaatttgaatccttgagttaggcgtagagcctttgttaaagaaaaaaaaaagttgtattaacatgactttgtcttttattttcattaattaataataaaatgatcttgttatgctaatattttcttcactccttgggttccttggaactatatattattatataaccccatttttagtgtttttagttaaacaatatctcctatatatgaatatttttacaaaaatacccactttttaactttttttataagtatccactttttaattcaacatgcaaccttaacttgattaataaattaactttttcagtaaaatttattttctttatattattaattttcaaactttacttattttacttgcttatatataattaataattatataagttgaattatgctaagtacattatactaaaaaaaaaaaaaaaattaccatttagtaacaagataaatattctattactattattactttcaggcataaggaaaagttatttattactataattgacacatagttagtcgcaacaatttggattaatatttttaaccaaagatttataactatatagctttaatgatattttttatactacaacttttatatttttaatcacaaattttg

SEQ ID NO: 184328 - DNA, 4054 bp, Cannabis indica
gttaggaacacgtagtgtcatttcaatagtatggaggacaatatacagatgaggtcagacacaactatggaggacgaagaagtgtgatggaagatcagcttgaagaacaggagcagccacaaggactgatccacaactagaggctatgaggcggcaattcctagatgctatgtctttggaattggaagccaacttagaaatcaatcccaaatagtgagaactagagttctagcaaagttttttggtagaaaaattctctctctctcttcaaagtaaggaggaggctgaaaacttcctattttatgcagcatgtctcataggtgtgtagcaggccaaaaacaaaagaatgataaaaggtagggaggttgaccccaagataatgggacatcttattgcatctaggtggagagagtttcaaactgtttgtgagaatgagcttcatgaggtttgtatggctactgccagaaagcctgtatttaaagtttaaagtcaatctaaacactaagcatttcatctttgtggatgcttcatggaaaaaaggtaacacgggtcttgctagtattggtggagagcttgatcaaggtaggtggactgcatggatgactagtcataataaagactcagcgctggaaggggagctctttccaatcaatgtagccctgctcaaggcgcttgaacttgaatggtttcacatcgccattcttactctgattctttaattgctgcagatgcattcaacaaatctaagtgccccctgaattggcatgttgtctttgaagttttaaatttagttttattattcagttgttagaaattatttatatttctcaagtagataactctatcatacatggccgaactaaaaaggctagaaattgctctagtcatgaagctttgaattttcagtgggagggaattcccttgtggttcccattgctctttttcagtaagtgaactttgaaaagttccacaaaaaaaaaaataaactaattgaaactgggaacgggccggagcataggtggactaggcccgtacctagagtctatattttttgggagcctaaaataaaatatgaaaaatctcattagtcttttatttaaataaaattaattgtattttaaattgtaaatattgacagcttgattatggtgtattgcaaggttcagtattctcagggccagcctgactgggaataacattatttgtacatttacattactatgggatttacacaatcaggaatgatgacacatattataggtcagaggttcgaactctccttgtagagttttatttttttgtctgttaataatttctaaaaaatatataaaaaataaatcactataatcaagattacatgttttacaaggtatgtatatataagtaacacgttagcacacaagatagtgtagtggggctcttacgaaataattacatttaaatgatttgtggctatgtgctagcatttgtcacttagtccaactcaatcatgtaaaaccatatttgcactctttattcttacaatcaaattggaacacacctttcattaagaaagatttggctcaaggctcaagccaacatataaaaatcacaaagcatgctctccaatgaagtgtaaaaatagtgtcgagtgctatactttaataattttgaaaaaattaattctctaaagtggcgtctggttagaggtaatgaaatgaaatagaatagaaagaaaataattttaattttattcttttgtttagttgcatttaaagtattagaatgtcattttaatggaatgacttttttatcattttggtagaataactattccattttgaaattaaaggaatgaccattccaatacaaaatgaaaaaaaaaattaataattttttatcaattttttatgtattttaagtttgattccattctattcttatttttattctcattctcatttttatttttatgtttttattccttccaaccaaacactacctaatagtgtgttgaatcttaacatactaaaaattgtgttaaatctggtcagaaatatagaattttgaatcaaatttagcacacaataaatatatatttttatacttttagctttttttcttttatactatattaactttccaacaacacaaaattactttgtgagtcatatcctaaaacttaatagatcatactattcccaaacgagtactagtagtacccaaccaactaaccaattttcataattgaggcatttagcttttccctatataaaagacattcatttcagaacccaatttgaacattgcaaaacaaagaaacatgattctcttaaaagaaacctccacaaaagctccaattcaattatatatgtatataataaaagtactagtaaaagggacagtaattccataccctttaaaataaagcaaaattccttgaagaaccgattagagtgctctttcagctgtagctgctacacaattatgaacccaaattagatggaaacttggttcaccctatagccacaaaaacaaggagagagaaatgttaaaggtcatgcatataaaaacatatgaacaatacaacatttactaaaattggaaattgatttctataacgagacacttaaaacacaaaatcttaacagtacataattggacaagaacaaagatatactataaagagaaacttaagtcactacagaattatttgccatctaacccacttgataaataagcatgatttcctcagagtctaaaaaaggcattactatattcaaatctttttagtgaattccaggactcaattatcataaacacagaaaatgtacacttattattattcattaatagaggcattaaaaatggtattttctataaattaaaacctaacattccaaggaagcaatggagatagagatcaatgttttcttttacatactaaaaaacccttaatgaaaacaaataaacaagttcataattgatttgaacaatgcacaatgagaagaaaaagaaaaacaacagttattgagggaggagttgagagagttctgaaggtcacgaatctcttggtttgcaaaagcttcgacttttccttccacagaatcactaacagcaaaaacaacaacaacacaaattaattaaagaaacatatatatatatatataagcaacattgatgaagtgagggagtttaggggttgaagggttgagaatgtgtatgagaaagaaagtggagtatcagtaccatatgagagtgtgaaaaaaacttaggagattggagtggaagagaatgggtttggttagggcagaaagaagtagaagtgaccttttaacttcggttaatatgtaacaaccgacgtcgaaaatcctccatggacaacgaaagcccaatactaaagctttcgtccttattttttctaaacatttaggtgatgtttagtaacatatttttaattaattttttgttttaaaattaaaaagtaaaaatattttttaaaaatatattctataacattatttttattttttaattttttaattaaaattaaaattttgaaaataaaaaaaaaaagtaacttttaatatttttgtaaacaattttttcttaatcaatattttggactccaacatgattcggacctaaatccccccacggttgaatccgtcttctgagctgaacctgaattcgaccccggacctagaccgacttaaaaaaactaaaaaactaaaaaataaaattttaaattaaaaattaaaaattgttacataacgtattttgttttttgaaaataaaaattttacttttattttgtgaataaaagattagaaagcaaaggtgttaccaaacggcaccttagtattctaaacaataccaaaattgaaacctgtcgtgtttttttcttctttttattcgtttttattttgttatatttaaaaaataatagtgatctatttatagtacaatttcttattcatttgatgcataagataagatctttaaatcggaaactaataaaatttaaattaattttcacactaatgtgtgatgttgtttaaatttaaaatattag

SEQ ID NO: 184329 - DNA, 2402 bp, Cannabis indica
tttggaaactagaaaaaataggtaatgcaaacacctaattcccttggtgattttaatagatccacctcaaaagcaacttctggtggatttcttccatccatgaacaagtatcttattccattagactatgcagataataaaacttgcataattttctataagttactagaaaaacagtcatcacaatactctaataagaatatcagattcatattagcttctgcttaaagtagttaccattacattttctctgcatggcttgtggatatgaaatttattgataatagggtcctcctgcgatgttttgttcttggaacaattatttgatgagccaacaaataagtagctggttgtgtgctggaattgatcaagtccttgacagtcaattagttgtttcgtttattattttagtagtatactaattcagtttagtttgttaactgagcttgtttagctacttacttgactatatataggctagctgcccctgtatcaaacctattgttaaattaggttgtgtttggtaacaattatttaaataattttttggtttcttaattacgaaagtgaaaatattttcgaaaacatgttcggtaaccgctattttttaaaataagaatgatagttttaaaaacaaaaattctactcttaataatttaagatggatagatggattattaaggtatgctttactttacggtcaaatttgatggagaagaactttggaagttttccaccagtttatttagtaatgtatgatgtattgttaatttaggataaagaaaatgttagggaatgaaggagaggttgagaaaagagtgagacagaagaagatcagcaaaagcaataagagaggagtagttaaaattattaggctttccaagagaagaccatcataagatagaaggggaaaattttataaggctttctaagtcttcatatttcggtgaaaaagcttagaggcaaaataaggcctctgggctctgagtagacagtatggaaatagtgaagcaagtattaagtaatgttgagaatcaaataaacgttcttagcaccatttcacctacactgaccattaatatgctgcaagaatgtcttacaatcactatgaaatgcattgaattagcggcgctttctatgatcctttgtgtttttgttaatgtaatttgggaaaaagtctttgttttttacaatgacaagaaattaaaagcgcttgtggtatcaattgcccatctaaacttttgcgtaccacttcaattaataacttgaaggttggaaggtaatttacttactttctttctttctcttccaatgtgtttcatgttgtgggtaaatgtttaaaagagtaagttgggtttcaatatgctccttacaaaattatttatggaacctttacatacatggtggtagagttaattcaggagtttgacttccttgattgtttcaggaccccttgaagaatggtgttttggctgttcaaacaatacgcaataacatcatggcatctacacttttggcaacaacagcaatcactctcagttcgttgattggtgtgtttgttagcagcacttcgaactctgagaaaatatctgcatctgtaatagtttacggcaataagtctcctactctttctgcaatcaagtacttttcaatcttgctatgtttcctagttgcctttctttgcaatgtacagtctataagatactatgcccatgtaagtttcttggtgactgtccctacatggaacgacaggaaagactctatggagtatgttggaaggaatttgaaccgaggaagcttcttttggtctcttggactacgagcattctatttttcttttcctctctttctctggatctttggtcctatacccatgtttgtttgctctttcataatggtatttattctctatttcttggacacaaccactactattacaaggcaacttcatagtcactcgtttaaagaggatcacaaaaacactggcatggaatcaactagtaatccaatgtgactccaggtaaaattcaatgtcaagcacctagattgattttcaggatcatattactgaaagagaaaaaaaattatttttgttttgtgagaaacctgaatttacatatgataatttccatgaatatccttttactatgaattatgtattttatatgttttctctgctatagtttgatacacggacaatacacttgcgattgatttgaacttattgatcacgtgcttaaaggcaattgtgagctttgtatactttataaaagcatgttttaaggtgttaaaaatctgtattatctaaaatattttattttatcactcttccctttcattttgagatactcttagtcttagtatctaacttttaaaagtactttaatagtaagaactatcaa

SEQ ID NO: 184330 - DNA, 870 bp, Cannabis indica
ttttctttttttttttttgaaatgttcggtggttgtaatttgttctttcctgatatttttgcttaataactttgtttagatacgatctgcagcaacaaaggaccgtgatgtcatggaaaagggagtgagagcatttgtttcttttgtttgtggatataaaaatcataattgctcatacattttcaggtgcctatcttctcatactctctctttccccctctctctgaattaagattattttaaagtgtttattttaatgcaggtggaaagaacttgaaatcgggaggttggccatgggatttggtctcttgaagcttccttcaatgcctgaggtgaagaggttttcactttccattgagggtttcactcctgctgaagatgtcaaatgggaggacattaagttcaagtaagataatttactcttttagcaattcaataggttataagatgcttcaatttgcgtgtggcattagttgccggatgtggtgccattgataaatcaacttttttttactctctaaatcttgatggtttcttaatgctcttaaatgtcagtttagttttcaagctgaatatttatgaaacagcttcattccataactaagcttgaagttctgacttacaggtttcttatagtagaagaagataagtattaaatttttttaaaaaattattcattatattgtgtaaatggaaaattcaatccaccagttttagaattagaaagggaaccatgtattttgtgtcacaatcatcaaacgaatattttgactagtgattgcaaattattttccttatttgcctttggcaaaactgcttttagtagtgagttttctcatcttccaaaataaataaattgatgctgactag

SEQ ID NO: 184331 - DNA, 708 bp, Cannabis indica
taataatttttaaaaaatataccgcattgagcaaaaaataaatataaagtagacatggactgtccttacataaggtcggattgttactttcactttcacatgtacaacaagtacaagtgtctgtaactataattggtccaaatatgtgacaaaatgattaagatttaaattatgactcacattcgtcaactaacatatgcgcttgaattaatttattactagcaaggtcaacttatcttttggagtttcctacatgggaaaattaattaatatatatgtacacacatataattgtttctgtcaattaattacctctgggaagaaagaaagaagaaactcacttaataggccgccggctcacctaagaaagagcaataatgttggtagctaatatatatccatcgctagagataaccacttaatctcattaattaagctaaggaagtagctcgctaccaataagacatataatattggctgcatacattattaactaatcattttataattaaaatattcatccttctcatcttagctaatatatatacatagtttttctgaacaatccaacaacagataatactaaaagaacaggaacttcggctaattatttcataatcatctttgacagagaattaacacatataaaaataagtattgccacatggccatgcatagacagctatgcctgatgttattacacatgct

SEQ ID NO: 184332 - DNA, 4833 bp, Cannabis indica
cacaactaatttgagtagtcattctcctgatatccaaatcttcaacatagtttgaatccacataccccacaatttctggttccttggtgtttgagttgtaagttggatgtgtcattaagatacaccagcatccactttaactgtttttcattgttctaggccaggatcactcatgtacctactaatcatactcataccatggcataaaattggcctaaggtagatcataatgacattatacttcctacaatattggtgtaatcaattccttgtctttgttgagcaattggtgtcacaacttatttcaaactctttattcaacatctattttatcttgcttaccacttacttgcaataaacatgtcgtttactatcttccttttaaggaaagcctttggccaccaatctgaacttgagttgagtctagccctttgctaccctcgatatgccttctttgaatttttagatacacgctttgttcttcctgagaactgatttcatctttcactacactctcccattctagcttctcaacactcttcctctttcgattaaattggttctgattttgattattgttgcggttcgaattcatttgcaattctaattcttattaggaaacaacatcccacttaaattgatatgtcttgccttttccccttatgaacaactaaattatataagtaattcttattttggtcactattatttttgtttataatttttctaacaaaaaatggaatatctcttgacaataaacatggaatgaatctccattctcaacttcactaatcatatatattatcatcatcatatattgatatttaagttacatttacactaattactatataagctatatttttcagttaaaaaaacaaaaggaaaaaaaaaaacaaaaaagcttggaaaagagcctatcttttcttcaagtaagaaaagagaaaagagaggattgaactaaaacacctcaaactcagtattctcagatgtaccaccttcttcaaactccttacattttgtgccctcatcatgtttctgtgttgttgttgtagtagtaacactactaccacttccaacaacatcaaaaaactttggcagttcgggcggaatcgcacaccgtatcaacgcccaattcaggccttcgaagaatcggtgctgcttgatctctgcagcccccttcaccgatcctaaacggttctcgggatcttttatcaacaggcatttaatcagatccctcgcgtggaatgtaaccataggactacttggaaacttgagactcttggacacgacattcgccaatgtatcctcgtttcctgaacccttgaacggggtcctaccgtacaaaagctcaaacagaaagattccaaacgtccaccaatcaacggaactaccatgaccctcacctttaatgatctctggagccaggtattcgtgagtcccgacaaaggaatttgaccgggcgctagttggttccacaacgagctgtggcagcgggctcacttgggcagcaagctcggatttcatcttgcgggatttcgctgcagctgataagagcctaggagtgaagcaggagacctgccaggatggctggaggcagaaagggtcaatgcagctggattcggtacaaggacttgaagtctttttcgcatgctccactgctggagatgtcgttttaaggagcattggattgacaacacatctaagtgacaaatcaaaatctgaaagcatgatgtgcccatcttctcggaccagaatgttttcaggttttaagtctcggtaaacaactccgagcatgtgtaaatactccagggcaagaagaacctcagcaacataaaacctgcgaaaaaagacaagcgaaagtgaagctcacaacaagaaccaaatagtgattcaaaactctacttaaatgcattctaatcaccacatgtatataaaatcaagggggctcaaacttgttactcttcttagctatttgttatacatgcataatgcatttatttaaaaagacccaatgatttgtcaacaagcctttattttgatgcacacatagaaagcatcatagcttcttcaatcttatgtttccaaaaagagttaacttagatatttaactaagaagatatatatatatacacacacacatctacataggcacagaaaacaagaatttgatcttagaaagaaaagatacctagcagcttgttcagagaagctccgggtggtttgcttttgccgcaatacatgaagatccccaccaggacaatactccataaccaagcatgagagcttgtctgaaacaaaatgggcatacagcgtcgggagaaaaggatgatccagcatctgtagtatctctctttccgtttgggcccttaacatctttttcctagtagccaaaaactcattgtccatcactttcaaagcaaacaggcaattagttccaattaactcagcaagataaacagtcccaatgtccccacaaccgagcctcctgagcagcttaaagtgcctcaaacccaagttcccgtattgtttctgaatttgatgtatggcttcccatcttacatcttttgacatgtgaggtctcttgccactgcggcttgatccacttacactgctttcctcactagtgcttgtgcagctgctatagtcaccaatgctactctttgagctttgggaaaactcccctttttctcttgatatcgatctctcatcgccctttctcacaagaaatctagttctgttacttgaactcacatccccgacgcttgaacttacttcaatgctgctagcatttacactgctggacaatggagaagctttcccattttcttccttttcatgctttggagtacagacctgtgtttggttctccaaattactagcgttagaatttaaatcagtgtccatgttcctttcgtgtgaaccagaactacaagaaacactcaaatcctgctttactttattcttgccagagtattcttgctcctgaagataaaccgaggactactcgtaaatgatttgcttattttactacaggtgctggagctagacagagcagcagcagagtgcagcttatctttctggctcttttgtaaactcgaagaattatttgaaacctcaacggaggcagaagaaacttcctccacgtgtgcagattccttaatagtgtgaaggactgacaaagaatcatcagattcgtgttttctagcctctgcatttctctcgctcttaacttcagttggcaaaggaacaatctcggtctgttgtggtaattcggtcatccctgcatctggcaccatagatacagccaaagaagtagaagcttcagcagatggatttgatagctcttgcccaggagatggtatggtctcaggcatcttctcagaaaatttcgtcgtgtctggaaccaaggatatttcaacgaaattccctttgccttcatctattgaaactccagatccattagcttcaaccaccactgccctgtataaccttttaatgtttccagcttccgagacacctgatgaaccagcaggctttgataatcgcttcgtggcagccatctctgatgcttgagagatgcataatcctcgcaaagcttgcttcaaacttacaggttctgaaattccaattcctgatgctggtgacataccagctctcattggtcttttcatagcactttttcttaaaaggtccttacccgaatttctagctgaacttctaatgtcaatggcctgaaagagacgattgatatcatcctcaatcgaatactttttcccaaatctctcatccattttaaattcagcatctccttcttcagttgattcaacaatttcactagtactaggtaatgtactcattttgactagtctagattcaccaaaacacctcaaaatctagacacccaaccgaaaaatgttgtcctaaccgatttctaaacaaatgttgtggagatacatagagaactaccaaaacaagaatccaaactacataacctctcagtttagcttcaatcatgccaacacaaagattcaaatcaccactcaagatcccttcactaatttcaaaatgaagcatccaaatcctgttccaattgcagccctgcataccagttaaaagacaagtcaagaaaaaactaaacataagttttagaagtgaggcagacatgtatggtataccatccaaaatattacaaattgcataaatccaaaaccacttgatttgaaactaaaaatggagacacctgttgagaagacagctgatatgatctcattaccttatcatcattcaaacatactttgacaaaagagaaaaaaaaaaacaataacacaaagaaaaaagggtaactcaactgactggtagctcaattattcttgtattcatttgctaaaagatttgatccatccaataaacaatcaacacatccaatacactgaaagacaacattacaaaataactcatttcccaaaaatctattttcacattaaagattacaacttctcagcaaaaacatagcttaaagatgataaaaaaaactctcttaaatttaaattgttttctccaataactctggcaagaaagttgactaaaggtgtacataaaaacatgatgaaatgatgaactgggcaaactaaaaggaacccagaaaagaaaataacaccataaaaataaaaattaatgatgataaataaaattggggcaaaactatgaaaaagctcttaccagaagcgaagcaggaaaagaaattccctttcaccaaaagagaaggcaaaggaagaaaatttagattagggtttttgaaaagggaaacagaggaagaggagagagagagag

SEQ ID NO: 184333 - DNA, 1419 bp, Cannabis indica
gttgtacttatcttatatgcacgccttgttcttgtaatcgtacttttgttgcatttgtcttcaacactagggaaaaatctcacttggcatggctattcatcgacaagagcatggccgattgaagcgcatacaaatcttggtcgagtgacattaatgcttgagcatgtcgagtgacttgcatgcccaaaggcatgtcgagtgacatgcatgcttgggcatgaagagtgacatgcatgcctgagcatgttgagtgacatacatgcttgggcatgccgaatgactctcctcaatgcttggccaagtgactcttctcaacacttggccaagtgatttttctcaacacttggctgagtgactttcctcaacacttggccgagtccattttctcaaagcttgaccgattccatggccgagtaactttcctaaccacttggttgagtgaccttcctcaaagcttggccaagtgactttcctcaaagcttggtcgtgtgactttcctcaacacttttggccaagtgactttcctcatgccatggcgaagtgacttttctcaacacttggcagagtgtctttcctcaaagtttggccgagtgactttatgatgtgcataatcgagtggccatcgtccttcacatggccaattgaccttggtcttgacatggccgagtggccatggttcttcacatggtcgagtgactcttcaccatgcatggtcgagtgactcttcaagatgtatgaccgagtgacttgtcaacatgcatggccgagtgaatcctcaccatgcatggcagagtgaccatcaaccctacttggcctagtggcccctaagatagggtttggtcaagaggcatcaaccctacttgatcgagtggctcccaagttagggtttggtcgagtggcccgagaatacatgcgtcgacctagtcattccttagtcaattcttaaagtcagtttctttcacttctcgaaaccaaatattgactaatatcgagaatgtctttttaattttcagggttaatagtttatttaatgttgatttagatatgttgcggtgattctagtgttaagggtggtggttgcggtaggagtacgtgatcagtggtggcaatggtgatggaaattgtgatgggtgtaccatagaagaaaaagaagaaaaatgtttagaccaacatgtaataatatttaaataacaaaaattatttagactaatatatacatatgtacataagtgaacatatgtacattagcttgatggtgaaatttcaccaaaattttaaagttagttttgtcaactaaaaaaaaataaacaagtataatacaaattaaaacagacagaaaattggccacaaatttcttttggtttaaaagaagagttttccatatttacacttttcaaaaataatataaatatatataag

SEQ ID NO: 184334 - DNA, 8232 bp, Cannabis indica
atttttgcacaagttttccatttggaaaaggaaaaaaaaatcactatattattgatttaagtatcttgaatggagctttattaaactagttttagctgtatctagctggagttcaacctcggttacggaattaatccacacagattacttaattttcactcaatgaccaacagcttaaattatttcatttttattttaacaaattagtttattattatttaagaagacttttgggctgcctctgtttgattgtgattgtgaaccaaatagtaaaatatttatttgtttactagttatcatatttatgtataaaatgtggtagcagtacttgagagttgagagaaaaataaaataaaagtacgaagctagctaagtagtgagtgatacaataaaaaatgtgagaaattaaaggtttgaactccaagacttttaaattattattaaaattaatagtgtgtctactatattaattattaattaataaaattttataaatggtcaaaactataatcatgggaaggaacaacttacccaagtaacaaaacaaaatgagagataaaagaaaaatgtaattttatgtaaataaaaaaaataatgtattcattattatttatttatttgggcagttttcctaaaatttgtatataaatgatcaaatttagtaaacaataaaaccagattttagttttaaaatttcatccaaactaagaggagggggatttgggattgggattgggatagagaaagagaaagagcattgattatcaatttctcatacttaactcgtggcttaatgtgattggtgagagagaagaatcagatccatgttacgcctgggaatatccaagtccagttggaactaacgtatagaattccgccacgtcccggtttcttcatacacaaaattacaagctacaaataaaaaaataaaataaaaaaggttgagagggtatttgtgctgagagagagagaaagcacgtgacataatgcaaaaaactaaaaagtcttcttcttcgttcaattgtaaatgacctaacccaaatacaggcttcatagccctctctcttaccggagagagaggtgtgtgtaacattactcaccttcttcttcttcttcttttccacccaactcaccctttgaatttaccctttttgccattttctccatatagcttctctctctgtctctctcacttttttttttctttaacaaagcggtgggaaataagtgagagttgttgaggatttggattgaggattttttttttcttttcttttctttgtgcttcagtggtggaggcgagttagtatttgagggttttgttgctgttgttgttgttgttgttgttgttttgttccgtttatctgagctgagaattttagggttttggaggtttggtttgtaaatatggagagatctaatagcaaagatctcggtcacttcgttgataattcgtcgagtaagctctctctctcaccttcgagatctctggtttctctctccctctcgctctctttgtttcagatttgttgttattattatttaattagctgaaagagttttttttttttgggattttgaggtagagagctaaaaattcttttttaagtatttttgtggaatttgaagcattacgcagcatgagatttgggtttttatactcataatttttcagtgaacaaacgatgtggggattttcttttatgggttatgatttctggccaattctttcaattgtatatccttgctgtttattttattaggattttccttaccgtccttcactttttttcattcgaatattctttagttttacttggtgcctgctttcgtttgtagttttagattttgctaagttctggatttccgtcgacaaaaccttttataaaataacaatttttgttttctgaatttgtactaggaagttacggaagtaatttaggaatctagaatttgaaattgaaatgcgtttgattcataatatccctgcccgtcgttgggggtgtgcaattgcgtaaagtacattttttattgtgttcattgtctacttgcaatttttgtaatatatttgtagccgagctagtgtgtcatcaactgctatggttaaaatatatagaaaatttgttcatgtttattgcagctgaaactttttcttattgtcgtacagataacgcactctttgatgcatcacaatatgaattttttggtcataatgttgttaacgaagttgagctgggtggtttggaggtagaaaaggatgacagcacatttttcaaatctgctaacaatgagtaccatttgttcgagagagaagaggtatataaatttccatcaagtcagtcttgcagctattttaaaattcattgtgttgctgttatgtgcattatatgatctgatttattgagttgttctttacgaaacttgaaggtgaaattagttaattaccactctgcggatttatttggcctgacaaaatttctctcaagttaactaaggaaaaatggtgtacgttgtagttgcagatttatcctgatttgcaataaactacaccatcaatattgaggtttatggttcaactaccccaccctatggtttttggttttttttttaaaaaaaaaatggtgaattctaaagcataataagaatattaagttattggacattacacagcagggattcaaaaggtcttttagtaatttttaggtttgatttcattgcttacaacttttcattatatttgtgcaaatgcctttactttgcaagaagaaaagatcactagttcggtgattctcacgctaagttgttcttaaacagtgacatgccacttacataagttgatttctaatttgtatatcaactttcgggttttatattgcatcaatcaaatgcctattcgtttgttgtagtggtactaaatttgctaatgctatttttacctttagtagagcattgacaaggtctagcatctcatttttatgacagaaagtcttgagagagatcaactagtatttataaatccaaacaaaacaatgttcataactaaatatgatttgagaactatggtgttgctctgtatatgattagtttttctttgtacattttgttgttcctttatattaactcgtgttactgttttactgtgcttagagtccaggtttgggatcattatctgatatggatgatctcacaagtacttttgcaaaggtcagcttccttgacttaagattaattaggtcactgttgatttacgtttcaacagtattactaatgacttctgagagttaaatgatattgcatggtcttctcttatgtttcttaaatttaattgtcctaaccttaagtggacaaataccagttaatgtagttttttaagcttttaaattgttatttttcccactgtaacacagttgaacaaaaatgtaacgggaccaagacacccaggagttattggtgacagaggctctggatctttttcacgcgaaagtaagtagtttatttgatccttttgttcatccttgtttttcccatgtattttcttctctgcaaacttattaaagattttctttgtttttttatctggtttgtcccagtgtatgtatacctatgattgcctttataatttgctaccccctataatgattatttaaaccaaactgtttcattcattctgtcatttctatcaagtaatgtttgcatagcaatactagatgccattgaatttttgaagtttgcaattgaatttgtatttgttatgagaaaactttttcagtattgtcaatgtggaacttttttcttggagaacattcacatgattgagtatctctttgggtgggcgaatgaaaattgttttgacactattttaagtccattttgactagatgaagtttgagtgaatgaagagtatatacattacatggattatgttataccttaccttataactggggcaaacattatttgttagcatggtaatgattaatgttgtgtggttaattggttttctgcacggtaatgattaatgatgtgtggttaattggttatagttttggtgtattatttaaaagggtaattggtggcatagatacccaatgtttgcatttttctgtagctctatacttttttttggtccactgaaatacctaaaatgttagtaaaaactaaatgtatttcgttgttgttgctccattagctctcttaaatgttgacccagtggagctacttgttgactctttaatggttcagccaatcaatctaggccaataactggaccaataaggagttggcaggtgtcagatgagtgcatttaactgaacaacagtacaaattcgctgttttacaaaacctttgagtaatgccgaaaacaataacaaataaataataagttactacaacaaattgcaaacattgagtatttatgctgccaatttccctatttaaataaattcagcaagctcaggttttctttaagttgtgtgttggggcagagtgttttggggatggaagtatgtatgccctctgttgtgtatttttgtgccaaaaagtacgtaattaaccatatcattattggaaatgttcattgttcagacggaaagaaaaaaaaagaaccatgctattattgggatttcatgttatctttgctcagctttgaacttatttcaaattttataaattccaggatgtatttataaaagatgatatggaataatatgtattacatcctataatgcctgtatgaaatactgcatgctcgacatatgatactagattaacatacataaccaaggcctattacagccactgctgccaatcacatagtacatagaaaaagataattcttcaaattccttttccttgaagatccaaacagtctcacaatgtctcatcttattctcacatcctcttctatatcattgaattgaatattctactatttctttccaaccaaagctttcattgaacagtaagaacaacaacgttctaaattttcttcttatatatacccttgaattatgacacccctagttttaggagacatttatatagtaacaagagtaagtatgatttgtaaaactagttcatacctatcttttaggcatatgatttctcaatgttatttggttacagctacttaacactgactctctgttttcccttactcttcaaatgtattgtctacaagtattttctttacttggtggtgcttgcatgtgttgatatccttcttggcttttttaatgaatgtttgatgttggtgaccaattacacaagataccacctatctcccttcctttgcggctcttatgttggcattcatcattgaagagaagtgattactttgactggtcctacaacatggcattatctttgtctttttacatatgaatgtgtgcagcgttattgactgcatatggtgctcctcttctggttactccttgaggattccaaaaattaaaagtagctaaattattactaaggcacttatataagttgtattgggttggattctgtaggatagcagaaagccagatataattgcttaccgtactgtctgtattgtatttttggtccatcaagtctcatgtatttgtgatttacttcaggttcatctgctactgattggatgcaagatggagatttcagtaactggctcgatcagcagatgtttgatacagaaagtgtggaagaagggaagagatggtcgtcacagccccaatcttctcttcgtttcggagaatcaaaacctttgtacagaacatcttcatacccccagcaacccttgcagcatcaattctccaacgaaccaattatagtacctaaatcagtgtatacctctttccctccacccggtagcaagtctcagcaggcttcaccacaccaaccaaatcattcatcacttcctggtgcatcccaaatgcccttctctacaccaaacctgtctcacatgtctaatcctaatctgcatttggctggtttgcctcatgggctacattatggagggaacatgtctcaatttaccagtcctggcctttctttcaatagtaggcctcaaaatcattgggtcagccatgctggaatattgcacggggatgactccagtcttttaaacaatatattgcaacaacagctgtctcatcaaaatggactcttgcccccacaactgctgtccccacagcaactgcaacagcagagactgcatcattcagttcaaccatcattggcccattttgcagcactgcaatcccaaatttacagtactcatccatctccctcgcacagagctatgcttggattacctgacataagagagcaaaggcccaaacacagaagcaacaaaaacttgcgtttctctcaacaggcttctgatactagtagccagaaaagtgacagtggaaggctgcaattcagatcgaagcacatgacgtctgaggaaatagagagcattcttaagatgcaacatgctgccacacatagcaatgatccatatatagatgattactatcaccaggctagtcttgcaaaaaaggcctctggttcaaggtcgaaacaacctttctgcccatctcacctaagggaactcccttctcgagctcgtggtagttcagatcaacattctcatctttctgctgatgctcttggaagacttcctctctcttctatacgcaggcctcgtccccttcttgaagttgatcctccattgactggttctggtgatggcagttccgagcaagtttctgagaggcctttggaacaggaaccaatgcttgctgctagaataaccattgaagatggcctctgtcttcttcttgatattgatgatattgatcgtctcctgcagtctggccagtcacaagatggaggtgtacaacttaggcgaaggcggcagatcctgctagaagggatggcagcatcaattcagcttgttgatccactcggcaaaaacagccatgcagtggggttagctccaaaggatgatcttgtgttcctgcggttagtctctcttccaaagggcagaaagctcctttccaggtttcttcaactactttttccctggtagtgagcttgcccgtattgtatgtatggctatattccgtcatttgaggtttttgtttggcggccttccttctgatcaaggagcagcagacactacaactaatcttgcaaagacagtgtccacatgtgtgaatggcatggacctacgtgcactaagtgcttgtcttgttgcagttgtttgttccacagagcagccaccactccgcccccttggaagccctgctggggatggagctgcagtcattttgaagtctgtcctggaaagggcaactgaacttctgactgatccacatgctgttggaggttgtagtatgcccaatcgtgctctctggcaggcttcctttgatgagttctttggccttcttactaagtattgcttgagcaaatacgaaactattgtacaatcaatatattcacagactcagccaagtacagaggttattagtgcagaggcatcaaaagcaatacaccgtgaaatgcctgtggagcttctgcgggccagtcttcctcacacagatgagcatcagcgaaaacttctgtcagattttgcacagcgatcgatgcccatttctggatttagcacccatgggagtagtggtggtcagctaaactctgaatcagttaggggttaattttatcagaaaactacggaaatgtgacaggtctcaatacaagcatggagggccatcaacaccgactcttccaattgctttcacaatgtcaatctgctaagagtggaatgaagcagcattggagtgcaacgggtatgctcctatgtcggagtcattttaacacttcgaccttttacctttagatattttatttgcgtaagagcaaaaaaaaaaaaaaactgtaactgtcttttaatgaattttatagtgatatgcataaatgtgtattatgatggaaacaagtgatgggagtttgagactggaagatgggttcttctggggtagctttattttggtgctctgtgttgaactccagccaaaactggaagcataggggatagtacatgtacagggtagtttttttaatagaaccttcaaaactcctttgtcctgctcattttcgaagacgtttatatttgtctgggtaagatgttacaatcatgtctctctcactctctctctctatactagttccttgtacgtgacataatgcttcacagattcaccatac

SEQ ID NO: 184335 - DNA, 2332 bp, Cannabis indica
ggtacttcaacaaataaattaattctccttataggaaataattgctgttttgataaataatagtaaaatatgaatattatattttaaaaagttaatttttataaaatttgaaaagttaatttaggctatttttttaattaaaaaaaaaattgggcgtttggtgtgggccccaactaccccttgagcattttgtgattttataagttttggatcataattgagttgatctaaagaaatagttaattaattaaaagtaaaaataattagagtctacaatatattctaccttaatcaaattatataaaaaaataattaaattttataatgtataacataacacattgtgtttttatataaaataggggaaaaaaagggattataattggtaccaacaaagtataatcttaagttagggctaggggcatgctaattgttctataatattatatgctttcttataattctttttatttaatgcttaatgagattgaaatgttttgtgtattattatgtagtttgagaagtttctaaatttattttattataattatgttatggaacaaaaccttagacaaaaagaaaaagaaactattttgactgatgattttgtttggtgcctttctattttttcattccttttaatattctcatgtactaattttcaagaaaaaaattattataaagaataggatttttctctcaaacctttgtaattttttgaattggatttttctttttttttttttttctacaaaaatttctccaaactacaaattttttacaaatatccctatttagttacatttttctcattttctaaaataatttattacttttgtagtcatgtttcacatgtacaaaagtctatttaataattttaaggtattcgaaatccaatttattgatattctaaaaatacataaacatatatatgtttccataattttaacattagaatgttaaaaaaaaaaacattagaatgttctttatgcatttattttttgtctaaactcttaaattgcattagattaacgccatgctagtgctacatcaataaattattataaaaaacaaccagaatataaattgaaaggatatttacaactacttttatagtccaggagcattttattaataaagaaaaattcatatgacaaaactctataagagtcatagtttgagaggacgatatattctctaaaatttataaggcgcatttgaaatgtcactatgtaattgaaattaagtgtaatttgaaataattacaaagtttgtcgtgtttgtttactcaggtaattacgaggtcttaattacatgcactctggaattctcatgaggtgagaattggtgtaattacaaaatattaacatttttaaattgttaggatcgtcagataccatccatctactattgattgctttaggcctaagctctcatggttttgttcttgggcaccttctcaaaaagccccataccaatagagatagtgttcatccttatatactcataatctttcctatttctagctaatgtgagattttagttgcacaccaaacaattctcacctcaaacaaaggaccacgtactcttggccttccctccagcgaaaccaccttatgtagccgaccatcaactttttcaggaagactttcgacataagtcctaacactgatctccatcttgtactgctgtattaatcaatgggacacgccacctgactacctcaatatcaggtcgactttcgatacaaggcaccatatagattttcaaagcgaggtcatcacattgagggattctcccacacatcgtaaatacaacccattatcccatcgctcttgaacctttgactatgatatcacttgttaggatcgtcggacaccatctatctccatacttagaatgatattatctgatttgggcataagctctcacaattttgttcttagacaccttctcaaaaggcttcataccaatgaagatagtgttcatccttatatacccataatcttttctatttctagcccaatgcagaactttagttgcacacacaacatagataattaaggctcataggaaaataattgattactaggtagtgtaattattagggtagtaattaggggtgagcaaaaaatccaagaaactgaccaaattgagcacaccggaaaaactaacaccgaaaaaaccaaataaaactgagaaactgccttaaaactgctttaacacggtcagttttagtgtcaataaccgattaaaccgagaaccaaccgaacatatatatatcatacactatacatatataatgtaattattttttatacatatttaatat

SEQ ID NO: 184336 - DNA, 3200 bp, Cannabis indica
atgaccatatgataattatattttgttttgaatatgttaagtgaggtttattttacaattaagtacattacatgacacatgctatgttggattaaaactcaacaatagtagaaagtggagttggagtgagatttcttggtagcagtacacgctatttgaaattcattacctattacttttttttttttggagttgttatataagattgtcataaacttcttccatctttaaacaatgtttcttatttttttattaaaaaataaactaacatgattgctcatagtcttactagagcatcttgttcttttttagatcgagtattcaacaagaatttttgttgaggtacaatcttatcttttagttgatttatagcaaattaataaaaattctatatttactttcaaaaatattacacttgttgttcccactaattaatggctatatatattataataaatttggaggcaaattttacccctaaaattttacatgatgtggcataaacaaaattgtgttaacacctagtatagtgaagaatatgagtatatcattcgcagtgacggacccagaagttttactttgtgggggcttatttatcattaaaaaatatttatatttatattataattactcttactagatttatttaattttgtgtgggctttttctactattttaatctataattatgaaattaaaaaaattgcatctaattttttaaaatacaatatttttgttagtggggctatagccccacatcaataaaagtggattcgtccctgatccttcgaagagactattatgttgaagagttagaaggtttgaattttataatctatatatctatataatctcattgtttaagatgatgatgtggcagtttaggaatttttttttttttgaaagaaccattagttcaattaaaaggaaaaggaattgggaatcacaggggggattccctcccctaggaaaaggccagcaaaatgactacaatgtctaactttttttgccaaaccatcagcaatacaattgaacctacggttaatataatagaacgaacagagtctaaacttagaaattaactctaaaactgataaagaaacactagtgagctgccatgaaggaatgcagttccttttctgaagagcctgaaccaccacttgagaatccgagaaaataaaaatttccaaccaattattctgcagtgcccacttcaaagcaaacccaatagcttttaactctgcctccagagcagattccgccacatcgtggcatagaactccacaccaatcctccttcaaatgctccactttgatcactacagctcccatagttctttcgccccaggaagcatccacaaacagcacccttgtcgaccgcagctggacctgagtgtgactgatgctttcggtgtaaccattgcttaccctgtcctccttcatctgtaacatttcagaggaagaaactgaaatattcctcatcatgcgagccagatcaaccttctcccccactaacaaagatttattcctgcaggaccagatttccgctagggtgcatccaatatgcgtcaaaaccttgcatctggtttcaggagaaaataagtctatcacttattcaacaaagtcaataagtgtaacagctggtacgctgtcacttctgaatggataacttccaaagaaccataaagctttagccattggacactccttgaagagatgaagagcattctcttctcccaagttacacataccacaaaccttgtcgggtaagaacggtagcctacatttgataggaagtgtattgtttaaggctctccaaagaaagacagctactctggggtgcatatcaggatcccacacccatttccaaatggttttcttggcctcaaatcttgaaccttgatcaatataatatgcactcttcaccgagaaacttccattgttgttgcctttccaaattagcttatccttgtgaagagtaggcagacggggaatatccaggaccttcctacccaacttcaaaccataaacctaaagaacaacttccttattccaaccatatccatctgatagatccgccacagtcctaaaagtaaatcctctcggtttgagactatccataagcctttggaaaccatcataatccagccacggaatccatggctgtctccatgcatctacactcccaccctcagctattaacgccatcgagcccctcaccactgtttctttaacctccaatatatttttccaaaaataagaggtattagtttttggagttacctcccagaagctttccgaagcatagtatttgttgaggatacaatttacccaaggcttgttctccgaacgagccacggaccaagccaacttagaaatcaatgaccgattcatgtcctcaaaccgtctgattccgagacctccatgggatttaggttgacaaattaggtcccaagctctaaaggccatatacctgtcttttgagtcatttcctatccaccaaaatttccttaccattgcgtcaagatcacgacaaatggataaaggaactttattagtggacatactgtaaatcggcatagcagataccaccgagtttgtgagagtaagtcgacccgcatacgacagtagtttgaatttccatccttctagccttttcaacatactagccttcaacacattatagtaatcacgcttccttcttttaaacacgaacgggttgccaagatgtctttcttctccgcgaacttcctcaacttggagagcttgaagaacctcgactcttctatcccctttaatgtttttggatatcaagacactagaatttgccttactacgcacttgcccagaccacttctcataagtctctaagcaattgaccagagctctagcttcaataacattggccctacagaataatatagtgtcatcggcaaacatcaaatgggatattagaggagcctttgtcgcaattttgataccatgaactgcattagtcctctcggcttttaggagaatttttgataaaatttcctgtcctagaaggaagaggaacgcagataaaggatctccctgcctcaacccccgttgagggtaaaacttctttagagggcttccattcaagagcactgaatacgaaactgtgcttatgcaggacatgatcaattgagtaatatataacgagtaatttgcagcataaat

SEQ ID NO: 184337 - DNA, 5206 bp, Cannabis indica
taagcttataaaacggcctctgaaagcactcctttcaattctctctttctctcactcactcacccaaacctcaccaaactcaccaccacagccatggcttcttcttcttccttgaccctatcccaagctatcttggcccgagccatatctcaccatggctcaaactcatcatctgatcgagtttctctttccactctcaccatccccaccttctctggcctcaaatcctcttccttggcttcttcttcttcttcttcttcctccgctaagccacgccgcagggttcactctacccgacccgtcagagcttctgccgtggagactttggataagactaccgagacctctttggtggagaagtcggtcaacacgatccgattccttgccattgatgcggtcgaaaaggctaattcaggtcacccgggtttgcctatgggatgtgctccgatgggtcatattctctacgacgaggttatgaggtacaaccctaagaacccttactggttcaaccgtgaccgctttgtcttgtccgccggtcacggatgtatgctccagtatgctctccttcacctcgctggctacgatagcgtcctggtacttcttcctccttttatgttttttgggttttggtttagatctgttggtgataatattcgcatgtggattttgctcatatagccataaaaaatgtgtcaattttaatttagtcaacgagacagctatcccaaagcattgattttttttgctgctatactttattcaagcacacccactcgtgtgttttttcttcttaacttccgtgattagtgttacacataatcttggagatcgtataaggttgtaacttagtattgggttcaattaataggaagaagacttgaaaagtttccgtcagtggggaagcaggacacctggacaccctgagaactttgagacacccggtattgaagtgacaacaggttagattcttgttatcaatcttactctgtggagatctcctagtcttgaggtttacttttcatttccttacatgctaaatttgctaacttgttgagtttatcttatggatacgttgttgtttaggtccacttggtcaaggtattgcaaatgctgttggtttggcccttgctgagaagcacttggctgctcgttacaacaaaccagacagtgagattgtggaccactacacgtaattactacctcttgatagattttgttgttaattatccacattaaagttcaaccaaatatgattcgggtttacatttttttttatttttttttgttttgccagatattgtattttgggtgatggttgtcaaatggaggggattgccaatgaggcctgtcccttgctgggcattggggactaggaaagctgatagctttttacgatgacaaccacatttctattgatggtgacaccgatattgcattcacagaaagcgttgacaagcgttttgagggtcttgggtggcacattatctgggtgaagaatggaaacactggctatgatgaaattcgggctgctattaaggaagcaaaggctgtcacagacaaacccactttgatcaaggtttgaaattagctgtacttattaataacatgaatgtggaattgattggagaaaaaattattgaagagagagtttagtgagcttctctgtgtatgaataaaagttgacacgatcatgaatgcttatttgttttcaatcttttgttatttccaccataggtcaccacaacaattggttatggatctccaaacaagtctaactcatacagtgtgcatggtagtgcattgggtgccaaggaggtagatgctacaaggaagaacctgggatggccatttgagccattccacgtgcctgaggatgttaaacagtaagaagcctgacataaattttccatttcgtggaagtgaatcacacctttatgctaaatataacattaaatatgtttttctcttaggcattggagtcgccatacccctgagggtgctgctctagaagcagaatggagtgccaagtttgctgaatatgagaagaagtacagtgaggaagctgcagagttgaagtccatcatcagcggtgagctacctgctggttgggaaaaggcacttccagtgagtaacaaattcctttaatatttttcttcttatgatactacttgcttactttcttcggattgactaacagcaaatgtgtacattttaaaagaattcaatggctttgcatttcacactaccagtttctctattgggcctctgctatttctgagctgaatcttatcgactaattaattatcatttatttggggtatgtatcatctaatgagatattgtaattgcaaattttcagacatatactcctgagagtccagctgatgccaccagaaatttatctcagcaaaaccttaatgcccttgcgaaagttcttcccggtcttcttggtggtagtgcagatttggcttcttcaaacatgaccctgctcaaaatgtttggagacttccaaaaggatacccctgaggaacgcaatgtgaggtttggtgttagggagcacggtatgggagccatctgcaacgggattgcccttcacagccctggcctaattccctactgtgccactttctttgttttcactgactacatgagaggtgcaatgaggatttctgccttgtgtgaagctggagtgatctatgtcatgactcatgattcaattggtctcggagagatggtccaacccatcaaccgatagagcatttggctagtttccgggccatgcctaacacattgatgctccgcccagctgatgggaatgaaactgctggggcatacaaggttgcagtccttaacaggaagagaccatctatccttgcactctctcgtcaaaagttgccccagcttcccggaacttccattgagggagttgagaaaggtggctacacaatatcagacaactcttcaggtaacaagccagatgtcattttgattggaactgggtctgaattggaaattgctgctaaagctgctgaggaacttagaaaggaaggaaaggccgttagagttgtctcctttgtttcatgggaactctttgaggagcaatcagattcctacaaggaaagtgttttgccagcttccgtaacagctagggtcagcattgaggctggatcaacattcgggtggcataaaattgttggaagcggagggaaggctattggaatcgaccattttggagctagtgcacccgctccaaaaatataccaggaatttggtatcaccgccgaggctgttgttgccgcagctaaatcactgctgtaagcttggttagagtccaattagccatctttgatgctttgttaattgttattagcaattcaaacaatattcgggttgggggccaagatgaagagaccatatcccaattgatttgtttgatgagaggtctcttttttactttttttttaataaaagataaattaatttccttatgttgcttttaattcataaacacagcaacatggatcaaaaagagagaaagtagaatgaagaatgttcatgtattttgtaaacaactcttggacctgtgttgagttttgtaatgttctatggttgattaatgaggttcactttcactttcttatcatcacggtttatatatttaaagcacaacaacacctgttactttctcttttgattgtagttgtagtaactactgtactgcaactgattttgtctttttcaaatcttgatatgccttttcttgaagtataatctagttggtcaagaatgaattattctattataatacaagtgtggtagttcttctttgcttttcccaaaatcaaaaagtggtttgtatgtaatgaaatagattggattggataatggtttcaagccatccaaatgagactacataatccatgtactcacacatgagatgattggaccttgtattgatttttttgtccctacataggtttgtatatgtggaagatattattgaccaaacaatgaagcagataagtttgtgtggttgttgtaactcctgtcctcaccttacctatccatattatctatctcctacaaccattacttgcttcaaaatcaaagggattttgatgatgacacccaattttataataccatgacagttgttaggaattttagcatattcagctcactttttttaggcatattctctcttatacctcattcatcccacccttttgaaaaataccctcatagtatagttagatactttatggattgaataagatattttaaatttaaaggtttttatcttactaacagtatggtatggatgatgaagatgtggattaggtgaaataaaacaataattaggttgttgaatttatggtaaatattaaactaacatgatactttcctaatatctcctataactataaatctttttgtatatttagtattattagattttttgtaagtaactagtaaaatttattaaatcatacaaaagctaatctcgacttatgtaaagttgaacattctctttctattaatgaaaaggaataagagggaaaaagtctaatctccacttaacttatgttaagttaaacataaagaaatcatacaaaatctaatctccacttataagttataaacattttgttatttcagtgaaaatgaataagagggtaaaaaaatcccaaaaatagcacaaatatagcagatatttaatctctaaatgaaaaaaatgtgttccaaaattaaaaaataaaaaataaaaaaattgcatatataaataagttaaaaacacattttatccagttatcctctttattattggagaattgagtttgagatggtgagtgagtgagtgactatgtttaaatgggccacttctaaagccttcagaaaagcctgcaacatattgagtcaattagaatcgatgcttttctatttatatcatctttcttttttattctttgagaaataattaactttcaagtttctgattacttttctttgttttatttataggcataccatcataataactcatacaattagcactttcaaaatttgtatacattttctattggttacatatttagtttcctgggttagttttcagtataatatattgaccaaaatttgagataaaataaaagccaaaataaatagtttataacaaaacaagcaagcacacgttttcagcaaaaaa

SEQ ID NO: 184338 - DNA, 1532 bp, Cannabis indica
tgggtgttgttaggtgatctaattactgctattcaagttatattacaaatgttttcgttttgcaaataagaaaggcagagaatttaaaagttgtgtattgactgtattccctttggatgagccatcattaaagttggggtgaggatctgtttcattagaacgactggaaatttgtaacgttgtttccattcttaactttaatactttatgacagcaggctgcaggccttattatattatagccaatagattaatttgatataaaatgaacatttacatcatttttttttttcaaagtaacagttacatcatattctgaaatttgaaaatgaacagttgcatcgcattcctagattgttgcatattaaatatgagcatcctgttcacgcgtagaagatgccactaatatttcattaggtatttccagctcttgtagttttggttctttatctagaagaggtctatttaaccaccgccaacttggtagcagctatgctacccactggagcaaaggattcccaacttcgtgagaacaacagccagaaggttcacccacaaccaatggaagaggctatgaatcagaacccagaagccgttgaggccctgatatccaagatttttaccaacatttcctcccttaagtcagcttacatccaacttcaagcagctcatactccctacaaccccgataaaattcaaactgctgataagcttgtaatatctgaactgaagaacttgtctgaactaaaacacttctacagagaaaacaatcccaagccagtatgtgtttccccacaggattctcgcttggctgctgagatccaagaacaacagagcctgctgaagacctacgaggttatggttaagaagttccagtctgaaattcagaataaagattctgagatccttcaaatgcaacggcaaattgaggaggcaaaccagaagcgaattaagcttgaaaagaatcttaagctcaggggattgttgtcaaaagattctgaaggttcagcagatgaaaatggttttttccatgtggatctaactcctgatcttttcttgtcatatgtagaagctacttttaaagctattcatgatttttctaagccattgatcaacatgatgaaagctgctggttgggaccttgatgctgcagctaactcaatcgaacccaatgttgtttatgcgaaaagggctcacaagaaatatgcatttgaatccaatatttgccaacaaatgttcagtggctttcagcaggaaagctttgccatgaaagttgatgatcttactcttacaaaggagagcttcttcaaccaatttcttgcattaagggagatggatccacttgacatgcttggtcaaagtccagattcggtgtttgggaagttttgccgaagcaaatacctagtagtggttcatcagaagatggaggcttcttttttcggaaacatggatcaaaggaatacgtcatgggagcgggcatccaaggactcctttctaccaggcatttctaaaaactggccaaggcagtctggc

SEQ ID NO: 184339 - DNA, 5417 bp, Cannabis indica
aattaacattacaagaaataaattaaaaatgataccgcattcaaaatatttggaattacaaatgcgaccacctcaccttgagtttttcattttcaccattaagtttctccaacattgcatggtcaataactggaacctcctgtataactggaacttttacagcttctctttttgcagcctcgcgttctttctcaagcattgctttagtttccttgaattgattctgcatttcttgcaaagcagaatgtagtttctcattttcttgtgttttagagtgttccaggtcagcctgcaagattacaatagaagggcaaagagaagtcaacaacaaatataaacgttcgctgcaaaacattcttaaaaaatgtgcattaaaatacaaatttccatcaacctctttggtctctcgcctgttttctagaacaatatatactacattctatgcaactacaaagctcatcctgaactgtgtaagcttaactgaagtagcatatataatttagagaaagaccacatttctattgaaagctacacattcagagtatggcacaatggaagtcatgaggaaggattcacacaagtaaagaaaaatatataattacccttatgcgtttctccagttgtaatctcaatgtcaaatcttcaacttgcttttcaagtttatttttggctgcctgaagtgctccagtttctcttgcagcctgcatatgaaacattcaagatttaagaaatcctaaaatcaatcaaacaaatatcattaacattagggtgctttaagagacaacaacaaaagaatattgagtatgcttcatgcaatatatttttatttttattgaattctgataattaatatatatgatgcacatgttgactaggattgaaacatatggtaatttcaaataaagaataaaataatcaccatcttgagcgccttaagttctttacgagcaacttttcctctccatgcgcactgtgtagtaattgctgctttcttcaaattcatgaaatgattacgtgccaagaatttgcggcattgactctgcaatagaagagaaaaatggtcaaaatttgggtagagaaatacatcaaataaataaagattggaatatgtatagcaacagaaaggcgtgaaattatctctaaccacctctacactttaaaattacttcttcgcattataaataatttgcctcacctgaataataattgctgctttggtctgccttctgaatcgtaacacattacgagcagccataccacgcatgcctgtctggatggagacagcagagaaacacagttttttgtatgctgttctcgcaacatgcatgtgccaattcctctggatcttcaaagaagaagcttctctccgcaatccctcataaatttgccgagtaagttgtcctgcagttgtagaatataaaaccttataagcattgcaataaattcctacagcctcgttagattaagagactataatacataagtcttcggatgctaaagaaatatgcaacttacctctacaaatagcttgaatttgaattgcagatcgacgaagagaaatgaaacttctccgtgacaagtaggaacggatcttcctttgaattatactagctgacttccctaagacctcgctcctacgggcatcgagatctgccatttgaccagccctcagaaaaacctttgtcttaccaatctgaaaatgacaataggacgtgttcagttcagaaaaccacatatcacagaaacataaagcatatataatagcacagacaaatcagtgacaaaatatacagctattgaagcaagacttgaacaacattatcaatgaatcaatcaatgaaatcaagagagttaatttgattcaactgtatgagttggaggcaataaagtacaattgtgactaaacaatcggtgataaaattatgccgcagccaagttttcaggtatgaagatacatgaacagacattcaagtcacaaagcatacagtatacattacacttgtgttgatgctgttgactcaaaagcaccaaaacattgcaaggaatgcattaaaaccttactacaaacttacaaaaaaaaagttcctaaaatccaattacaacaatgatttcacatgatcaatgaacaaaagaacaaggtacatgtattttctatatcatttgaaatccatgctacggccacaagagtttacagcaatcaggaacagtagtagaactgcaacttaaaaaggatttttagttggtgtcaaacattacctgatagccttcaagtcccaccctttccaagagattcttgcaaactgcaacttcatcagtactactttgaacaatacagaataaataaattagtcagtactacaaatgacaaatgagaaaattagaaatgacagtacagcaaataatgaaacagaaaagagaaaggtctacctcccatccaaaacttcaggtgcaaggagaccaaatcggtctacaaattcatcaaatgtttttctagtaggatatccagcacagctaatcctaattgcctccataacaccctgaaaaatatttattgaatataagtaggcagccttaattactaaaccaaaacaatatatgcaatgaccaagatatcggtatcagcatccttaccccacaccgcaactgttgtaaaacgttcttgctctcaaaaattgatggcttaagaaggttattgggttttacacaacgaatgtaatgtggctccgtggaacttaaagtttcaagcaattgttgcaattgtgactgtatggagtataaataaatgattcataagccaaaatacttcagaaatttataatttgttaccattagaaaaagaaaaaaaagaacactcggaccttaaaccgagaacctatcgacgagaactttgatgatttggatgaatcctcagccaaaagaggaaacaatgatgtcacaaaagaacactttgaagcacttagaagtgcttgatgttcagcaaccacatagtctttgtttttgtccaggaacagttctgtttgataagtgacctgaaagttatattataaatagccacacataaatatcatccaactaaaatatttatcatcacttactaaatctaaattctatagcttacatccccagcataatggcaaattgtgaagtcactacgtgacaattttggtttggtaaagcgcttgtgatttttaaacgtctggtacaacttttgggcaaatgtctcatgtgttgatcttgggaacatactacaaaacaaaaatacagatatttcatcaatatgacatacaaatctagttcatagaaatggtatggaacaactgaataatagacctaatgtcacatgtcaacaaaaattatattaaaagtggaactctaaaatagtttacttaccaagcttcatctagaagagcaataatgccaccgggtttctgagttttaaaaggataaaaatattaaatatataatatatgcaagtggttgagaaaaatcaagtacatatgtacatacgtggagtaaaaatcaataaaataaaaatagaacccatgagtactagcagtaactcaatgacaagtgaaaaatcatacaagagttgtacaaaagaagttctctataccttaaattttaaatgaatggattaaataagaataaaataaaaaatcacagagacaactcaaaccttttcaataagatcaaggatatcttgattatcaacaaactcaatgtagctccaattgatttcttcttttgtatattcttcttgctccattttgaagacgtgctgcccaagaatataatacatataacaaggttaccgtgatatacaagagaacgactagaacactaaagaaatgagaagtgtgcacaaacaaacctgattgaaatgctgctgaagcttctcatttgtcaagttaatgcaaaattgctcgaaactgcaacatgtaagtgtcagatgaaaatcaaacttccaaaaggataaaagtcactttagacaatctgttctttcaattagttgacttgatcttattgtttctcagatgttactgccaccaatttctacttactgcaacaaatataggccatcacccgagagtaatagggatgcacgcatatattgcttcccctcgagatacctagaatctcaacattcagctcactgcacctaatgtccagcttcaacacatatttttattttagaccaactacaaaataacctaactcaaaatattctattgagcaatttgaacttgtaaatggcattatctaccacaaaaactgtacataagaaaacattccatgaaacacaaagtaaactgccagccacatttcccccttttttttaaaccatttctctcaatgaacccttttatcttacagggagacagaaaattctacaaaaattgtaggtacacaaattacttatgaggaatcaaatcctagaccttaggatagcaaacgacaaacctaaccattcatcctaactctcacaggtgataggtacatgaattttgatcaaatgttaaaatcatgtacagaagacttgaaagacataggttgatcattggactatctaaaggccagaaaaatagaagacaccacaagaaaaccagcacacaacactaagaatttatgttccaaaccaattgtactcatactacttactttttaagagtgatgcctttctagatagttttaatcctaaagaggagaggtacaagaagaaaatggttccccacagtactactaactgctcaaaaagagcgctaaaagccttcaaagcatttaccaacgttgacgcgttttattttgttcactttatgttttatgtcaattatgaaaacaaaaggcataccagttaagcacctgtttgtcttgaaactctcaaatccataaatatccagaaccccaattaaatacttggactcaggatcttgaccaattgaagtattaatcgtatccacaagcctgcagaaacaggggcaaaaaattacatcgaaagatgaaaacaaaacccattaccaaattcaatgatttttttatctttgctaaagctaaatttaaatcaaaatataagtaggaagaggaatgggtaaaacttactgttatacttaaccatacaaaagcttaccagtcaaacaatcttgaataaacaactttagccaaagcatctctactaacagctgcagaatctggatcaagccacttagtgattgtttcatcacgagttacaatgatacgtttgcaaagtgaatcttccagtgccttagcatcacacctgacaaaacatataattcaatagctaaattttttaaatacagaaaatatatgcaaaatacaatcgaattgcatgaggcaaagactgtaatcatgttaatatatgcatacattagaagctcagcagcagtgttaagatggaaccg

SEQ ID NO: 184340 - DNA, 1609 bp, Cannabis indica
ggtgagaggacgtcaatcttaataatgtgtgacttaggtaacctattgcaacaccttttattcaagtgaacaaagatacattaaataatacttcatcttagcatatatataaagaaatgatgaacttaatcaataacatatatatataatgcattgcagatgttgacatgggagaaagttgatatatcggtagtggctggggaaatagcattggttgcaggattagctatgtggatcacagctatacctcggataaggcgaaaaatgtttgagctattcttctacacacattacctttacattgtcttcgttctcttcttcgtcctccacgttggaatcccttacgcctgcattatgctccctgctttttacctcttcatggtcgatcgtttcttgagatttttacagtctcgaaattctgttcgtctcctctccactcgaattttgcccgactcatttgagctcaacttctccaaaacacaagccttgaattttcagcccacaagcactattttcattaatgtcccaagtgtatcgaagattcaatggcaccctttcacaatcacttctagtagtaaattggagcctgagaagctgagcgttttgattaaatgtgaaggtaattggtctaagaaacttcaccaactgctttcttccccatcttcctcagttgacaggcttcaggtttctgttgaaggtccttatggccctgtttcaactcattttctaaggtaataatatatgacatttttgtacgtttctattattagctcttataaaaaattataaatcaattatatagttataatatatattatatagtagaggatattccaactagttttgaactgagttaaattaatacttaatacactgcattaatttatacatgatacatctcaatcatttgttttcataaaagtcacatcatgttggtacttattgattttagttattgactaaaattgcagtaatgagcctcataatatattgatttattttgttttttgtgaaggcatgataccctggtaatggtgagtggaggcagtggaataaccccattcatctccataatcagagacatgatcttcaatgccaaagctctcaattccaaaaccccacgacttcttttgatctctgctttcaagaactcctctgacctcgcagccctagacattgttctcccactcgcaggaaccccatacgacctcgccgacctcaatctccagatcgaagcattcgtcaccagagagaaacaacaaccacaatcccaagccactaaaattcccctctcccgaatccgatggctgaagcccaaacccaccgactcacccatctccgccgtattgggtccgaaccactggatctggctgggtgggatcataacctcctctttcgtcgtcttcctcgtgttgatcggccttatcaatcgcttttacatatacccaattgaccataactcgaacaaagttttcgcttattcgtacagagctttgctaaacattttggtcatttgcttcgcaataacagcgaccgcgagcttggcggtgttttggaataagagagaaaacgacatgaaatcgaagcagattcagagcttaaatgggtc

SEQ ID NO: 184341 - DNA, 3054 bp, Cannabis indica
gcaaaatgattaaaaacttccataaaataatgtggaagaaaatactgtaaaagaaaaaagaaaaaaacaaaaggcaaaagttcaataagtggtttaaaagctgcattgaagtcgtgtacttgggtgcattccttcttgttatcggcaaatgaataagaacttgcttattgttttactcaagtaaatttataatgtgtttcagtccgaatcgaattcaaatgaaataaagaaaaaaacgaatccaattttttaatataatattaatagattagaataatatatgataatatgatatatacaattaaaaagtgtattaaataacgtagtaatggcaaccacacttgctcttaaaaagagaaataaacaaataaataatagatacagcacaggaaagaaaaaattcccactatgaagaagaagaattagaggtaccaaacaataaccaccaaaccgattgggttagctcttgtatgtatgctatataaacatgaccattcaatgcttgataaataaataatagaatgatacaaaataataatgataataatcaataacaacaattgacaccaaaaatcggaacatgtttcacaaccagagaggtcttcttaagctgatgatgaacaacgatgacaaagaacagtttcccctttggtgagaatggccaaagtttatctatctgatctctgttagaatgggaattttcctgccattgaactttttcacaaatggtggaacgttttcttaacatcccccatgttcagcttttgctttgcagctttatcattcacaagatataggacattatgtttctttttcacctgctactaccaaagtcaatcttcgttagatccactcccgtttcgctcttttcgtatcatgtctaagaggtcctggacaacttcagacatcggtggcctgaatgtaggctccgactgtgaagtgcatacacagagttagaatataggaattaaaacttaatccaacccattagagtgtaagaaaattgtttacctgaacacatcgagatataatgtcggcaaagtgtgacaaggactttgcagggtatcttccatgcagagaaggatcaaccatgcttgacaatgcatcaatgtcgtggagctgggtcattgcccatctgaccaaaaactgctcccctcgattccgctctctgtgtccagaatattgtgcgatgaaataaagttacacatgaaaataaaggagaatggaagtagtgaaagaagggttgtattttctacctgtcataggacttgcggcctgttaaaagttctagcataaccacaccaaaactgtaaacgtcgctctgggaagtataaattccagactcaaattcgggagctccgtaaccatatgctgttagcaaatgtcctgagagctgagagtaaccagtaaatttagttttcaggactcaattacagtaagatgttttgccacaaataaataaatacaggcagatagatgttcgtaaatgcagagtttcgacttacctggctcacagaacctgatgatatcaagggagctaacccacaatctgatagtctcacagacaggtcatcatcgagaagaacattgccggatttgaaattcctgtgtacaacaggtggttcacagacctcatgcaaataccttaacacaaaaacaaagtttcagtaatccggatggtgcatgtatccaaaaaatgtcattaagtaaacataacagacttatacttctactattttctcataagtgagcacatcaatagcgatgaaacgaatagagaacttgttaaaaactgatagagtaatatatgtgtacaaactgcactgaaaaaatcataagaactagaccaatgtaagctgtaattttcataaaaaggtcaggttgcaccaaaagcagcagaaaatttatggataacaattttctaacatctcatatttactaattcctcataataataaatacgtggtaaatgaacatattcaaacatggccattgcaattgttacttactcaagagctctcgcagctccaagtgccattctgatgcgagaattccatgaaagtttccttttaaattcgtcatctgaatgcagagcctcctgaagtgagccgttactgcaatattcatagacaagaagtctttgaccatgctctgcacaataacccacaagcccgacaacgttggcatgcctgattctatcaatattgttcacaagtttgataaattcgtcgtccttttgctgactagaggctgttttgtccaatttcttgactgctagtagctgtaaaagcaaaagagcgtcacatgtcacatgcataagtagacatgtaatcacacacacatatatatatatggattacttcttaatggacatttgatggttactaaacaaatttaactataaatattaattttaaaaatattaaaccattaaatgttgatccattggcgaataataaaagaaaattttaattttctatggttaatttagctacttaattagaaaaaatgtatgcaggtataagtcgtgaaatccaaattatcaaacaaagatagttattaactagacaaatgatatttgctgagcagattagattctctctttcttcttacgtatctatgaaaatccacaactcctgtcatcatctgatctatcgaaccatccataatgtagtaaatattgattaatacactgtttatcaataagtaaacaagcaggaccatactaagatactagaaaagtcattgagaactttttggcatagaaagctggcaaaataaccaaacactatacatgataccatttgcactgtaatctacccacaatgtaaggcacagccatttaaactatatatgtgacggttagccctacagaaataaatttcccaactcaaattcatttttatagactgctagtatctttcaaaaagcatttgctataaaaatcattgtatttcaaggtagaaaattggtgaaataagctagaacttcatttgaggaaagcatctggatctaacaccaaaccaacaagtaagcatacaaatagatattatg

SEQ ID NO: 184342 - DNA, 1191 bp, Cannabis indica
aaagaaatttcttgcctccaaaggatgtcatcaaatcttaatattgtcattaatttggcatatttattagatgcaattccttgcttctatttaaagtaaccaagttccaattaattctaaaataaagaaaatcgtctattcaatatgtttccttatattatttcttcacacagtaaatagtatctacatacgaaaaaataaatgttatcatcatgaaagagcagtcgcatcccaagcttcaaatagtgtaatactatattctgtgtatacggagtgcaatatgcattcattgcttaggcttatcctgcataactagattgattctcataatcaacaacttgtcatgcttagataagactatcatatgatatgattaaggtaaaatctggtagaaaattgtgagttgtctgaggttgaagtccccataaatatatcttatcagaaaaagaaacagaaaaaaaaaggacccaagtctgataaacaggcaacttaaagatgaaaaggctaggtaagtctcttgcagaccttccaatttgaatttccactcatttttgataataaaactgtacacaaagccacatagaagcttgaggttaggtcagctaggcaacattcctcgtttgcatctgtcagaattaaattgttgtactttcataattatttaccatctcaggtctaagttattatagcacatgtctaaataatttaaataaacttaataagaaagatatatttatatcatatattgtctctattcaggtaaacaggttgtccatggaggcagcatgtggaatttcatggccagcagatcgcctcataattcaggttcttgatgattcaacaaacgaagtgttaagggtatatgttcgaaacccctgcaaaattcccatcatcaaacctgttattgcactctaatttacttacctacaggagttggtggagatggaatgccataaatggatggagaaaggggaaaatattaattgcaaaactaggaacaataggaatggttacaaggcaggcgcccttaaagaaggcttagagaagcaatacgtgaagactgagtttgtggcaatcttcgatgcatatttccagcctgaagaggatttcctgtggaggaccattccatatctgcttgagaatccagacataggcttggtccatgctagatggaaattttggtaagagcat

SEQ ID NO: 184343 - DNA, 1663 bp, Cannabis indica
agtttatataccttgtttgcctttcaatttcttccaaaaaggcataatgaaacggtcataaacagcgagagtgatcaatatggctgccacaaaaaacacagtgagagaaccagcaggaatttggaaacttcctatgtttcttttcatagtagctgcttgttcaacagagaaagtaatcatttgagcataagtggtccaaaacaagatggttgtagcccatattggtagtaatcttatcatcatcttcacctcttcaatctttgtcactgaacatagtttccatggattaggagtactgctactaacattttgctcaaaatctccttctagcactattgcagccttgtccaagaaactaaacaaaaacaaatgttattaccacactactaaggcataaccaaaacagtccataagacaaagttaaaagttgacacttaccgaaattgttctgtgtgagggattttggcttccataggagtatcctcatacagcatggctatattgaaaggaccagacatctttctctttttgaaagaggccacaataacttggaaaatgtgaactataggactccccatgctctttttgtacctgtattttttagtcccagacaatagtattatgatggagattaacattgaaacagaacaaattccgtaggcccagcttctgccaacttcatcttgtaagtaaacaaggactgtcacagccattaaggttcctgtgctaatgaagaagaagaatctctgaaagaagtaagccatttgagccttctccttctcatctttatcatcaaactggtcagttccaaagcctgaaacacttgatttaagtccaccggttccaagtgcaataagatataaggctaagtaaagaattcccatttgaaatccattagcctgttggcaggtggcgcctgcacctccgtcgcaaggtggtggctgtaactccggtatttttgttgatattgccaaggaagcagtaccctgcagatcaagaaattgtttttatttgattagatttagtgatttatgatagttaattaattgattgtactatagtaagaattactatagagtactatagtttctaactctactttggtatttttatttatattttgaattatgatatctgggaatgggatctgatattaaattgcacaaataataccatatgccatgtcaagttgtgttggtgtgcttcttagcaatattcaataatcctatatgtaccaaaaggaaaagggagataaattttgttgttgaggaaaaataggcatagtagtgctcactagtgtttgtatagtagcaaatattgcaattgtcttgtatcttccaaggaaggaatcagccaaaaagcctccaagcaagcacaacagaaaacatgtgcccataaaatctgttacaatattggctgaagttgaactaggcaaatgcattgttccagtcaaatatgtcaccaaattaactgctattcccattgttgatagcctttcacttatttcaatccctgtaaattatggagacatattttgaattaaaaaaattgattggttaagactaattaatgatgaactttaatagcatatgcatatagtatattcttcttaattttgtattaatttattaagaaaagtgaaaaagaaaatatattttttttt

SEQ ID NO: 184344 - DNA, 2473 bp, Cannabis indica
gtttagaagtggtggatatttaattagattagaaaatacaaaagaccaacaaaatactctacaaattgtgagagacaaaagtaatactctcgaagagatatctcttttgctcttatatatatatggtattacaaaataaagttagaaaatagtttgtggcaagcatagtaaaaataaaaaaaacaacctccataattaaatgtttaaatttctattttcagtaatataaattatttagaattttttgaaagcagacatgatacataatgtaactataatggacacgatctttaaaataatttctcaatatactacatatctctctgatcttcctactataagttcagcaagacaatattgaaagcttttagttggcttttgtgttaagtattaatattgattcattatcctcctagctactactacccattaattcatttatacataaataaatatacatattccaaattatttgatatatataagtcgataatggatctcattataatcgttagttattgtgagctgtttattgttgaaaagtcctccccataattaggtggactatatagttataacacgtgttaatttatggttcattatggggttcacatcgatcccatgatctctcactccagtagtattacatagtctttgatatgcttaattagaatattatatatgcataatatattactattattatttgtgtgtattgaaggtgaaagttcaagttattccgaaaggtaaatcattgatttaagtatgaatcatgatgaattaaagctataaaataaattaataaatacaaatttacaagctcttctacattgaaaacacattctaacccgaatagtatttggatcctcaagaactagataaagtaatttccactataaaatcaatgagaatacattttctagttttgatttacaaatcaacaacattatctaaaatgatcttacacaagagatatcgaatacttgaatacaatcaagaacaaaaatctaaaaacacttagatctgagaagacaataaccacttgcttctaccaagcagaattccctctagcagatcactttgaactccctctagatattgcatattcacactccttcaaccttggaagattcaatgaattacgatttgcaatacacaatcaaacaaaaatacaaaaaagtgttttgtcctaacagagcaagaactatatgagagttctatcaaagatggagagttattagttagaaaaagctagatcaacttaatatatctcacacttcagtaaaattgactcaactaactaactcattagctcagctagcaactagctaaactaaataaagaaacaaactaaaaagttgacttggcaaagataaattaaatcagaccaaacagatgtaactaagaccaacttagatgaacaacttaaaaaagcatgacaaaaactagaacaacaacacaactaaaccaatataaagcaacataattttccatacaaaactatggcacttacaatctcccttttggcaaactatgatcaacgtcgactaagcacaatatacaagaaaaaagacacaaaagaattaagcacaaaaaataccaacaaactaaaacattccaaaagataatagcatgacagtttaccaactgacaaagtcaagtccaacagacaattaaaacaaccagaaaaactaaacctaaaacataacattatttagtgtatgtgtacaaaaaaatgaaatacaatatctcctcctcaatgatcataatcactcgttgttggaataggcaacaagagacgcagaaggagcatgtactaaagcaacatcaacatcaagatcagaggagagaacatatcagtggaaggctcccgtggcaactagcagttgatgagcccttctgaacatttgcaagaacctactccctctagacattagcaggattaatgctctcccactagatacatgcagaaactttccccttggatacttgcaagaacttgaccttaactttacatagacataaattttccacgaacacacattcaattacttgttgtttatttcttgagttagtttaatctgataaaattccttctcttcattttgactaggaacaaagttagggcacaacacttgcaaaaataaacacaatttaaagaaagggaaaaactagaaatcaataagtaaatcaagtagagaagagaggaagagatcagaaacacaaaccccaggaattttttttgaggttcaccccaaatttcttgggctacctccccgtgagctcgccttaagaagctagcacttcttgcactatgaaaatagatcaaggtacatcaatggtggtgattccaagttacactttgactcatagtcacgataatcatcaggtacaaacttgtttctctctctgtttcctctcttttctttcgtataactctctctctaacactcttattctctctctctctctc

SEQ ID NO: 184345 - DNA, 6594 bp, Cannabis indica
tttttttttcacttggtcctacccgggttgccgactaccgtggccgttcactgcttgaacgttagggatcagacacccagctgcccccgaggaagtaccactcgatggttgtagacacaattgtgcgagaagtggacaagttaatcaacgtggacttgcggagttacagtacgctacctggctggccaatctcgtttcagtcaaaaaagaaataaaagtgaatagaaaaaagacaggcgcaaaattagcatcagtaatgagggatgggacggcagttattgagcacaaccccaaatcaacttgagactgagagagtcccttacaaatagcttctcggtgtagggccataattctttgggctatatttacccctttccggcccgggtccgggtaggtagtcagtattgagacatctaattgcgttcggatcgggctacattctgacccaatttggtgaagatcatctgttagctacgataagctactataggattgtagaaagtttgttctcagtgattcaaggagcgaaagggctcagaaacaccgacgcgagcattcggttaaaccaaaccatttcaagcgctcccatatagaaccggagtaatggcagtagactatctgtctataaaattagggctcaaggcacccacccaactgatctttaggatggttacaaaaatatcctcaattcggtatatagaaaggtataaaaggtatctcacagggtagaccaaaaaaataaaaactatagtgcgatagaaggtggcatatagtcaagatatatgccctcctatgttggtcctaagaaatcctgacttcatgggaataaggaaagcatttctttcgcatgcccatatgtataaaaccatcgcatcttagggttagttcagggtcactttagtttgttgtggttcattcgctccaaattccaccctactatggtatagtaaaactatccatagtccgttatgaaaatagttggtgataggcttcctagtgggtacgacctatttcttattttatttaacggatagtataatcgaaaatatactttctatttatatctatataaatatatgaattccctgagggttgcattgattctgtagtcgagtcgggataaattcaaagcggataatgatgcgattgacctataaatggaaacattgtggcgttcttaaaaatggaaaattcaaatcagtctttacaaaccggaccttgttcacgtgcatcgttgaattaggttgacctccatattggtatatatgtcttggacgcatcttgattgcaaaggtacatcacttcatattttcatattgtcggtgccgttaatgccgcatgatcttctacacatggaatctataaaaaaaagataattcaaaaagggcgtaacgtatgcacatagactctcgaatttaacttaaccctgtcgtgttaccttagaggttctattttaggagggggcaaagaaaaggctaaagccctttatatagggctttagccctctcccctgtaactaataattaagggaaaaggcctttaccgagcctccaatcttcgacctactcaagctcaaggccaaacaatcgaccctaacaagaggaaggggcctcgggaggagaaggaggagcgtcgggattctagttgcccctcatcccatgacgaagtgcggagatcatttctttgtcggacgaaatcgattcgaccggttgctcgactacttttcctttctccttattcttgggatccgctggagcttccttcgccttcgtcttcggttctgtattgcaaagaaaagcaaagttacggcaagaaaaaaagaatgaaatacgaatgggttgcattcgataataagtataccagtataaattctaaagagacgtctcagtcgcagccgaaccgactgagatcacagggagcgatccccacagccgctaaaggtagctggagccgggttttttcgaggttctttcttccctacttccgctgccaaagccttactagataggggggggcgagtcgggcgagagagagaaagtcctccttctcactcgacttgcgcgagtcactgccactccgtgcgccataaacaccacccccaatttataccgcattcatctttcagcaaagttgcattgtgtttttttgcatttgtgttggagaacgtaaagagatttagtaggtgagaagtataaccataagtgcaatggaacaagtttagattgagttaatgatcagtggcttgcttgccccccttaaacaaaggcacatcacttagactgctaaaaactgatgcaagcaaagttcctcagtacctatgggccgaagcgtttaataaagcagtgcatataaattacggattgccatcgtcgactattgctggtgactcccctcatcaaaagctttttcaaaagatttcagactattcctatttcatttcaaagcctttggatgtctctgttttcctcatattgatgcttcacaaagaaacaagttttctcaaaagaaaatagttggagtctttctttgttggatatagtgaagaacataaacataaagggcaggaccggtttgatgaaagtcgatttttctcttctattcggattcggctaaaattttgggggagaatcttgagcagcagcagcctggagtgacgttacagcagcattcatcttcggattttcagcagcccatgctcaggcatgaccagtccacgtcacagcccattctcagacttaaagcctctacgagttgcaagtgaatgctggtaatccaatcaattgtctgaagctcttgagtctcagggccccttatctccttctccaaatctcagaagatccacactcctattgatctatttttctcctatggttcctactctcttgacttgagcacaagtctttcagaaatctaaaaaatcatggaaccggattcttatctgacgataaagccaaatcttctgagaattggaaacgagctatgttagaaaaaatggaagctcttcaaaagaatgaaacctgggatcttgtctttccaccacctgacaaaaacattgttgggtcaaggtgggcttacaagatcaaatacaagtaagatggtttttttatatagaggtacaaacggcttgtagcaaattttatcaagagtaagaaagctcacttggttgctcaaggctatgaaaaagaaagagtatggtctatattatgccgagacgtcacgttcagtccagttgctcaaaatggtaccattcgcacccgcttacattcagcactggcccaactctcatcccagttagacgtcaagaacgctttccttcacggagatctcaaagaagaggtcgaggccaacctcccggttatgaagactctattcatctatactatttgtgtaagctttcaaaggctctctatggactcaactacccagatctaaagaattcgccaaagagcctttttctaactaggagagtcagcaagctaccggaagcgaagcttctggccccccctttgatattactacctccttttcgttctacttaggtggagcaatccgaactctcgacagaatatacaagaggtttttattcctgtgtagacacctcaacgaactcatgtggacactcctcagcccgaggacaatctctcaaatacacatgttgatgttgacccgtttttcttttctttgctgattcctctcaatgaaatttgccgtgttgcactaagttacttacggatgtatgcatgcggtccgggaacactttggggtgaacacccatccgaacaagtagggtcaatagttcagcatttaggccgtaacatttagcaacaaaaaaaagatttaacccaacaagtgctctccgaaccaagctagatagtctcctatcactaggctcaccaaccaacctggactttgattcttattattcctaccggatatcaaaaccataaggattgtttccagccatgagttcccatatgacataagcgctcttgggtgggctgggccattccatcaaatctttgagaaggggcccaatctcgtatttgccggcatagatctcatgagacccgcccactattactacgaaaaaagtactgcccttttccttcgctactaggagagtcagcaacttctattagcgccggaccttgagtcgaattgatcgtgtcatgtgcaacgtccatcaatgatggttcattaatgtccattgatttagactccttcccccttcccaactacgaataagatcgagaggagcccggaagcccccaaaccaagaacggaaacggaagcctttcctttcgattccccccattctatcttaaataaagctcagcggggccaatttctcgtacttgctcagtgcgctctcctttcgtcgagtgccccacccggttcactgggctgttggcctaccaagtacttgcccgcagctcctgccgcccgaaaagcgggctccgcgctcgttatccttactgttctctctgttggggtcccctcccattgctctagccataagctatggctgctccagctcgcaaccacaggggcccgccctgcgaggccagagtgggctccgcggtcaggttagcccccattcgaattacgttagggggtctttcgctttcttttgccagatctagagagatactacgagtcctccgtcccagattccatcgccgcggccatctggttcaccggtactaccaaaaagtctcatgcttacgttactgttattgatggttttattatcttggaccacgaagaccccggtcgtgcttctggtttccattcccatcatcatattgatgagaaatcccctcgtgctctgccataagaacttggagtccgtatcatggtgaaggtaaggtaacgctgtgattcttgctcaaaaaacagaccgaacgcgttcgagttattggctcgtccaacccggcagcattcatgaatcgctcgttcaactgttcctcggagacacggtcgagaagtaccatgcatggttgccctccgtcctttctttatctcggtcccacccagcaagatacggctcaaccaaaaaacgtgagcgcccctgcgcgagccttattttattagtaaagtcaagctttggctccctaaagataaagaaatggatcaaaaaaaagggggggggggacttctgcaacgggctatgccacccaaaccaactgaggaaagtcgcatccgtcccatcgcaagcacctacaatgtcatgatcacattggtttacccttttttttggtagttcaacggacggtcgcccctccaacaagaaaaggtataaatatggaaacttctctgccatttggatcggagaatttatggaggaaatcgggttttaaatttccagaaaccacacgattatatagccaaagggaatacgccgcgcctaaaatcatcccaagcgctgctaatgtggctactaagctatttctttggaaagctcctactgagatgggaaattccccgataaagctgctagtaccaggtgaactcatattggccaaagtggaagagaaggaaatggtagggagattcggcatggtgctcactgaacctccgtaatatctaacaagtcgagtcttatgtcggtcatatagaacaccaacacatagaaaaagggctgaaggaaccagtccatgacttaacatcggtagaatgctacctccaattccctgtatgttcgatagagccaaagattcccccccactgatcggagtacgccgattaccccccgaaccgtacaagatagttaccacctatcatacggctctaacttcacttctttttctagtcgttccgctctgtcgatcgatggtagtataagagatctgtaaccccccgaaattatttacataatggttcctgcttcctacccatagttagcatgtatctccccgggtcatacttgagtatcacatcgtagacccccaccccaactctatcttccttatcagtgaaccggaaatagtgcataggtactcttcaatgcagcggggccgagacgacgtgacatactacgatcacgtacagaagtgctgccctcccttcggctcggcaatatggaacctctcaacagctcccgttcctttatgaggtcctatcgggataggtaggcccaagcctttcccctccccccgaccgagcagcagttccccacggctgacaaataggagtttaggccgtaaaagaaaggcaccggcccccattctccccccccccactgggattttgctttccttatctacgtgcgcactgcgtcagcactggcgaaaaagaggtcggcttactgaagaagaaggggcgggccgggtgcttgtgggccccctctgcagcaagtgcttgttggactcccccccccccgtttcccgagagggggctgtgtttccccagcggccggccagtggcggcagaaaacgaactcgggtgggcgtagcgcggttggcgttttcttgtgttgagagcttctcattctcttatagaagcccgcgtccacgccggggacgggtaaagcccagcgaagcagcagggagcactgagcaatggggggatgaggaaaaaaacaaccatgggttg

SEQ ID NO: 184346 - DNA, 4253 bp, Cannabis indica
tcgcaactccgcgatggagatcaccctgtacatgccactatggccccttccagcactagtttgaagttgccggttggaattctccgttttcctaactccactaccgacgttattgactcaaaattggcttccctagatgactctgctttgatcggcgtctccacttctgtactcaaaagactctctgtaacttcaggctctacggtaaaataaaatgaattttgtatttcaatcaattcgtgttcggattcatagaaatttatggttttttgaatttttttttgggtgtgtttgcaaggtgcttgtaaagaatgttgagaatgggaaacaaagaattgcccagaccattgttcttgatcctcctgacaaacacagagaatcttcaaatggtgaagaagattcttctcaattttcacgggaaatgctaatttttccttcttgtaaatttccggaaactgaccctaagtgtttggaccgtgaagttgcgtatgtatctcctatgttagtattcaatcttgacttgcatatattgtgcttgaagtctcttgttcaaggaggggaagaaactatagcatcttacttcaaagaaaaaaaggatgacaatgtttttaagaaaggtattgacaattccatcattggtatacagttggaaccaattcatttcaagccaagatatgcttctcatttgagggtttcttttgtgagaatacctgaatgcggtatacttgagtctcttaaaagtagttcatctgttgaagctgaagagcgtcaagagataattgattcagcgttacacaaatactttgaagtagatagatatttagtcaaaggtgatatttttagtgtccgtattaattgggattgcaagtcagccatttgtgttccatgcagacgaaggtttcaatctaaaactgatgatattatctatttcaaggtaattatgttttcagtgtatcagtgtgctttagactatgttgtcagtgtatcaagttggattagaatactacttttgtgtgcaggttgtggctatggaaccctctgatgaacccattttgctagttaatcgcactcaaactgctcttgttcttggagggaacgctccttctgctcttcctccagatttgttgattgctggttacaaaggttttgcacctttgcaagaagaaactgtgaaacttttggcttctgtacttacaccagctatttgtccatccacactttcgtcaaaattcagagtttctgttctattgcatggcttggcaggtattcttttgaatttaactgttgtttgctttaagtttgttggtttttttcttggttagggaagcttactaatagatttagtccggccaaaatcatacaccaaaacgtttgtgttgatctctttaatgtttagttgcgtttggtcggtaatagagagggaaaattgttgcggaatgttgctttgtcggttatcttgggaaatcaagaattcttataagatatggcatcttcaggggaggaactcccgggagaagtttgattttgggtgtcaatctagttgaaaattgtttctagaatatcactttttgttaagaatatagctttacttattggtttccaacaataatgctatttaaagttgtgatcctgagatactgttagagaaaagtaagactgtgataatacttggtttcagggtgtgggaagagaactgttgttcggtatgttgctagtagattaggcctgcatgtagttgaatacagctgtcataatctcatggcggcatctgagagaaagacatcagctactctagctcaagcttttaacacagctcaaaggtaaagcaacttgtgtaacaagataagatgaaatatgagggatacttttttttacatttttcagctaccaattgatgtggtactttgtaataacttctgtgttattttataaatattattccggatcccttgatcttaattcattgaaacagaagtttttttttttcttctttggaacagtacttgtttatgcatgtctataaatatatatatgttatttgtcgtgcaacacttgtaaattagtgtcgattctgttgctgctacgtagtcctcgccttattaattgatcttggacagatactcgcccacaatacttcttcttcgaaattttgatgttttccgaaatctggcctctcaggatggttcaccaagcgatcatgttggtataatttcagaagttgcttcagttatcagagaattcactgagccaatttctgaagatggagatattgattctgaaggaaaactaaatggtgattttgtaagatgcatttattttttttttttttttgccaaagtaagatgcaattgttttactttgatacttgttttagttgttctgtatgtatatgtatacattctcttatattattctgcatttcttatagaaaaagaaatttgtataacttctaaaatgaaagttgtagaagactaaagttgtaatatgatagtcaactagagcatgtcaaggatgttgataattgtgacatgttaatgcagaactcaagcaatagtggaaccagacagatgcatcaggtgtttttaattgcagctgctgatggatctgaaggtctaccaccaattattaggcgttgctttagccatgaaataagcatgggccctttgactgaagaacaaagatttacaatgttgtcacaatcgctgcaaagtgtaactaaacttattcctgatgtatgtgttctttctctctctctcttgatacctatcaacctaggagagttattcagtgatttacatttcttcatatcaattaccaaccttgtcctggatgaaacccatgcaattaagtagtgaatattgaagtttaaaatcaaagctttttttaattgctctagttatccatgtatatatgcacatgaatagcgctgtaatccaaattcatttgcatacattatatcctcaaagttatcatcttgtaagctttgactgaaaggttatgtggaaacccataaatacaattttattctatgatacttgaacttcttcgctgtttattgttgaggtccattttaagatctcgtacttagtgctaggagagtatttgaaaaatggtaggtatagttcttttgatcataatttctgactttgatggatcaaattggtttttgcagataaatacggaggattttgttaaggacatagttggacaaacatctggtttcatgcccagagatatgcatgctttaatggctgatgctggtgctagcttgttttccaaagtcaatactcctatcgatccagatgagtccaagaaattaagtcagtctccaaagtttcaagcagaaccaggcagtgagtctagtgaaagtacaactcaggttctggggaaagaaaacttgatgaaagcactggatcggtcaaagaaaaggaatgcatcggcattgggtactccaaaagtgagtgatgatgtttatttcgtaatagccaatacaatttgctgtgatgctgatcagattttgttcattttgctaagaagaaaaactagtaatagtaatgttattttctgaatactaaagaagacttgccctcatactttactgtaggtccctaacgtgaaatgggaagatgttggtgggcttgaggatgtgaagaagtcaattctggatacagttcaggtatagtctttatatggtcaaaaactgcatctttatatgacattcttgtggaccttctgttaaaagtttacacgccactggaattatgtttaatttgtcaaaatgattttgtggttaattaacatagtcagaaagaatgaatgatcgttttatttaaagttaatgaaaaaggtgttactcggtattcatgtgtttaagacgtcaatagcaattaagtaatttagcttgcataactttaaccattattgaaaggaagttataattttttcctccaccataagtgagggttcataaaaccttggcaggtggtcagttttagagatatgacctcaacagaaagaagaaaggaaattctaattttcttgttatactggtgtggcattctagatgaatgttctgtttttgcttatatctttgttttttaattgaatatccattaaaactaccagttcattggatgagcttcagaaatatcacgtacttattgttattattcacatttgtagttacctctattgcacaaagatttgttttcatctggcttacgcaagcgctcaggtgttcttctatatggacc

SEQ ID NO: 184347 - DNA, 13648 bp, Cannabis indica
actgttagatcagtataaattatttttctttcattcttggttacaaataatttcacattaaatatagatttagtgtactctgtacacaaataagcattatgcaaaagggaaaagtatttgtgctttatatatgatggtgttttgtctcagtaaaatcttgttatagatttcctaaatattattgtgttatcgtggtgtttctaaaaagactattatcaccaaattttatagctaatatctcaatagtattatatcataatttttaatgaaaattacacctgcatcttaattatagacatttcatactatttttattcataacacaggccaaattagaagaaaagcaaaacgataaaagtagacatttcaaatgtattcaaagcgtgttggctggtatccttttttgaaccattcatcttgtaagatttcagaaattgttattctctgccccaaaaaaagaaacaaagaatagtatcaattaacaaaaagcaaccaaatttcatcatcaaagtataagtgggcagggttgtgtatgaaaaccaaggtagacatccaaattcagccttgcaaatctaattttgataaagtagaatacattagtgtgtgtgtgtgtgtgtcatgtacgtaagtgacaatgccatcatatgtgtgtgtgtgtgtaattaacagaagaagaaaatatagttacctttttgtacaaaggcatgagatttggctcattaaaaggcaggtaaccatccatgaggacaaagaaaataaccccacaagaccaaacaccacacgatgtgccatcataacctttactagtgagcacttgtcataaaaatactatacatgagtaatgcatatacagtgcaatatacaacacatgattgtcaattgcattattattttaagatagtaaaatcttgtattaatatactatgtgattaaaaaattaaataccacagagaaaaacatctagcaaacacaaaattgttatacatatattattcacaaaatgtgactagatgacatgcataatgcttttgacacatgtcatgaaaatatgtgaaggaaactgtgccagatttgggtgccaaacctcagctaggattaggcttcggctgggcacaaggacgaaaaaatggtctcaatgaatagatggcgtttttctttcatcaaaaagacaaaactaagttggtgtaacacccccatttcacctgtgtagtcctgtaccaacacaatatacacgggtacgctactttggctattttttggaatgatgactggccctacaaaccaacatgtatcttttaaacgtgtttggtcctcactcgcacacttcctggttagttaacatactaggaggtcacctatcctgaaattgttctaagtcgagcacacttaactttggatttcttaagtgatgggctacgaaaaagaatatgcatcttgttgatataggtagtactcaacaatccattttcgtcatcttcaactgtgtagtcttttaccgacatagtcttaaaatcataacacttaacctacctcaggtgatgttggattgtgcagcttacctgatcttttccctgacagatcatgggacttaaactatcacagctgggcattgggcccaatgcctagattaaccctataggcgcccaagttgatgttgttggtaatttatagttttgcaataatcaattagaatcaaatagtaatgttttcttgaaaagtttacaaccaagataaaagttcaagattcacattgaattagaatcttgattttcaagaaaggatatcttgaacctaaaattagattaaacaatatggatcaaattaatacaatggaatgacgtgataatgtgtatcaaaacagtaggagatgcaaagtatgaacataactaaagagggtaaaaacacaaagattagggttaaagagatataacccaaattagtaactagaggcttgacacatttgataaatgttgtccaaaatctttattcctaagcccccatttcataaagtttcttacaccttcgataattattatgtcatttccaaggcattggtaaaatatactagtatcggatatatggagtatacattagactggaccgatattgaacttggtaaagatatcataaatttactgttatatctttctaagtcaatatcaccaagttgatcttagatcaaaagatcttaatcctaatatggttaggtccaatctcaagtgtgttatttatgttcttagagttgttcgttaaagcttaccaattggtttgggccaatacttacatcttggaaacatgatagtacaattgagtgggagcactaatcatagatacggaatttatagcttctatctagacatagaactgaaatgatgatttccttcgagcttagcttaatagagataaatggaatagctcttatttcagtaattatattagtctactgaaatattatttataggaagctaagtgttttaaggataaaatacgttgaggggtagaatggtaaatttatccctactcgatgtaaatcatctattgaggatctttgattatttggaatataacgatggataattaatagcgtatctatatcttggaacatataaagcattctatataattaagagtacaattctgaacttatagtggcgcaaggaggaattaataagttagagaatttactcggtaaattctagatctacttattggaagcttgattatataggctcatggtccccacactagttgagataataatgcgtgtagactcagttatttggttttaattaattaattataatattaaaattagactatgtcttatttatgaattttcactaagcaagggcttaattgtgaagaaaatatattttagtgtttatttattaattaaaaagactttgtacggtctaattaataaataagttaaataacaattgtatttgataactaattttaattattgaagaattagttttgatatttaaaggattgaaattagaaaatattgcattagtgaaagaaaagataaattattgaataaaatggcaaaattgtaactagtgaggcccattgtatggccgaccacttaaggagtatttttagcctatttttatctttttttttaattctacataatttaaatctaaccctaagagaaatcctatataaggaataagatgactctcattctcatccatccatctataataatttagttttctaactttgtcagacaactagaaatcgggagcctccttctacagatttcgaattctccttctctctttctcttcagaaattttgagcccttagtgatagagtacatgttcactcatatcaagtcaagtaccaatcatagtgtggaagattgtaaagaattcaacacctgaaggagatccaggctcagatcttgttattactctacgatagaaaggaacaagggttagagatctgagtggaaggagacatattattctattgccaccaatgtaaggttttcttaactttatatgtgtttattttcattggtttaggaattcatgtttagggtgttaaattatagattataattaacatacatgttagtaatctagatcctggtaaaataatttccaacaagttgtccctgtgttaaaatgacttgaaaaaggtttttagcgactcaccaggtggttgtttcatgtttgtcaatgatgaagcttctggtctcatggttctcgcagcttgaaattgctttttaaattcttgcaacaattgttcccatgaggttattgaatgtcgagtaaacttatcaaaccaactctttattactctagttaaggaagtagggaataacatacatcacaaattaagtccaacattgttagctcgcttgatggtgttaaaatactcaagtgcccaacaaaatttgtagttccactgtacagagtgacttgaggatttttgaatcctttagggaaaattgagtttgttatatttgaatgaaagggttcaggttcctcgtcgaaatcatagccgggcaacttcccatactcaccatgttcatactttctaaacttttcctccaattgtgtgaccatcaattgaattcggtcatctagaatttgattattcctcacacaaataaggtatgtttctatttaaatgttcacgaaggtttggaacattacaattcatatgttctcgcaaatcgaattgtctccgattcaaatgttcccaaaaatcaagttcacatcattgtttgcgacgtcgccctctccttgtatcataattgcttaccgacctcgtagtcgagacactctcagtttgataactttgaaaatcattaatactggtctgctcatctctgttattgtctcaggtattatgtctttcatgttaggaagcttctcgtgtttgggatcacgaggattgacttcgtgtttggcttcttgattcattggcaatagtgtttgattttgtcctttaggaatgggcttctcgcttgggttggcatcgttaatacaagtttgacatgtgattccttccaaggaaggtacatctgacccctagcagtcctttgtggacctcacggtggtctagaatgattttctggtcgagcaacattttattttggtggaggcccctcattcttgcaagaggtttttggtgcttctggtcgcaatttcttggcattcgtatttttgtgattttgatgaatttccctggtatttcttgggtgttgcttctggggatttgtagggttttcctaattgttctcttcgacaagggaatccatatttctccttgtcctagatccacaaggcctcccttgtggattccttataggtggattcgtttgtggtgtgccaccctgagctgcccttgccacttcaacctcacgttctatttccgcattccttcaatttgattcaaccaatctttactaaagttgtcaattttatagttttacaagcagaacgtaatgagttgggtcataggctccaggatctcttctccctagaatttccgcttcattttcatttctttcaaagttccattgagttggacttcttccgacatcctggtcttctggggggttcccttcgggctcttttctacggcgatgcatcgtctattctatttcgacattgttattctgtgaattattttccatgacaagaaaatattcagtaaactttcctaggggagatgggttttttaaagtttaaatttcaagaagctttcaatgaaagcaccaaattgttaactcataatttctttaatattaatgagactcttgataattaatgatctgtaatagatattataagaaaattaataatatatctataaagaaacaaacttttacgtggttttgtagttaaaatctacatactccatgagtccctcttaattctaagttttatgattaaaagatataacttagcatcaattctctcaatcgggaaagaactcgacatctcctttacaatgacttttgccactatttataggaacttagcctgacagttattctttctaatcttatctatatgatggttcatgaaatgtggacattccccatgtttcatgttattttatcttcaaacggttatttaccaaactgtctttcagttcaatatttatcctcgcaaataacatatgaatcaacattcaccgttaggatgcttcttgctgattaattgaacattcttcttgaaataatttatcctaaatgacatattggataattgttgtatgaccccttcaggcaaaattcttcaaattgtatttcttgtgtttctcgtgataaaagcattcgatcttacaaccagctaaaactttttcttctcgctaaactttattttatttgtacagtatttttcgatgagactatattatatgtctttagtcttgattgcatactatttaatgaccaatacatttaacttttatggtacagggcaagactctaaattctatatcatatgagtattatttgaaacacattaaacgccatattatttctccttaatatgcgagtctattaaattttaattgcttgtacacgtgtcatgattatattcacggctcaaaatatgaatttaacatgattacaacaaacataagcaaccgtaatactatgtcctaatagtaataactcctaagatttcttctttttttttctttccttttcttttgtaaggtaataactcagatttgttttggcataaacgccaactatcttccttaaaatcttaccataagcatcacaaatttacattttaattttgcaataataagggttaatttaataattttttaaaaataattcaaaaaagagtgtctgcccatgttcatgctctgtggcagttttttagttttttacagttattttcgatcaccacttccccttttctctattctccactactaattaccaccgtgtaattctgatattacacaccagtatttagtaactggttctctgcatttgttgtttcaatccttgttttacatcagttaccttttctactcatcaatgaatccactcctacacaagatgaaacccacaatgacattaaccgaaatgaaagcactattttggccatcactgatgatggtattgatactgaagtaacacaggagtttattctgatcgctcgtgttcttacaagtaaaaaagtgtggttaactactcttcaacgacagatggtggaaatttgggatggaaggttcaaagttaatattaaagaacatcactctgatttgttcttgctttgtttcggatgtgaaggagatcgaattcgggcattagaaaaggagtcgtggcacttccaaaaccaccacattgtccttcttgatccaactttgcatcaaaatgtgactcctgaaatcatggctcattctcctttttgggtgcaagcctatagactaccattcttgagtaagtctagatctttggctaaatcgttggcctcaattctgggagaatttttggatgtccatgatgattctttcaacgaaggtgggggccttttttacgtttttgggtcaaaattgacataacgaaaccactcttgaggggttagatgattactcttcctaagattaaggatgagttttggattgagtttcgatatgagcgtttaccagactattgtatggagtgtgggctaattgggcatctttcaaaagtgtcctgtttttcttgagaagttggataatggagtggaacctgaactaccatatggaccagaatcgaaaggatcaagattacctacttcttcctatatgatcgctatcgtactaattttccaaagggtaatgcatggcctttactcactcatttggcaagaacttcattgactgcaactcttcccaaactacgctctactcctcaaccgcaaccaagatctttactgttgggtgaatcttcaaattctactacagcaacacaagttaattacccatcacacaatgttccacccgttaatgtggtgtcgactgacactaccactaactttcatgttactcaacctctgattgcaccattgttcacaccactttttcttaacaacatatccttcagtaaatctccagattgttcctttaatgcttcaaccatttcccctgccattgattatcactcaaaaaataaaggaaaaattgttcttacttccagtagcagctcgaattctcttgctatgcttgatgtttgcacaccatatttagcgaaagacgccattgttcattcaggcaattgctcttccagtgtttttgcattataccccctttaacaaacacgatccatggcaaaacactacccctacaaccattaactgctattgctgtcaccactacagtagtctcaactatttctcctgctactttgcacactactatgacgacactcaaaggccaagagaatgctcaacccaaccgtactttcaaaagacaatttgacactaattcaatgagacaaactctcaaaagatgtcgagccaaccaatctgaaatggtttcttccttgtcagaagaaactggtccaactcagttcgtttctactgctggtgtagattcaactgatgctcaagacaactttgcggtgattgcttagcaatcttgcgattcgccatgaaaatcatcagttggaatgcacggggtttggggaacccgggtgcattccgtcgtctatgtttgcttgttaaagagcaaacacctcatgttttgtttcttatggagacaaaggttactgttaattctcttactcgctttaaacagtctttgaatttcaataatggtttagaggttcctaggacgggtttgaagggtggaatcatgttgttatggaaggatattgtggatgtaactcttctttcaatgaatataaattattttgactgttatttattctgtaatgatggaccctgatggcacttatctcttgtatatggctttccggaaactaaaaataaaaagcacacttggactcttataaaatatttacatgatgtctctccacttgatccatggatggtgctaggtgatcttaatgaaattttctcacacactcacaaaaatgggggacctttgacacaagataaccacatgacagcttttcgaactactttggatcagtgttgcttgaaggaattgcctttttttggtgatgattttacttggtctagaagtagaaaaaaccctgctgctcttaaagaaagaatagactggtgttttgtgaataccgtttggatggactctctaattcagccaacagttactcatctcgatcactatggttctgaccatagagcaatttatgtagagcttaacttctctaaccagctggaaattgaaaaaagaagatcaaggtttcggtttgaaaggatttggttaaatgatgcagaaagcttggttataatatctacaaacttgaataaaaaccatcaagaaaatgaggacatcttcactcaattagttgatagcatacaatgttgcgcaaccaacttgcagcaatggcatattggcaaattcgggcacatgaaacaagatattaaggaggctcaatccagagttcaacaattgaataattgtgttacaccagattctgaattttcacagaatgtgcaatcggctgaagctattttggatgagcttttggccaatgaagagcaatattggcagcaacgatctagggtggaatggctcaaatctggggatcgtaacaccaaattctttcatgccaaagattcgtctcgaaaatccaacaatcgcatcaacaaattgcataatgataatggacaatatgtctattctcgtgatgaaatagccactgttataacacaatattttgctactcttttcaaagcctcggatgaagaccattgggcactatctcatgttctatcaaaaattccaaccacaataactgatgctcacgatgattttcttttacaagaattcactaaggaagatgtcattacagctttgaaaacaatgggagctgacaaaagttgtggtattaatggtatgtctgcaatgttctatcatcacaattgggataccgctggtcctctggttactaaagttgttttgaatgtcttaaattatggtggaaacccagctgggttcaacaagcctctcatctctctcatcctaaaagtgaagaagcctaagacaatgaaagacttcagaccaataagtctttgcaatgttgtttataaattaatttcaaagatgttggttcttcgattaaaacatgttcttcctcatgttatctccgagactcagagtgcttttctcccaaatcgactgattacggacaatgtcttagttgcctttgagatggttcatagtttgaagaatagaaagagaggtactaagggatatgctgctctaaaactcgacatgagtaatgcattcgatcgtttggaatgttcatacttggctgctgtgatgggaaaaatggggttcaacatttgatggatttctctcattatgacttgtctacacacaacttcattttcattccttgttaatggtgaagttaaagattcagttatacctgaacgttgactccatcagggcgagcctttgtctccatacttatttttagtttgctcgaaatgtctttcacgacttttgtaatatgaggaggctattggaaggctccaaggtctgtctatttctcgaaatgcaccatccatcactcacctattctttgctgatgatagtttactctttttgccgagctaatgatcgatcttgtggtgctattaaaagagcattggacatttatcatcaagcttctggacaacttctaaatgaagataagtcggtaatgtctttttcaccaaatacaccagctgccatgaagagttcctttagccaaatattgtatgccagttaatgagtgtcatgaaaaatatttaggcctacccgcatattctgagcatgataaaaagcatcattttgctgatattaaagaaaggatttggaaacttttacatgcttggcatgacaaattgttctcaattggaggaaaagaaattctcttgaaagcggtggtccaatcaattcccacttatgctatgagttgttttaaactttcgaagagcttctgtaatcagttggatacaatgatggcacaattctggtggggttcaacagaggacaagaaacagactcattggaaaaagtggaaatttctttgcaaaataaaaatggaagggggtttgggtttttgttcctatgtccattttaaccaagcgttgctggctaaacaagcttggcagatctttcttaatccaaattctttgctgtcacgtattctgaaagcgggatattttttgaatgatgattttgtgccagccaataagggtaataattcatcactaacatggcaaggtatttgttgggggcgtgggttgcttgttaaaggattgaggatgaatgtgggaaatggaaggcgaattctttgttgttctgatccttggattccaggacattcgatcttcacaccagcatactatactggtttaccactcaacaaagttgttgattatatttccagtgatcatgaatggaacttacaatcacttcaaagggacttttctgctgttgatattgacaatattctcacaatcccatattctaattctgctccagatgattattgggtgtggaattacactatacatgggaaatatacggttcaatcaagatatcactttgcttgctctttggagaatcaagatcactcttccacttcggattcaacatcatcctggtggagtgatttttgggggttatattccttcaaaagtgaagattttcggctggaaagtcattcagaattcactcccttttgcttgtgccttatatcagcgaaaaataatcacatcagcagcatgtagtttgtgctccaatgcttgggaatcagtgagacatgccttgtttagttgtaaacatgcgaaggcagtttggcgttcttctggttacacttttgattttcaggctgcaagtaggatgaaagatggagattttatcatgtacctatcaaaaatatacaccaaatctgatatggaaaagatactatgcactatgtggtccatttggtttgacagaaacaacattctacatgataaattggctcaaaaaccagctgctatttatgctaaatccattgcttatcttggcaatttccagcaggtctaatctacgacagcagcccgcaattcgaattcatcagtagcacctcatcaaccttggcaagctcctcccctttctcgattgaaaatgaatgtggatgcagcagtttcttcatcctgcaataaatcgggatttggagccataataagggactcaattggacatgtcatagctgcactctccgaaccgatggctgggaactacaaagctcatgaaatggaggctaaggctccctaccatagtctaaaataggctaataacatgcatcttcaaatagatatggtggaatcggattcgttgatggtggttactgctcttaatggtttaccatctagaaattcagacttcaatgatcttattttaaatgttaaaaatcaattatcctttttccctaatgtttgtgtatctcatgttcgaaaagatgcaaaccaagctgctcatggcttggctaaacaagcgttagcgttggataatgattgtatgtggtatgagaatattccccctaccattttctctgttgttgtacatgactctttaaatttataataacaaactttttctccaaaaaaaaaataataataaaaattttaaaaatatacatatatatacatttattaaatttcaaactttttcactatcactaatcataaaaactttagaaatgcactaccaaacccgaaatcatcatagctgctaagtatattgtatcacaaccagagaacatatttaataaatgtatatatatatatatatatatatatattcattttgtataatttttttaagagatacttttggattgagtttaatgtcatcgtcagaaatcctccgaataattgaagagctgctctttactattcaaacacctaaatctcaacagaatggcaaataaaaattcacaccatatcatggaggacaaaacggacgcttcaactttgtcagaaacaaaagttacatccctgaaacaacacaaaaaacaaacattgttataaaaatatgtagtaccttgtaattgtgttcttacaaaacaataatagggattgcctcaaaataaagagaaatactaaaatgtaccaatagtgtctaacacctttctacgtgtcaatatcgcttttaagtatcgagtctcatatagtttaatgtaataacttttagagagtatcgctaatattgtaaagtacacgtctagaaggtgttaggcactattggtatctaataacaatgcttcaaaataaatcataggagatatgaatctaataagttgttctagaaacgtttttacctcttaagtatttgacaagtaaagagtcacttctcaatgtttttcttcggtttgtagaagtacccctaaaaataggtgtaccaatgcatctctttcgttttttcgatattcaaatagtttaaattttaatttttttatatgacagtgtacattgtagttatctgaaatattgcaaatctttgaaaaatttaaaataatttaactcgtcgaaaacaaatttccaatagtctattgcatatgtacctcttttattttctacgcgtgcagtttgaatcctactttttgtattttaaattattccaaattttttaaaactttggagaatgtcttaaataactacaatatattatatataaaaaattgaaattataactacttcaagaattaagatctactattaaaagatggtatcccataatgtattaaaccaatctaattgtgacacatcaattaatttgagtactttaaggaaaaaaaaacttatctacatggttaatggagtctaagaaaagtaattagttgagttggcaaatttagattgatttaatacaatgggacaccaatttttaacagatgatcttaattcctatttcaatatcaaaaacacaaggtaacgtttggttaagaagaatgaaaacataattataggaatgagaatgggaatag

SEQ ID NO: 184348 - DNA, 8814 bp, Cannabis indica
tatatatatatctatttttttttgtgaaacgaagggaatactagtaagacataatattagtaacttatttacttcaagtaagatgatgaataaccaatgaagaataaatatcagaaccatctccttgtatatagactaatcaaatatctcaattctgcattaagtagtaagtataagatttaccatggcattgacataaaatcctactgtcgtaaaatagcacgacatcatacggaagaagtcgaaacggtgccctaatcgatagatatccctgctgagtgtctgctctccattaccacaagccacctttgcttcaaagagagatatttgattgagcccaacatctctaccctttccaacctgaagatactcgtggtgagtgacattccctcgcctaagagttgagttgaaacctgaaagacccaacattaataaacagaagttaacaaaatccccagtgcccattgctaaatgaataatatcgtttcttttatttttattttgtcatgagagtgctaccagcaaagatatcctcgctcaagttgattccgcgagaagccttgctaataccaccacgagtaatgtgaaaaattctgtcgaagacgtctggatgaccatagtggaaccgaaccctgattcaaatcaatgcagctttaggtataatacggaatgctgtctagacttttagcctaagtagtacccacaccatctcttcttatagagaaagttttgagttcaatccccacccctaaatataatatatatttatattaaaaagtataacaaggtatgatatggaatattaatcctggaggattaagaaaatgctttccacatacatgtatgatgcccattgatcattttaatgagaacatagctaatgtttttctatagaaagctgacacaaattagtttagtgaaaataaaataaaatatgtgccttcatttttcattacaaatgacttgctcatactaaatacgatgataaaacaaatacgtgtctaaaacatagctgctgtggtgtttcttcccgaggataaagttaaagaaagcttacttcaaaggtcttgcgagaactctttgacctatggtcacaaagcttgtttcttgatttgacataaaccaagccagagaagacacactgccatgcatattatttataaaaagtatcagctagactttactggattaaattaaaatagattggagctccggatagaaaagaaaaaagaaataatattctcaccttccagtaaaaatatgctcacgaactcccaagattgtaggtggacgcaccccatgatcctcattgaattcttccaaaaggttacgcattttcaaagcttcttccaaataattgtcctacagaaatttgaaagcttcaagcctcaaacttggcctcaattcaaaagacagcataaaataacttcaaattctaatggtaacctgattcatgtcaatcgtctgaagagcttctcctcgagtaaaaattatagcatggttttggttttccggctttccttctcctatcttggctgaacccggcaattttatccgatagatttcctttaaaccagaacaaaataattatatatatatggaaaatacttctcaatagatattacccattgatggttactaaacaaatttaactatacatattaattttaaatataaatatatatatatttatcataaggcatagaagcacaattattgttctgaatttacctgatcaagattatcaacagctttcaccaatactgaataataaaccttatgtacttttcctccttcattctcttcaacttcatcaatatatgccaccctaagagaagggttactgtacaaaggaaaaaataaattaaattaaactcttgaatgaaatgaagaattgacatgtcacattaattaacaaacagggaacatacttgaccatcaagttcaggatgtctgttgcacgacggtctccacttcgcttctggttgccatagttttgacaggtagcgatatatgtgaatttcatgtcagcaaccgcttctagttgagcataaagagatctttggctttttttatcttcctctgatggaactgttatggctttgtagcctccaagtatctctgttcacagcaagaaattactaacatgaagaaaatataactacctatactacctcataagaacagcaagcaggaaaaacattcattgtgttcatacgcaaccaccaccggcatatgataaagatgaacaattaaatagactaaaagaggactaggaagtaactagaacacagaaagatacattagaaattttatgaagcaactaaaataatgtttttagaagacagaatagttgatgttgatttctataaaagctacaatcccaatttggacctaatatatgaaagcaccagagtttacatgatttttcaatgtttcttggttaaagatatggaagtaaatgctcttaccactttcattagccatgtcaagaaaagcctgaagcttcaaagctcgtctatagtacatcattcctcgaactgaaacacaaaaacttagtcagtacaggaagctgattattaataataaacatgaaaaaggaatgcatccaatacttgttctgcagagagtttgtcctcttagggagacccaatgacgaagttgtaaaatgttttcctcagtttcccatatctcgctatctttcttacaattaattctctccatgaagttattccactcatctacaagttgcaaaatggttaaatattaaattcaaagtcataaatcaaatctaaaatttactgtgaaacatagttaaaagatagaaccacacacctgggaaaattttctgcaagtaatataagattgatacaccatcttcattttccaactcaaggtcagttttagagtacactgtctcctcactgtagtatggggtcatgacactgccagtagcagacaagtaagaacaaatcacgcatcaatatttcattttatgagccaaagctatggctgcaagaatgatctattgcagataaaatatttcttgcacatataacatagaaacataaaatatttctagccaatttgtttgaagaaaataaccgcgtgaaaggtactggtagattctatgctgaggccttaaaaaaccttgctattctaattatgagtacacttgctagtttcaagaagaatcagacatatagaattcaaagtgttccatttatatgagtaaaaaactttatccaacctgaaagaaagcattttccggactttgggggcacgtggcatatccatgaacagtgaatttgtgaaaaatgagattcttctacaagcttcgaggttagtcggcacatcagtagcagattccttcactgtcaacaagaggtataggcgtcttatctagaatgatagcaagcaataagcatgtttcagttaaacagttactacagattgcaatgaaaacccatctgagtaattttttatacctgttcttcccactgagctgtgacaactggggggaatgctatggcaggtcttgtatcagtacctgcaaaaagttgtctcccagtatccttgctactatgaccaacttcaaccaattccctgaaatgtataacataagaaatgtatgcactgagcatatatatgtccaccgctacaattcgtctttaagacacagcagtttcttcaaatagaatgacgtaacgtttgacctacctaagctcattcaccatcatgtcacgggtgacaacttccagcatatcttgcagtaacaacaccactgtatctttattggatggttcagcatctttctgcaacagagaaattgcaataacaaagtttattgcattttcaaactaagcacataccatgtatataattacatatacattcttctaatgatataccaggatttctacaagctccacaaatttcttgcagagagtaggtaaaggacccattctgaagtttgcaagaagcagattttttgagatgctactttcaacttctttaataatgatgctaattatcctgcaaaccacaaaatcaaatcagaatttatagcaacattttatatatgttgagacataataattgttgatatccacgctcattaaaatattaaacacttatttgtaatctctacaggttacattatggtacaggttatttggatcaagcataagactgagcttaaatgaaacaatatgtgatgcgaaaaagaaatcgttgaaatttggctcagacatggaaaatgcaaaacaataaaaacaaaaatggaacgatcaaaatcaagtggtccacgctaagaaagtcattggaaaattacattcttttaagacaatgtaatatctcagcacctttttcacttctcaatttagttttgagcttgtcaattgtaagagcagattttaggtatgacaaagaagtttcagaaactgtaagaagtgtaactcattgatattatagactacaaaacaagacattactttattctgactctttgattgctaaaaactgtaacaaacagaattatatattctaattgtaaagaaaccaattgctgccaatataaccttttctcattttctccaaccacaagaacactcaagacatgcttgaaaaattcataacattcaatcactgcacatttcatgtattcatcagcacatatacgcttccagagatcagagtccttggatttaaattgagctgccatgtctaatgctattggtatctgcagaggtaaaaatgaaaaggtcaaatacagcacagtaacatatgtaagacctcaaaaatgttcatacttaccttgctggcaagcaaaaaaggtggccactgaataatctttaggcctggatctgatgaataaggaactaacagcaaatccatttccctggagtaaagagcccggtatatctttaataaaatgatgagcacaagttagtggtaattaatcacaatatgactgaattttaggcctttcctgtcactaatgagatcttcctctcggaagctacagataacttcattccacaactgtgcaaatttcgcagcttcacttctcctgcttgctgtaatctgaagggtgcagtgcaaacaaagatatattgaatgaatctatacaatttctcatgcgactaaaattaaaaaattttaaaaaagcaacctcagcaaaacgcttggcaaaagaaaatcctcttttctgcgacctatctgaaggcaccagatatgtgttgaatgcaccgggtaaggactggaaccttgatctaagcatccccaatgttcgtatctgtaagaaaagtaggcatgctttaatcagtgacagtttttattaaagaatgagaagaaaagaaagtactgatttcattcatcaccaggctatcccaagaagtgaacaggaagcgtaagatacatcttacattaaattaaattgatgaaataaaaatgataataaaaaggaatacctctcctaggcgatcgaaggccccaatgacaccaccatacaaagttgaataaattgaataccaaatttgtgtatccataaaataaacctgatgagatggggcacagcgtcagttgtcttatcaaaagcagcaagaagttccatttatacaagggcatattaatgaatcattatatcaaacttaaggaaagatgtagtaaaaggaccatgataactggtgcccaaagtgatacaaccgctccatagttgttttgagctgcgttggaaagagattattagcatacatagaaaacaagttaattttgtgctcatgccacaagaagaagcaacaagtagtacccttggggaaaaactcatgccattcatattccactctgtgaatactcattatatcttttgttggcttcactagaggtttaatctaggaaaagacaaatggaaagttaacgtaacaatagtagattgtctaacatatggataaaaaaaaatatacatatgaaataaatgaataaaacctgggcaagatagctgaatgcaagcttggaacacaaaagtatcacccaaaaaagtgtatacctgaacatatcaagaaataagaacaattataaaggtttcaccaaaaaatacagagttggtaaatatagttcttgacattctcactttataagtgcaaattgactttcgtgcatccccctgccaatgtatattctgggctgcatagaacaaataatatattaaaaaaaatatacaaattacaatttctttaaatgcaaaaagttagtgcaattaggaaaatatcgaaaacagaagtagcttccaaatatatttaagattcatggaaactaatatcatcataaacaggggaaaagaaagcaaaatctgaataatatgcaatatgcatgcactacttacaccagtaagtagttcgtctgatgcaaacttgagctaatcaaatatatgtcagccttaaacattgatttgttgaattccaaattcttaacatcatatgaaaaataatcttacagaacttaacttggaatcaattatttcaattatcataattagtcgaagttgtttatctagaaaactaaatattatgctgactctggatacaggaacaaagagaaggaaatgaaaaaaaagaagaaaatacaaaactttttttttaaataatgagaattatattaagagtacatgttagtgtaacccaaagaagtatttgagatcaccattgtcctaaaacaaaatgctgctggatgagggtttcaacattgtactaaatacataaatggaaagataaaaagaccagaatgatacaagtacctgtgaccaccataagaggaaccgaataatgtgccagtctgaattttcaatccaacgccggagcattgggaatatgaataaagctgctgctagcaaatttggaatcaaatatattgcaacggcaaggatgtaaaaaggaggaacaccatttacttgcttaagaaatgaaagcatatctctgatttggacaggggctcccttaaacgaatgcatgtaaaagagaggaagaattacaacccatgcaagactaacaattatcttcagaagatttctcagtacatcagtagacttccacctatgatatcccggaaaaattcaaaaacaaggtccaatatacctaaaaagaaaaacgaaattcataactaaccataatacacacttctatagccaaaaaactgttagaactatatagtatgcataaaagacaaaaatgttcttcatataactacatgcctaataaaatattagcagctgtatttaagagttgaaaattattcatcacatctcttgtttggagattaattacttataactctgttagatttcagatgtactttacttagccagtaccacctataatcagattcttctataattatttttcctgttatcattcaaattatgcctataaggtattcgtgtgacagtataataatagctaatgtaagaaaccagagtgcttaataaacaaagcacaggcagaattactgcttcttgcacttttgaaataaaatatcttaaattacaatttaaataaatagatcatatagttcttttaattaagatcaacatactttgaagtaagcgaagaaaagctgctgtaatgaaaacactagatacatgatacaggacatcctttcggaaaatgtctattggtgaaattcctttccatgcaataataatcattgcctgcgattaaacaaacattagtaataaacaaatgatatgggcatccaactaagagcatatcaaaatacagtgagttctttcctctcttttacagagcttgatacctgtagagtaagtacataaaatgtccataatcgatcaaaacttctaaaaatgtgccaaaatgttcgagtttcaacaaagtatgactttcctgtgcttccagactttcttcgaggacccttcctcccctgatagtgacattgtattaaacaccaaatttccttttaagaatttgagaaaagttgtgtaaatgttcagggtacctgtttcagatcacgagttgatttgaaaaagtcgccatcatcacgcattggccaaccaagagagaagcaatgagatgacctgaaattttataagtgaaaatggaagaatcagcttaagatgacccaaagcagtcaaatctttataagaagttgaaatgaaatgacttcgaccataccagaaatactcattcagatcatcatagttgcaccaaccggagtgaggagcttttccgtttccactcttgttcgactcctggagtatcataaatgaataaataaaaacaattgcctaaaacacatatagcagaaacttgctgacactacccatgttgttgctgaatcataccttttcaataacacggtaaagaggtgttataaccttacgtagaaatgcctcatcatccccaccataggaaggcttgatattttcaccagtaacaatgctcacatttccggccaataagccatgtaactcgtaggccatctaaacatatcactggactttgttactgataaggtaaagacataacgtacaatttataaaatagtattcagttaagagaaaacaaataaggtagtgagccactgacattgtgaaaaatgtaacataaacactctggcatgaagcggacatttgctgcttcaccccagataagaaagtataaacccatgtagagaattttcctctgctgtatctcttgctgaccttgaggaagcctacacagatttacaagacatttattaaggataaactaaactataaaaccaaatctgatttacaaaagttaaaaagagaagtgcacatag

SEQ ID NO: 184349 - DNA, 6046 bp, Cannabis indica
aaaaacaagtttcatttctgtaacaaaaaaaaataatatctatatttaagatcattttttatttattttaatgttttatttttttaaaaagaaaagataaataaaaagaaacacaaatttaaagttttttatggtattgctcgtgacttttttccagatttgttaagttttttaaaaaatatcataaatagagaaataaaataattaaactattaaagatatataaaaatatcaaaatttatcttccatattcctatattttgtaaatagcccaaaattataacatgtaatattatttagttaggccataaaaaaataaatcttataattttcccatgtaatttctacttaaaaaaatgaagtaaaaacgtcatgtcgttttgccatgcaaaaccacatttttctctctggttttctggcgcttaaaccctaaacccttttccaaacctccttctcactctttccttccagctatggcgtccgtagcaacccgggccaacccgctcctcaaaatcgtcccccatttcctcacatggagaacgcttgggttccgtacaatttgcagcggccgcctaggtttcgcgtcccaatcggagcagatcaacaccgaaccctccgtcgccggagtcaaggttctggagacatttaaagaagaattcgaagtaggatcacgcttatttatgttagagacgggaaagattgctcgtttcgctaatggtgccgtcgttttaggcgtggaagagactaaagtcttatcaaccgtaacgtcctccaaaggcgatgatgttcgtgatttcttacctcttacggtaatccattattcattgacttccttttcaatttgtttgtgaattcattctggttgattgcgccagtgggtttacttggttttcagtcatcattttttttcgaacaattcaatcgtttgtttcttcatcgttatattactctaaaacttaaaaagtcaattcattagtactcttttcaagtcccaagttcatgacattgttacagggcttatttttatctagaatgttttcattttggggtcaatttttgcttcatatgttataaggttgattatcaagagaaacaattcgctcaaggtgtgattcctaacacattcatgcgaagggagggtgctcctaaagaacgcgaattgttatgtggtcgtctcattgatcgaccgatacgtcctctgtttccgtcaggattttaccacgaagttcaggtatgttaatgttgttgatgcgtaatatctgctggaagttctctttctgtgtaattgttttctccccctgatttttttattttttgaaattttgtgataccgattttgtaggttatggcaagtgttctgtcttctgatggtaaacaagatcctgatgtgatggcggccaatgcaacgtctgccgctcttatgttgtcagatatcccctggggtggtcccattggaatgattcgagtaggaagaattgaaggacagttaattgttaatccaacaatggatgaggtgtgcataatacaaatatttcctagtctttggtgaactttgtacttgatgaactatttttgggatctgatcagtttaccatcattgtggttcattaggctggttagaaaagttggccattgtttaaccatgttcataaaatctcccaaccattttttaagcttgaaacattgatgtcatgtgtgaatgaatgtttttgtacaagttggttgctctttctgtatcatctaattgtaaatcatgtgatatgtgcagctttgcttaagtgatctcaacttagtttatgcctgtacaaaggacaaaacattaatgattgatgtgcaagctcgtgagatatccgagaaagatctagaatttgggttaagatttgcccaccttgaggttagttgagaaacatttgaccatcatgctagtctttttttattaattaaacttctaagatatctgctcatgcaggcagttaaatatcttgaaccacaagtcagacttgttgctaaagcaggtaaacataagaaggaatataaactgtcaatgatgtcagatagaacactggagagagtccgtgagttggcagaagctcctatagaagctgtatttacagatccttcatatggaaaggtgcatattgtctatagttttgtacaaggtctaacattcatccattgtagagctccttcttctttctttcttctttttttctttctagtagatcaattaattcattgtggggcttttgtagagacttgaatgatatttcttttctttctttctttttacgtttatgttgtggtggactttcatccagtttgaacgtggagaggccttagaaaacattacacaagatgttaaaagagttcttgaagaagaaggtgatgaagaaagtttaaaaggtttatcaaagacagtagacacagtaaggaagaaggtaagctgaaaaaagattagaatctggtaacccatgtatatttttccttatgcttttgggaactccaatgctgaacgatgtcattagtaactgctattgcttatggttttatcttgggggctattgactcacatgttattctgtatttagattatattctacaactaatatttagctgagtttataattcttgaaggttggtaaaaccttttgctctgtaaaaatgtcagattgttcgtaaaaggatcattaacgatgggcgaagggttgatgggagacatcttgatgaggttaggcctgtgtattgtgaagctggtaatttgccacagttgcatggatcatcacttttcaatcgtggagatactcaggtttacatccttctggggctcttgaagtttctggtttgattttctttaccctaattacattcatatttcgtgcttgataggttctttgcactgtcacacttggtgcacctgctgacgcccaacgcttggagtctgttgttggtccttcaacaaagcgcttcatgcttcactatagttttccaccattctgcatcaatgaagttggtaaacgaggtggcttgaacaggcgtgaagttggtcatggtaatcattgagacttacattgcctttggatttttgttcttatgaaccttaatttagtaattattgagactatatgaatttttagaagtatgaaacattttaagcaaaaataatctagatgtgaatctttcaaaatattttttttttacacatctagtacaggaagtaatgttttcaattcgtgacggaaagtaggaaccacataaacaggttgctaatttatacatccatggccacataaacaggtttttttggattactaatacgaggttccagctaacatataaatgatgttggttctaatgacatttgtgtatagttacttaattattcattaagttgtacccagtatattaaatttacgttctgaatagatttatcattttgtgattgttaacatgtagaattgatgattctggttgttttcttttttcttttttgctcataggaactcttgcggagaaggctctacttgctgtcttgcctcctgaagaggatttcccttacaccgttcgtatcaattctgaagtcatggcatctgatggttcaacatcaatggccactgtatgtggaggtattatgttcatttttctgttgcagtatgccagtatctgttggttcatatgtcttgtgcttaattaagtaattttctatttttctggttgctttgttgtttcttcttccctattcagaaaatgagtaggggagttttcatgattggtacttgttggcttctggtttgttttatacatatgcatggggctatcattaactcattcaacctaaattcacattacttgatgacttgaggttacgtgtcaatatcagaacattgttattttataatgcataactctgtgcttttgcttaggcagtatggctttgatggatgctggcatatcactgcgtgaacatgtggctggtgtctctgtgggccttattagtgaagttgatccatcaactggcacaataaaagattatcgtatagtgactgatattctggtgagattttttttttgttgtgtctgtgtatgcttgttacatggtggctgaatatggtttatatgtctctcaacaattgagtgttttagattactgaggccattagaaatttcattctattgtcttcctctgctctaggactacagttgactttgttcccccgtcaccctctctccctctaagctgacttttggttttgtcaaagtcgatatttttatttttcttgtaaggataataataaggtttttgttgtgatttttatatttgttatttcacattttttattttcttactttgtctagggtctagaagatcacttgggagacatggacttcaaagttgctggctcccgaaaaggagttacagcaattcagttggatataaaacctgctggaattccactggatattatttgtgagagcttagagtacgctcttaaaggccgtattcaaatccttgatcatatggagagggagatcaatgcacctcgtgcccaagatagaaattctcctcaattaggttgacttttgaacttatgctgtgcttctacgtacattgtttcagtgaatattatcgctgatctttgttttaaatggtttgtgcagctaccttgaagtatggcaatgactcacttcgtcgcttggttggacctcttggtgctttaaagagaaaaattgaagaggaaacaggtttgattcaatcatgagtatgccttaatactgttctggtagttgtagggccctgacagatgagaaatggtgtggggctttttatatgcttgatgctgtttgtcttcggtaattatgtaatgttttctccatgactacagctatatatgggggacaacaaactgatacactatgttgccatatattctttattttcatctgccatcaaatactattgtagcatttagctgttctgcaaattaaaagtctgacgtacagcttataatgatgaaaaatgcttaatgaattaaaatgtctatttttttttaaaaataatatatctaatgttagtttttctctgttaattgtttattaaaacatggaaaaaataactgtttcattatttgacatcattacttttgttgtatgtttattaggtggacgcatcgctgtaagtgacggaacactcactgttgtagctaagaatcaaaccataatggataaagtactagaaaaggtatttatatttttctttgttgtcttgttgtaatagagtgaccaagcaaaataatgtatttatggctgtctcatcccatcttatgggctgtggacttgtttgctaaaccaactgaatacaaattaattttctgatagtgctctcaagacaggaaagaagagactttgctttccgaaattgagaattttatatgaaattgcaccatatactaactagaacaaaagaaaaatttaccctaacctattacgtattacaaaatggcaaagcttgaaaaaaattattcactgtgaaaatatatttgttttcaaaaagtaaataataaagaataggttttcttagaaattacaaactaacaattttggcaaatgttgcaatatgattttggtatgctatttgcaagctttgaatatgatgtctagtatgcctggcttttactgttgcaatgcctttggtaataatgaagatgtgttagctccccattgtttttcatgtctttgctaactcatatggtctcccagattgactttatactcgggcgtgagattgaaattggcgggaattataatggtgttgtaacttcgatcaaggaatatggtgcatttgttgagttcaatggtggccaacaaggccttctgcacatctcagagctgtcacatgaaccggtatgttatttttatttttaaaagaaatatgtaatttctttttctgtccttgactctttcgagtatttatattaatgtatatatcgtcttatttgtgcttcagaaagtttggtattgaatttatgatttggtttttttttaatttttt

SEQ ID NO: 184350 - DNA, 3059 bp, Cannabis indica
ggagtggcaaaccgtggaggggatggctatcagagagctgagaacggtggacgcatgactgcagcaagtgcaaaacctgcaacagttcgggcgccactgccaccacctgcgcttaccgttgggaactaagcttagagtggttgattttgtttcgaagatcactgatttgtaagtctttggatagaatttagagggttgtgtccaatttttcgtgggtacatgatatttttataggatgatgttctgctaaccttttttttttccttttctttttaccttattcttcttatatgagtggttttgaattgtatggtcattgaaatttcgcctagtattttagtgaatagtgatcgattaaatcaggagaatctgttcattttggagtcctttcttctctcttttaaaatgaaattaccattttacccggattttttacatttagttaacttgtctccggattttctacttggttaacttgtccctttttccttcttcactaaaaagtcagcgtttaacattacatttaaattacgattgaccagaacgaatggtccccaagtagcaacatcaatcaatatcagtgaaaattaaatctaatctttgaaaaagttagaacgaatgattccccttcactaaaatcttgaaatactgttgggttctcaataatagtaagttgaacattgtcaaaaaaaaatacactagatcacaataaaatgtttttttttatttggaaaagggtagcattaaaagtttagaatttatttacataatggccaaatcattcagtagcatggcatacgtgtttgtacagtagtgtattaataaactttcaacggtttttaaataaaaatattccattatttgaatttattaaggttggactttgaatttcagccagaataaagtgattttttataataattttgttatttttgtacatacctaaaattattgtagatttcgtattattatattattttcttaaaagaaagtccagaagaaagaacaaattactcataattgtctatatacttccatcgacatcaatcttgtaaaatattaatgaagaattaaataatgagatgctttcacaaatttagacagaacaaacagcaaaattactcataattaccttaggcaaactactcccaataaataatttaacaactgcaaatttattatactcctatagacattttgaaaggaaaaaaagaaaaaaccctaaaataatatttaatatgatgaaagaaatatgctacacttggattgatgcaaattttcctctattatatgggataacaaaggttcactaatataatatgactaagcactagctatggaaccccatgaaaatattagattagctgtggggactgctggattggattgtagtactagcaaagatctttttcattcaagtatggactctctacttgtttagatgccgaaattgcatgcttggacaaagtccaattcatagtccacatactttgtccaaagtggcttaaactggttcatagcaatgtcaagccagggtttcatattcccattgaagtgaaccactgctgcgttggtgatctcctccatgctaatgcttggattgtagcccagtcccagaacatgccatgatttgtctaatggctttgtggtagagtagaatgtgattagacctggtggtaatgtgcccaacttccacaaggtacggttctcattctgcattaagatcagtaccctcaattcattataatctaagtacaagctttttgtaaatggaaaagaataaatgcaatattgattttcttaccagattttgccagtagtgatactcttctgtgcacttttcccttctccacgcatccaaatcgaagaagttcattccataagcccaagcacaggcctttggattaaacttttccttaatcaaagggtgtgagaaattcatgtattgtgcgtatcgatggaacgacccaaaacaagtttcgactgccccgttcaccttaccatccatatcaattttccataaccctgtcaagtccttttgaactacaatatcatcatccaaaaacagaattctatgcaattttgggtacatctctggcaagtaaaacctcagatggtttaatatggagagatatttcgggtttctaaacttcatattggttgtgtctttagtagcattctcgagcttattctcgaaataaaacttctgtaaattcgcagattctagttgcctaaggacaggtacataagaagaattcaagaattcgtaatcttcaacagctttcacctcaatatgtgaccctttataatcctttaatttgaacataacttgcattgctccaaggttcatcttatcagtgacaacatggaacacatgcttccatggctcctttgcattctttactgccgaattaaccaccaccgaggcagcaaccacattatcggaaaatatagcatagtgatacagatttggatcctcaagttctggagcctttggcttcccttcatctgaatacttttcaggatgagcaatccgctcctccatcaatcgcattgcaacgcaatgcaagcttttggggatagatttggccgcaattaaactagagaacgctccttgcttcttagcctttgacaacatctcattcacttggaaaatcgtatccttaagcttctgaatcttgagctggttatcaaaagattctttggcttcggaaatcacctgtctggtgactttgattcgttctttcacctccttttcaaattggcgcagcaccgactcatcaatggagagagcatctgaagccaccagagcttgataggcgggttttgtaagaagatcattgtagctctgtgagagttcagcaaagatcctaacaagcttagagttttcaagtttgagcttccgcgcaaagactgcataagtgagcgccagggatttgtgatcttcggcttgtttacggatctggtcaagccgaggcttgagagggtctgatttaagagccagcatcgaccttcttgtagattcaaccccataagaaccagaactaaaaccctaattt

SEQ ID NO: 184351 - DNA, 5302 bp, Cannabis indica
ttttacatgtaaactaccacacagcccatgcttctgacttcgatgtctaccatcactggttgcttcggtaatgtccttgacatcaaatgaacctgaagaattcttttgctttgctacggaccctttttcccagccagtagaagttcccacaacctccagttcaatcatatcttttccttgtgtttggcagttcttacctaggactttcccatgatacgtattatgagatgatacagacttcatatcatcattacatgctaggtctggggcatctggaaccacgtcaccatgattttggggatgcaatatatttacaattgatgacccttgactatagtaggaagctctcaaggatacgtcccccgacttggataactcaacaacatcacgaagaggatcatactggcttccagtagatgacatcatagagcgaactaagaaagatggttgaaatggtacagatggctcccaatcattcgaataagatatacgatttgttgagggtaaattatctggttcagaaccatagtgagaagaactttgaagaaatgaagatctcaagccaagaggacttggttttacagaggaataacttaatggaagagaagattctgtccaggctgagatacgactggatgatagcatgccagtagtcaaaagagaattgcctgagcttgaatttggagattggctagttaaagtctgattattgagtgtaggttggctttggatgctagtaggttcctccatacttctagaatgagaaggtggatttataaaatgataattggttgatgatataatatttccacttgaagaaactccgtactccggatgcaagcttttatttaatacaggaccatctcgattagtcagagtgctccggccactatagtcattaaccgacttgatttgacttttattttcccttcctacatccttaaatgaaaggggaaatacttctctctgaaaagacacaaatttaggcatttcaagaatattatgagaggcttttctttctaagtgttccaatgacttgatgctatcagaattatttccaactgaaggtgctaaggcttcaggaaaactaggtgacctcgatttctgagtagtttctcttaaacctgttaaaggataatgtgttaattagaaacatcttatagaaggccatatagacacagagacactctagaagacataggatataccttcaagttggacttctactttattatctgcaacaccatctacctcgctttgcagaagatcattattaagacgatctttcacatgcagaaacctacaagaactacctttgatgcaccagccttttgcataaaagtcgcatatgactgcaggacgtttattttgatccatgatctcaacaccaggggagtgacttccagtctctttcccagatgcaaccaatctgaaaatcctaataatcaggaaattgtacaagaactttggaattcgtaaataactggccacaacataaaatatcataaaaagcctaagctaagccattgtgtttttcttttcaaaataaaaaaatgaagaacaaatacatctagtatcatccaaccttgacaattttcgcttttcatcattgcaggactgcagtgccgtttgcttaatttcatactgcgtatagagaacatctttctgcctgacacaattattcatcagtaaaacagcacccatatcttttccttcagcaaaagatgaattggaccttttagcgtttgtgatgtcgctaacacgcaaatcaggattgacatccaaagtttgttctttgtggtatttcttggggctctttgctgaaagtgtttcaccatctgttttgtttactgcaaagtctacatttatataactctcagaaaaagctacattttccgataatttctctctagtagatgaacttaatccaaagctcccattacatctctgagatttcaagtcatctctaacagctataagaagaaaaattaaataaaatactagaataggaaaatctctctaaagtatattactaaacccagtatatgctgacatgtctccatgaggttatccgtgtaagcaaaaagttaacgctaaagtaccctaagtctactgttttgaaaaagaaggcaagatgtatagcgtaacagcatagtgcacatccaagcaagctattaaactacagctcataccataagcatatgcaactacgcttagagagaaagagggagggagggagggaaagagagagagaacataaaaagggaggagagaataaaaaacctttagttaaagaaggtataagactgggccatgagatcatattccctacaatttttgacaacaaacacaactaatacgacatgaattattgcattaaagaagaagttactcaattcaccaaaataatacatagaagcatggggttggtatgttccaaccccaataattattttgggcaacttagggccaaaaaaaaaagggtgagaactggaccaagctaatatctaaaagcctaacttgacaaaattaaaaaatgatcttttagttgcacttagataaagttagtggttgaatcaaccatcagccttggaaggtccacaaaaacatagatcttgtctaaccattatgatcgtcactagcattctgctctcaaatctgaaatatcttctgccttaaaggtaagccatgcaatattttagccaaaacataaaagatagaacgaaaggagtagggattttgaaactcagtcttcctattataccatacaatctttgagaggtcataaactcaagaatattgatagcagtccacatgaggaattgaacaccaaaactaatggttgcaaaccacagccttaacctactcttaatgagtcacaaaaggcatggtgatatgggtctatagtgaggaacatttctttgactaatggtggttgaatattgatctcttctttctcttatgtgagcatattgcaatccttaaattggcatgggcccccaactcatgcttattacatgcacgtatttcaaagtttttcaatattgatagtttattccaattcaagtaaagcttagagagattttgatgcaactatccatatctaaactctaaagatgatgaacagatgacaactctctcttgaaagtgacagctgcatctttcggaacattaagtcagagctggagcaattgtggtaaaaagttaatttttatgtgtaattttatagagatatatacacacacacacaagaccaaagacattgtaaatcttttcttctgctgctttattatgttatttaatatatagctgtaattttgtcatttcctcatgaccatcgatgatttgtctctctattatcaataatatagattgaaatctattatgattcttatataaactaaaagaaaagaaaaagatgtgttgactcaagtgcaaggaaagaaggaacgttattggtctttatggatggatcaaatgagcatcccaccaactatgtagtgcacgagaatgtctaaaaattgcacttcatggttccgtcaaagtacaaaagatttaggtgctatcatggctgtaatgaatagaaatgaaaatgataaatcatacagcaatcatattttgcgttaatgaggcagaatataaaattggatcgatgttgcatgcagcttgaaagaataatctttcacaaaccttcagaagtaaaagagtaagaaagctcactgaataaactaggattaagtaacacatatgtacacttaacttggattcgaaattaagaaagatctatcctataatatgcaaaccaacttgggcctacctgcaacaatagatggcatctagcaatatgccctacctgagtttaactcctccattcacactccaatctttttgtggtattattccttaaacccccaacaaccattcggtcagttagttagtctttaactaacttaactatcaattatgacaggaagtatattgtgtcccttggcctatataaagtggactactcgtctcatttcaaacatttcaaagggagaatcataaaaaaagaagaaacacaagaataagggcaagaaggagagagacacaatacagtagagagagaagttagagtgagaaatggagagagatatctgagggagagagagttgggattgggaaattgtattgaacaacattatcgattatgttggctcgggttagtgaattaatgagtgttgagggattacaccatggatgacttactgtgattatttccttgtagctcctgagattgatatctcttatcctcattatcaataaagattgatggcaatgtttcaaactgaagtatgaccaagttcacaatgaacctagaatcggaactaatataaatctcttgtgttattgtgtctgacagccatttagattcatctatgttatatttttctagtttaatgtgtttgctggtttttgttcttgatttgtttgttttgatttaacttttgtttgtttaagtgtgatcttgatgttagaattacagaaattaattcctatgtatcaaagctaaatttcctacactttttcatattacccccacaacattaagctcccttaaaaaatcactacgtgttgggatgtgcatgcttgcaaactatactaagaagcttgtgtatttatggttctttacagtcatgagaccgtgcctattttgtgaagagcatgtgctatatactacaacataaaactagtttaaaaccacctaacaacagcataaccttaaggaaagtataatgttaaacctttagttagatatagtgcaatctcgatttggacgagccaatcatcccaattcccatgcgctcacaatcagtcaaccctattcccttgcaagatttgacatttacaccaaaacgattttcaaaacccttttagcatagttctagcgggcactaacacttacaatgtccatccaaccaagaaacttccttaccttacatttggctagccagcaccccgaaactgtagtatcacacttacaatctctatttaagactttaaatttattaattgaaaaagatgaatatgagaattttatgcactaacactaaagaagtctaatttttccgagtgagactcctctacttgatcaaacatataatctcattcaaaattacagcataatctaaaacaatatcattctaactaattctaaccagtaccttattaattaacataaaagtttaacccaaacccccccaccccaaagaaattagaaaaaatattcaacaacttagcgcataacaacagaaattgagaa

SEQ ID NO: 184352 - DNA, 2367 bp, Cannabis indica
ttttgttgttattttgatgttatttaaatgttattttcatgttacttttatgtagttttcttgttgttttcatgttgtttctatggaaaaccgtaaaaaatatagaaaatgtaatttttttttactaaaaaataggtgtcttatgtaatcatcccaatataatttggttcaggtttttttttgaaataaaaaagtggaaatatttggctttttttatttttaaaacttcaaaaattagttttttttttttttttatttttttttttgtcatttttgtcatttttactagaattccacgtaaaaaatacttataacaattaacgaagcaacctaaattgcaaccaaattccacatagcaacccacatagaaaccacaaaaatcgtaaatttgaaaagaaaagaaaaaagttaaaaaatcatatatggagcaatttcccttgaattttataatttaaattaaatagaaaattcttattaaataatatgcattaatttatttatttatttttttttataaaactatacatacaattttactcatttttttttacattttaaaatgtgtttttattttttttaagtagaattacctcttatattatttttttttaatttactgtttcggttgctacggtagtttctatgtggattgctatgtgaattttaatatatgtatgtggttttttgtaaaaataaaaaaaaaaaaaaaaaaaaaaaaaaaaaaaaaacctatttgaaatttaaaataaaagtctttttctttattctattttaattatatatttaaaaaaaaaaaatagagaatatactagtcaattacaaaagtcttagatttctcgaggaaaatgagatactcaaaatcaatttattgtcgagtcaaaaccaaataaacgaatcttaagaagatggtacgcctggaattagagaaggggagaagaaaaataataaaataaataaaactaaaactgaactgaactgagctgaaaacaatagaatgaaaaaagacctaaaactctatttgtaagcgtcctgcttcatctatatgttagttagccttctttgagtcttgttgaacaacaggttgcctctcagcaagtaaccgtttggtgcgctcgagaacaccgaaaaagattgatccgcctatccctatccacagtactcttggtccaattccctgcaggaaaagtagaatcataatgcattacaatcttgagttcacttgaaaaacagtgtttagaaaaggacaacatagaaatgtatgcataccttcaacagagctggaggcccttcttctctcacaatagtttgaacgcaatctaagatacctttgtactggttgcccgatcccttaaaagaagaaaagaaaaacaatattatggctttaaactgaacagttctatttgattgcatgaaaggaaaacttcataaattgctgaaaagtgcaaatatgcttagaagagtaagtaaaatttatgtctagataagagggacacagattcactacctgaaccatcagccttgtttttatcacatcaaggggagtggttgcagctccagttaatgctcctgtaaatatatacaaattattacaaaggacaacaatggtgtctctggttatctgccttcagccaacattatcagtaatcgaaactaataatgatattctgtcccaatactgccttcccctgcattcctactttataaccacaatcttatactaattcagagtacagattattcactctgttagctagaatacacaagaataatattgttcacatttcagacatggtagacaaagagtctcttagactcttagtatataattgatatgaaccagttccactgaaaaattcatataatttaactcggtaacggaaaatatttctacacatagtaatagaatgctattataataactgtgtagatggctgcatatggaataataacttaaatatcatcttaccggcaaaagcaccaattaaagcattctcaggatcattcaactctctctttacctgcatacaatacaataaaaacaggatcaagatttaacaaggagacgcatataaaaacgataatacgttagagctttccaacttctatgccattcacattataatcgttttggttactagcaaacattgaaattctctaaagtcattgttattctccaatattttatcttctgatttgtacacctataaacatcataaaatgtacaattaggagcttaccgccaatttataaccaatccgaagctgttcgtacatgcaaaattggattgcatcaaagggcaaatctcttaatagaaaggatccatatccctacaatcccacaaggtgaaaacagcaacaacaacaataa

SEQ ID NO: 184353 - DNA, 8630 bp, Cannabis indica
aaataagttcaagaaaaaaatgcaagtctccacaataactctatagcttccattgatgcaaatctaaaacaaaagttatccagtacaaaaattcaagaaataaactagcatatagcatattcaaacataagcatatattccctgaataacagcattataaaatactaaaattcatagcaaaacaacaaaccaaaaactaatataatataccatatcacagagtacacaacaaagcatatactacactgttatcttctcaaatgttcatatcataaaatgctaaagctcaacccagtttacagttacagatacattgcaatttgaaaaaaaaaaaaaatcccaacatggaaaagaaagcataattgcataattgaaatgaagacaaaaatgtaccaaagcaggaaaacgatttatcaaatgccacagaacataataagtataataaataaataaataataccaaagtagaaacagagagaagatgaaatatgtacctgtgattgtgaaaaaagctcagtcgactatgaccaaaaaagaaagctgtgattagaataaaacacacaaaatacaatttaatagagtgaaggaagtgaatgaactaaaaagaataagtgaatcctctattgtatactatgggtaatctatacatgtttataaccatatatacattcaatatttgcgtatacatatatatatatatatctttgtaagaaaaaaaacctggtggataacagagccggcgtggtaagtagttatggtgctttagagaacagaggagagcttcagacgaaagcaagtgaatgaaaggagaagagagttagggtaggactaatgggcccggaatgatggggctattttgggcttgggcctaaatattataattttccaactttttttattggcattatttcacaaatatacaaaaacaataaaaaaaattataaaaatacggttttacggaattttgaatatttttaagatttttttaattttatttacagaaaatacggtctttttatgttatactcatgtgaatttgttgtttgttttttattatttgtatgctattcttttgttgttgttttgattttatttttatgttacttttatgtaattttcttgttgtttttcgtgttgtttctatgaaaaatcgtaaaaatgtaaaaaaaaaatttaaacgtaacaatataattttttaacaaaaatttgtaccttatgtaattattctgtatagaaatttataagtttaattaggggtattcatcaaaccacccacgctccactacacatattgtccgtaccgcaccacactgtatgaaaaatacagtttgaaattttttatgttgcggtttgcatttttttctaactgcgcgatgcagtacaatctgcaattttgaatttaataattatggttcaaaatgcatcgtactttatattacaaaattactaatttatataatatgatttttaaatatacgtaatacattatatgatattaaaatttaataagattattttttttattgttaaattgatttttaaatttttattataatgtttgataataattgtattatagagtgtttaaattatttttatagtgtagttttacaattttaagattttgtaagatctggtttgagaaattacaaaaatcgcctaattcgcaccaaccgtaccgcaaacacccagtttaataatgggtttctattgtttctaaacttcaagactttacttccagtttgttagttacagttcaaatttacactcaaaaatggcgtagttaggtaagtgaagtagtgaagcgagccttgggattgtttgtcttttcttattattgtgtttttgttcgtatatgctgatttggttgactgattatatgcatgaacagttgcacaccatctgttcgagtaatttcctctgagaaatagctgcaagaagactggttttgaggccaaaacctataaaagggtacgcatttataattcatttgcctcttaacacaatttaatttgagtaatgatagacacaatattccaaccaagaaaaagaaagaaaattatgcactatcattgatgagaaaaaataacaaacaatatggaagcggggtttgatttcttattaaaatgatatttaattttttcaattgagatgagtagttctttaaatacaaagtgaatgattgttactattgcaactatacaattaaatattcatagttaagattagttacagactatgattcatcatataatttgaatgtacaaatttgctttaatttatgtcaatatacatgctttgatcacaaatgttattcaaaatgagtttgttaaaccagataacttagggagcgtgtgtgtgtggcataatgggaatcatcaaagatggcacagtgtctgggtctctaccaaatgctcaagtgtttgcagtccattatcctggatatccttcctccatgtctcgtgcaattcaaacccttgggggtgttcaagaaattcagacggtattattatattctttactatttttgttcagtttttttgactaacattaaactcaatttttagtactgatgtgattctgttcattgtaaaaaattaagcatgtttttttttcaatgaaatgaactataaagaaaaagcttttgttctatgtgatttcctctgtatctagataaaatagggtagttgtcttatcttccgtttttcagaaatttggtttcaattatattttataatcagatatttttttcttccttattattttcctgacttgccaagatttgtttggcttgggaaacatatcctaagactaatagaagcattagtttttatctatttggatttttctcctaacttgagactattaacaggttaggaatcttcactcaaataggttggaactccattttcggcctgaggacccatattcgcatcctgcatttggggactttcgtccttgtaacaatctgttgctcagaatatctaaaagcaagtccaccaatggaaaaactagtgtagtttctgataatgtagggttgcagggtgggaatattttggataataaaacacaaacaggtgaatctaaaattagatcagctgcttccaatgaagaagctcaagttcaagcacctgaaactgaaaacatttctgctgatattgttgctcgtgttcctgaggcttatcactttgatggtgagactcaacttaatttcaataatatctgctaagtgtttttgttttatcattcgggaaaacatatattattctacaatttttgagctgattttggtttcttttcttttccgggtatatgtttatgaaggaatggcggattaccagcatgtggttgccgtacatgcagatgtggctcgaacgaagaagagaaaatggatagaagcaggggctactggtgaagtctttgtgtttctcttcttcaaattcaatgcttggaaaacaattctaaattatatttattgtttttcagaaaagggtgaccttctcggtgttgatgaggaggatgtgatgacaatagtgcctccactctttgcactaaaagatattcctgagaatttagtgtaagattttctagtattctcttgattagaatgaatttcttcgttaatctcatttatcttgtatttgcttgaaagataatcattttagtgaattgatgcaagaaaatatgtgaaactccctgacaaagccttttcaagctgaaaataattttcatatttttcaaaatggggaagtaagactaagcaagacttgtgtgatgttatttgagtctagtgaagtttgttaagaagaaacagttagaaattcaattatttttaaacggatattggagcaagatcctatattttggtttaaatttacattgtccaggccgtggttgattatctagagatagccaatgcgatttaattgtttatttttatttttttgaataatgattaaatttcattaaactaaatcatccaaaatctaggatacgtttaattgtttaattttttttttctgttaatgttttttggttgaagttgcttcgtatttgaaatgtttgatataatgtctatggagagatgcatagtagagtgtaactttagaactgttattttatttcataatgtatttcttctaacagtgttacttttttcggaacattatgatttatcaggttgaaaccatcagtagtattgagtccaaaaaagaatcaagaggaagttgctcaacctgaatgtgatgtaatgtctattggcaaccaaattacttgatgcacattgactcattaatgataaataataagctcactcactgaactttccttgttaaattgttaatatatattgcacattatgattttgttaatctttgttttcattttattgaatcatcattctgttttgattgagtagcgctcttgagaatatccatgcccctgaatatttaaattgatttagtaaaccatatttgcatcatcaagattgaatttagtaaaacagtaaaattgatacgttctttattttgtctggcaggtagacatggagcctgtccttggaatcgatttcaacatcaatgatatcctaattattcagtttacattctttccacggtctagatattatttgggatatcttttcttttttctttgttcatacaattattgccatttttctacatcttgcgtctatggcccatttaaatcattattcaattatgaagcacatattaaaatcattggatacaacatgaatatctcttgacccgacaagtctttctccaaaatattctgcattccttgtgcaaatttgtcgtgtgttttatcgagatatccttatttaagactaaaatctgtgatatagatttactttctgtttaattttttatgtagataggaagttagaaaggcagaatatgaaccaaaatctgcattctttctgttatacttaagcattcctacagataccgaagagaataaattgggaggactacattcctcaggactcaactccgtgggagtcacagatggctgtttctaatttgtttgatgagcgacccatatggataaagcgtgcactaaatgaacggttacttgataagggatttaattttgtgcatagtatgcttagaaggtatagcattctgctgaaagcgtgaaacctatataactgatgtaaaaatatgattcttgttgtatttttacggttttgcaagattattctgttcagcaagagaactagtaaaaaaaatgagttctagttgctgccatgggcttatcctaatatggtttttgcaggcttctttctagagttgcatactacttttcaagtggaccatttctaaggttctggatcagaaggggatacgatcctcgtaaagatcctgaatctcgcatgtaagattttcacccaaatatttcatcaacctttgtagaagggacagatccaatcttggattgaaagttgcacttctaatcttttcatgtgttatagtttgatggaatgattttttcttatgagccttatcaatggtttattatttacgatagaaatgatagttcctactattttgctttaacagatatcaaagagttgattttcgagtacatccatctattcgaagttattgtgatgctaacactgccaaccagtaagtttcgaaatgtacacatgcaacacttaagaaggttacagacatacccatgtgtttataatatatgtgcatttttccttaaacagggcaaagcaaagatgggaggatatatgtgcatttcgagcttttccattcaagtgccagacgtcattgcaactattcgaacttgaagatgactacattcaacaagagattaggaagcctccaagtcagactacttgcacagttagtttctcattcctttttacccttacttatttgacacgaaatttgctttgttatttaaacttaaaagaaatatagcaaattatataactagtttataaatgaaaataaaagctaaattcatagtctacttgacttaacttataagacctatattgaaaaattcaagtagactatcatataggttctatgtagtatctaatttgcatggatttccacccaacttttaaaatgtttcttcatttatatcctggttttgagggtcttcataaagaactaaagtatgtataccaagcaagggttgaacgctgtcatttgaagcagcttactagaacttctctcttgagttgcaatagaacctatttattgctagatctttttcttcttttctaggaattattatctctctaagagggttgggataagctattataaatagtctgagagttcaggttaccttttttctatcatgcttaattatcttgttctatgtaattgcagtatgcaagtggatggttttcacaagcggttcttgacagcttgagacatcgtattacagtaaggttcctacctatatatcccaaatctggttttggtgttggtgttgatcgtttacttaaagctgctaccgaaagctttgaaaagtcaaaaaggagacgcaataaagacaatgtaatgcttcatgaagaagagcaccaacaagtggatgcaggttggaaaattacttgcaattcctgttatgattaaatgatttgtgattatcaataggatatggtggctagtgcttcactatatctcattattgtctctcggtactgacattatacagcgctcttattatctgaggaacaaaattatttttgttgtcatgcaaaagtcacattatttgcttatcaaatgttaattttgagatattttcagagaacaatgatgtagatgttatgcatggtgaagatgttgaggaatccaataacgttgaggttgaggtcgaggatgatgatgatgaggatgaggatgaggaaattcagcttgaggaggtatttaaattcatgagttttttatattatgttgaaacagatgttttggtgtcctcataaattgtctttcggtgcatgtaacaaatagtaaattactgcttttgttgatatattatattatcttcattgtaggccgacgatgaaatttctttgcaatctcaatcatgtatccttttaccattatcttacttttgtagaaaggtaaattgttttctgaaaaattgggatcggtttgctggtgattaacttcctaattttattttattgaacgaagaaactctaatagcactaatcctactaatgagaaaatgttttgaagtttcctatacttgagttagatttagatctaaacatggaaagcatctcgagaacccatttacaggagttgtttggtagttttccatccaatgaaggaggagaagataaagtacaagacagagatataagcgatgaagaatatcaaatactcgagcaagatagtgaagacaacttatccgatgagtatgactcctgagttaccaaatattcagaaggtttgtatctatccatagctgcattcatacaaatattcatagccgaagcctagctgcatttatagttgtacacaatcagtcgcccagtttgtacaggcgaccctgatatgagttttgttggctttagatcttgcagctttggagggccccaatgcacaatcaatcacatgacttaccgggtaaattctctgatagattttctacattccaagtatggttcagtaattttgtttgaaaaataccaaatatcagtcatgtgttagtgattggatttcaattatgaagtgagcctcacactatgacaatattttggactgtttggcttgagaggcacagaagagttatactctcttcaaagaaaaagatgaaacataagattttctttgtgaaacaataaatttaggttgttacatgtaatgttaaatgtttagaggagtttcttttttagatttagttagagacatgaatagtttcatgtgaggtttcagtgtatataatgtttgtttatttgtctattttaattatattttgttttattaatagactttatgctgtttgtattcgaatggagcagtgcaaacatgaacctattattttgtactgtattttagtaaaattaatacaaagttttgtttctatttgaattatattctttaacattttttaacaccttttcaaaaaaaaataaaataaaatactcaaaatcttaacattggtgatgtttttcctcgggcaggtgtgttcatacatataagatgaacttttcatactatgagcatacataactaatcattatacatacataataaaatggattaactaaacttaagatataattaaataatcattttcttaaaaaataataatatgtatgaattagcaatttatgagaatgacagaatttcgtgttggaagtagaaagaaatgtgtggctaaaagcgaaatgcaaataggtaaaggatggtgatgacaattcaagatttttccataatctattgaatgcaagaaaggccaggaatacaatatccataacagaaaaagaagatggttcaatccttggtgatgataagtgttgtaaatccctacaacacaaactcaattcacaagcatacacgatgcaatgcatacacaccagatagtaaaccagtaaagaaatgaacaagaatttgacagaaaaaaaa

SEQ ID NO: 184354 - DNA, 3061 bp, Cannabis indica
atataaatgagtcaattcgtatttcaccataaccctaacccaactcaaataaattttgtgttatttaagttcgacccacatctatcttttatgatcctaatccataataattcgtatgagtttgtgtcgtgacgtgaattatcatcactattttgtttatatgctgttaaagatcttaaagagcctcgattttttccgaacagtgtcctctaaggtatagcataatggaattttttcttttttttttttaattaagacactgcagagccccttgaaataaacaactatacacccaaaagcaataggtgaagtttaaagagaaaacgccaagtcttttattaagtcaaacgctctcagcatttgctttgtacattcagttatatctttcggcagtgaaattaacttgtgggttgcggatgtcgtcctggctttggatcaaacgaatctccaaactgcttgacttgggatcgtgaccggctcttttgtaatcattcagtgtcctctgcagaagtgcctgtaagttatgaaaaagattcattagtcaatcagaaactacactgaaataatatagctatctaagataaattttgttttggatactactttgcttcgtgtccaaaacaaaatgtctgggaagtgaataaggtgaagcaaaaaacaatgattctagcacattaccctattttgtttccaggtgacacatctattttgcaaacattggtggattagtgataagctaaggccgtataatttcatgtgcaataaataaaaccacttttaagaaaggtgtctaaaactttaaataggtaggtgcgttagtacggtatatcaattgaggtctctttcgataaagtcacaaaagggagtacatcgaaattgttaaagttacaaaatgagagaaaccattgagctgaaacctacaaactcctgctatatcttgcctaaaacctaaaccaaaactgtaattatttattaaataaatgagctccggcttatatgagagtattcacagcaaaattattaacattaggtgaagtctttattatcaggttttaaaacagcctacctgtaagcttgatacagcaagttctgctgccttgtcaaggtcgtcaggatatttctgatgaacaagaaaagaaaatctattaattctggcatgaattgcttcatactagcaaatgattagccagaaaatattttaaattccttacattgctccaaccaagtagaagtgctgtcataagatctccagtgcccttgcataagcgtaatataaatttgttagtctaaagcatcttacagaggaaaataactaatactgtagagctaaagctgcaataaacaaaacagcagtgacagtacacatcgatgatagtatttataggaggcatccactattaataaccaagcaatttagattgtgatcggcaagaacatttagatcagaaatctgttgtaaataatgatgtcatcaatttatttaatctggttagtattgaaacatgctaaaagaaaatcaagctaaaagttcaattaaaaacatcttccgtgaagctcttaacaatgaaaaagatcttccgtcccatgtttctttgaaatatatctttctgaggactgaagaatgccaaaatgctactaatgattctatgatttttttctttatcttaattcgaaaacttccctttaaaatttcttaagaagatatccattttagaccacatacccttgtaccattttcagataaacattgaaagtgtgagatttttcaaaataggtatcatggatttctgtaacaaaatgaaaacattaatcctccaaaacatcctaaccagcttataagtaacaagtaaataaacacccaagaatcttccatttctcagaaatactcaacatattgaaacacatcttcagcagtcctttaccagccacttaacataattcaaattcaagttctcttaattaccataaagttacttcaagcagtaaacatttttttttcaagaaaataataaacaaacacagaattccacaagcaaaaaaactgcactccagtcgttctaaatacacccttgaattgaaaatataagatggtgcgaagtgcaaccaatggtttttattgtggaatgaaccttctacttcataaaatatcttggtggtttcacataggggaccagtaggactaaattaagatcttaagaatatatagttaaatctacaagctttgagaggcaatatatctagtataatgttagaaattgtgttccatacttcatggagaaaaccataggtcatagtacttgaactatttactattcatgggtctaactaagttagaatctataccttgtcaaaggcataagtgtttaaagtgccaaatgatatataatctaaaaggactgcaatttactttacaaagatttgtaatttgatgagtaattcttaggctctgtccgcaagtcattgaaagcagcagtcagattattatgaaatagcaactttttgttgttttaatcagctaataaattagtttctcacagcaaaaagcaaaaacaatataaacaagccctctgacattgatctggttaggtaacagacacagtcaaatttcaagccttttatgaagaaaattatacataaaactttgctgatggaagaactcgtaagaaataagaatattcctcataccgtgaaatatgcaggaattttgggaatccttatcttaaactgcttaggtgactcaccctgtcaaattcaaaccaaaatatcatacttcattacagctctacagtagagtaaataaatcagtactttcacctccaataaaaaaaaaagaattctgcactttgacagcagaataacaactaacatcttctcccgcttttcaaagaacatatgtgcaacagatattgcaccattcttgtgtgtcaaatattgaaagagattcataccattttaatcaatatcatacaatacagaattatcaatcattaattagttgactacagggaaaactaaagaaaaccaaagttcctaaacatgacttgcattggttgtgagctga

SEQ ID NO: 184355 - DNA, 2954 bp, Cannabis indica
taaagtctgtacatattttacaacgagctccagtttgtactatgtatacaaattattaaagaatttaattcaatcatctaacttctgctgcaataacgtcatacaaaaattttccattgaaatgtttattatgtacaagagcatgacattatttactcaagtcgtttgtttaagaaatctctaaacttaaagcgctgtgtctggccgttttcggcactacttagagatgttgtgtcactgtcttggcaactcggtgatgatatacttccactatctttatcaagaatctcaaaatccagaggatctttactaccagaatccataaaatagtctttatcatcatcatcttcataaccctcgttagaaacacaaatactggattcgataaacatgtcagcatccttctccccattcaacaactctagtatctgacaacaacaaaaagtgttgtttagcaactaggacacaaaggttacttttttagcttttattttacgtacctgactcatttttggacgagctcgagctgactgagaaacacacagcttagctgctaaagccattcttttcatttgagcagtttcaatattctcttttaactttggatccaccaatgctttataatcctctttctctaacaattttcttgcctggatacactaaacatcaagtcaataaagaaaagagtatggtgcaagcataatagagaggagttcttcattcatacccagttgaccaagctctcttgccctttagtaacgttttcaacaattggtcttttcccagataataattcaagaaggacaacaccaaaagcataaacatcaaccttgtagctgagccttccatacatgaagtactctggagccatgtagccgaatgtcccaaccatatcactctcttctgaataagccagatctgtagaaccctttgtagccaaaccgaaatctgacaactacaataggagattttttttatttaagagggatgcataagttggtagttctagctagctaattacacaaagtacaaaacccatattatgatttttatggtgaagaattgaatacctttggctgaagatcatttgtgagaagaatgttagatggctttatatctctgtgaataataggctgtggagagttattgtgcaggtagtttagagcctcagccactgcaatagccatatcaaatctcaattcccacgacacaattgatttaccactattgtcacctgcatatataatacaaaatccaaacacttaaataatttgatgcagttttcaatttattaaaaacaccatacaaaaccaagtgtgattacagctaaactttaccatgcaagtaaatttccaagtttcccttggggtaatagtcatagactgatataagaaggtcattctccaaacatataccaataagaggagcaatgtgtttgtggtttaataaggtgactatgtttacttctaatgaaaaatcagtccaagcttcattgtatggcttcaaaacctttattgctactgatttatcaccttgaagaagccctctatacacactgctacaccctccttctccaataagattttctgtttcaacagaccaatcaattgctatgatctaataaaagacttacttaaaaagaaaaagaaaaacagataaggtaatcataaagttattacttacctgaagaaaatgaacaggttgcaaccttcaattcttcatatgtgaatatcctgcaatctaatgactttgctgtactaagaagctccaactcatttgctgtattcgaagtgtcgaattctgttaaattcgaatctaaagttgttggaggaactggtattagaagaagaggccaacctggccttgatttcactgatttttcattggcttctttgtctttgatggtacagtaatcaagttgagacctattagggagactcattacccactgaaccacaggtatgttgttcttcttatgatctccttgtttaaaagaaatatatcccaatatatttctcttagatgatgatgatggtgataagtccttaacttgtttcaactttggtttttcaaacttaagcaactctgattctgagacatctcttgaactattattatgaacagaagaacaccctttgagtaaaacttttcctttataatcagccagaagaataatagtagatagatggatattcattgaggctgttgtctctaatagatgaaacgcagcagttgaattttgactcataactttaaaaaagaaaaaaaaaaagaaaatatattatatataaatatatataatatagaatcttaatattattcttacccaacagtttgttttggatccttggcctccacctagggatgtacatgggatgggtcccgtagggacttgcacctaatagggcggggatttcccgtttaaataggaagaggaatggggacagggacagagattactttttatctccgaatgttaaatgaaacggagacgggaatgacatttcccgttttaataaagaacgtttagtattttattttaaatatctaataatattttataatttatactttatatttatattttttagtatattagtattatttttataaatttaagttatgttttgaataataattagtttattaaatactatttaatgtgtaatattttaatttttatgtaatttaatatttttatatatttaaatttttattataaactttatttttttattaagagatttcttgccccattgatgaaaaataagcgggaattgagattaaatcttttaacgaaaatgagaatgggagagcactccccgttaatttttcgttccgtgtccatccctactttcaccagtaccatatttcttggtaatattgaatccttctatagccaagttttgaaactttttctctcatttctatatatctaattttatatatatata

SEQ ID NO: 184356 - DNA, 7108 bp, Cannabis indica
taataccgacgccagtaggtacttaatagcgttcggttttttacaaccctatagcgtcgcccttatcagcgtcggtagtaaattttgccaaaaccgacactgaaagaccttaaaaaccgcctctataagtggtttttgtagtagtggtaataagttaagtttttaatgcctctgcacaagtattggatatgatatattttacgaaaattgctgaaaggaattttttgtgcttagcaccctactcagtgtcatactagtattggtgtaattaaatatcaagtctcatataacttaaaaaagtaactattaaagaatatcgctaacaaatcgtaaaatatcacagtagaagattggacactactaatgcggaataaacctcatgatgattacaaagtagttcttttttaaatgcctctccacggatatgttattttttaactaagttggaaagtaaatagagtcaatttttattacttaacacaattagcagtcattatttgatgcttgtaggacgtattatatattagatgttgggaacaacaactgttatataagcacattataacttcgtcaattaatactatttagctagtcgtcgttccaaatctaatataatatgttttattttccacgttttgaaaatttagcataatactatattatatctacgcgtcacatttggctataaatacagctaaatccatctctactataacataaactattcaatcctattcctaatagcgtttatcaaatatgtcaagtaataataataatacccaacaagttcatccagctcaaaacgacgacgtcgaaacagcaacgatggaatccaattctaaggaactacaccacaagaaaagtatgaaacgactatgctacgtggcacttctcgtattgctcttatcgatggtaattttgttgtttacaacaacaatctttcatgtccacactcccaagtttctaattcgatcaatgaccattgatgagctcagtactaagagtagcaaaaataatgccattgttatgaaatttgaagctgaaattggcataaagaataccaacttcggcaaattcgaattcgaaaaggcctcagttgggttcttctacaggggggctcatgttgctctagtcgagggtgatgggtttgttggggaaggcaaagtcaaagctcggtcaactaagaagattcagttcacaggtgaaataaggaccagaaataattcgattttggttgatgataatgatattatatcagggtttttgactttgactggtaaagccaaactgagtgggacagttcacttgttaaagttgatcaagagaaaaagatcttctgaaatgaattgcactgtcactattaatttgtatgaaaaagttgtccaagatataaattgcaaatagaaactataattaattaaattttgatggttcttgagtctccagtagtgtcctgtaatgtgttcttcattttacacaaatataagtctttttttattacataatttcagattaattcaaataattaggtagaaagtaccttaattattatgtctttaaaagcaatatatttattttgcaaaaaatcgatcaaagtatataatacgcaaaactttatttttaatttcaaatataacattagattttgtgctcaaccatgaaatgagttcaaaaaagtagaaatataatggttgaggtttaaaatattactcattaaattaatttttcagaatacggaatctgacatgtatttgaacaaaatataccattcaaacaagtaatacttttctttacaagtattatttggagattggaaatatatataaccatttatttttttaattagattactattaagtactttttttaattaatggcatcatgcatgtacttactttaatttttttttctttaaaaaaagtgacaattaaaatttaaatctatattttaactttgaaagaaatataacaccataaaattggatttataaaattaataacaccataaaatagtagcaattaaaggtatattattgttttatgttttaaccgtgtacatacaaaattacgtactatgttgcatgtacaataaattttaaatataccaataatttggttgtcccacgcacttaaattgaaacttgaaagtgtgtacactatttgtttatatatggaaatgagaatacgaacatatgaaagaaaaaaggacaaaacattagtaatatgcttctaaagtagtcaaaaagtacgtatgatacctaatttgtttattattattattattattattttttggaagaacgccatgttcgttagaaggaaaacgagataggaatcacaaggaaaattctctctccttgataggaaatggcaaacttgctatcttacattttttgctaagtcatctactacaacactaaatttacgattaataaagaaaaatgaacaatgccgaaacttcttaattaaatctaaagtcatcaaggaaacattcaaaagagactaattcagagcacaacttctcttctgaagagtttgcactatcacttgagagtcaaacaagatagagatccatttacttgttctgtaaagcccacttcagagcaaataaaacaacctttaatatctgcttccaaggatgaggcaacagaagaattagttaaacaataggtccacgagtcctcaggagaaattatcataacagaagcagctcccatgatcccctcgctccaggaggtatcaatgaacaatgccatttttgaccctaatctgctcacatctatgccagaagcatttttcaaaattctatctgcactagaaccaggcagatttatcatctcctcaaaagagttatgcacttttctcaacatcactgccatctcgatgttctccctagagatgtatgctctacatcctcacagaccaaatgtcagagaagatacaacccattgagataatggctttcattctacaatttttggggacagaggaaatcaggatttctgtaaattaagttagagaagttcctagtatggattcactcgaaatcggcgaagccctagcaaactacaaagcccttgccacactgtattctttgaacaaatgcatacaagtctcctcacttgaactacacaaacaacagtatttttccagagcaaaaggcaatctacacttggttggtatagctttgtttagaattatccataataaaacaaagattcttggatgaacatccacatgccagatccatttccacaagtctctttgagctccaaacctgaaagcttgatccaagcaataggcattcttagtaaggaaatacagagaagataatttttgtaatgttcagctcaatgagcatcaatttattaatttctttttatagtacaatacaggatcattctagaattatacacctcagcaatcagaataacagaaaagggaatattctttaaaaggtaataacaaaaacgtgattaaattagagtatgcaatgattgctcaatgatgagctgtcagtcgaatgaatgacgaggcaggaccacaacggttgaaccagaaaagcagaggaaatgtactgaaggctagccaatggttctttcatttttctcaacaccttttctcaaactaagtggggattcaaccacacctagtttgtcaattagaaaatgaaaacgagtcccagttagacttttggtgagacaatcggctgtttgatcatgtgatggaatgtatcgtatttccagttgtttgttgaagactttatcccgcacaaagtgaacatctaactctatgttttggtcctagcatgataaacaggatttgttgcaagtgcacttgcccccatgttgtcgcaccaggttattggagttgttggcagaggaaatttgagttcttgcaatagagactggatccaggtcaattcagccgagacttgtgccaaggctctgtattcgaactctgtacttgagcgagaaacgacagcttgtttcttcgaagaccatgaaaccagtgtgtccccaagataaacgcaatagcctgctgttgatcttctgtcgtctggacagctagcccagtcggcatcggagaagcctactaagccgagtctgtcacaaactttgatgtgcaagccatggaacattgttccttttaagtaccgtagaatcctcttagcagcagaccagtgggctgtggtaggagcttttaggaactgacttaacttattgacagagaagcttaggtcaggtctagtgtgtgttaggtactgcaaggctccgattacactcctataatcggttggattttcaagtggttctccatcagtaagtgaaagcacttttcccactgtcatgggagttgggcaaggctttaggtgcatcatattagtcttcaccagcaattcatgaacatattttgattggctaaagtagattccagtttcatctcgcactacttcaatgcccaagaagtagtgcaggtctccaagatctttaagagcaaaaacttgattaagtttgtctccaaattgttgaagtttagcagcattgtttcctgtaagtatgatatcatcaacgtagattagaacaattataatgtcagttggagttgagtaccagaacagtgaggaatcagcccgagaattcttgaatttccagttcacaagggtgcttttcagcttgtcgaaccaagcacgaggtgcttgtttgagaccgtaaagagacttgtttaagagacaaacatgatttggcttgctggagtctatgaaaccttcgggttgctgcatgaagaccttctcttctagctttccattaaggaaagcgttatttatattgagttgtttgatggcccaaccttttgagagagcaatggtgagtatgattcttatgatggaggctttcactacgggactaaaggtctcgctgtagtcaataccagctctttggttgaaacctttggcaaccaagcgtgccttgagcctttgaaccgaaccatcagagttgagttttatcttgtacacccatttattcccaacaacattcataccttctatgtatggaacaaggatccaagtatgatttttcactaaggcagtgttttcttcattcatggccttgttccaaccggggtgtgctaaggcttcttcaacactagttggcacatcaagatatggattctgcttgtactttgttgcacccaagtaagcttttggtttaaaaattcctgctttccctcttgttatcataggatgtgtgggtataacaggggttgtaagaggttgaacgacatcctcatgatcttctgcaggcatagtctcaagtgtaggagtcatagcaggttcttgagttacatcgtgatctgtctcgggtacatcagggatcagtggtgtagataagtttgttacctgatcattgtgatgtgaagaccttggtgtagtcggtggttcttctgagtcagcttcaggatgtgtggctgtgttttgttttggatgagtggaatgtgtttggtttattggcatgttcagaatcgtggaccaggagggaaccgagacatgaacatactattcattttgatgtgtgttaagaaaacctgccataaaagggaattcatcttcattgaagatgacattcctagagatgtaaagtctgcccgtgctactaagacacttgtatcctttatgtctatcactatatccaaggtttacacacttggttgagtgatattggaatttatgagtttggtaaggtcttagacatgggtaacaagtgcagccgaaagttttcatgaacttgtaatcgggtttctttccaaacaaaagttctaatggtgatttatctttaagaaccggggtatgaagtctattaatcaaatagactgatgtttggaaagcatcccacaaatatttttggggaattccagcttgggcaaggagagttagacccatttcaacaatgtgtctatgctttctctctgccctaccattttgggcagaggtatgaggacaagattgttggaaatcgatgcctctttcagcaacatggttactgaaggcttgatattcaccccctccatcagactttagtgattttattttcctgtcaagaaggttttcagctaagttttggaaatgagtaaaggctggaagggcatcggatttggctttgagtggatatatccaggtatatctactatagttgtctacaaaatgtatgtagaacctgaagttggtgtttgacattactggggcaggaccccaaatgtcagtgtgcacaagttctaagggaaactttgctttctcagtgtttgttttaaatggcagtgagtgtgactttccaagttggcaagcctcacaaaaatgttcaacatctttcttaacagatttttcattaatttgggacaagacaaagtttaacacacgactggacggatggcctaatctcctatgccatttatccttgattgaattaaaagacttatcagcagtatgatgtgttacattagactcggacaggctagacacaccagtaaacggtgcaaactaagaaataaagagactactattgctactgttatgactggaatttgttgcagtgtttggtgagtgaaaatggtagagaccatctttaagcttcccctgaagaaccaccttctttgtttccttgtccttcacataacaaaaatcatatgtaaactcaacattaacactgttatctcgggttagttttgaaatgctaattaaatttttggtaatatcaggtacatgtagcatctctttcaaagtaagaaaacttttatcagcagtatataaccttccagacccgatatgatcaatttttaacttggtaccatctcctactgtcaatgtttccttaccattatactttgttttctggttcaggttgttgacatcagcagtggtgtgattgctggcccctgtatcagcgtaccaagagtcgttttccatcatctctggtgtggccacaaatgcataggcatgttgttggttgctgcctttgttgggtcctgttgcaccagcaggaactgagcccatatagctctcatcaaaccggttatagcaatgggcaacataatgaccatacttgccacaaact

SEQ ID NO: 184357 - DNA, 1081 bp, Cannabis indica
aaagttaagttgtaccagctttaccttttattctttaataaactgttttttaactgcttaccaaacacctttttgtcacagcttttttaaaaagcaacttttaacttttctaaaatttgtgccaaacaggtcctaaaagaatgaataattattggaaaaaaaaattacaacaattacaaaatatataaattatgatttggtttgatcatttaattggtttgatttgattttaaatttttaaaaaatcataatgttaatttattttgaaaaaattaaaaatttataccaaactaattagtaaatatccctactctaaccaatcaaacatcttacaaaagaaaaacaaatcaaacatttatcaaaagaaaacttttcttcatttttctcaaaaggaaatactaattatataatgtaaataatgattgagaatttgagattcacctacacattttctttgacaccaagtgatcttcctatttacttttttttttcctttaaaaaaacgtcacattatataataagtaaaatgcaacaagcaaatgtcacataatttctttctctatattttatatatctacatattataaaatgatgagacaatccaattacacaaaatttaatatatatatatatatatatgtgtcgagatttgcaattacataatctaataaatctcacatgaaaattgttgaaataagtcattgtaataggatcgccacctaagcacacaaaccattttactcaaatacatttgcaagaatctactcaacaaaagagttgaatccaaaattctaacaaactcgactcaacaacttttaccataattatacaaaaaatattattcacatcgatccataaattaactttttttaaggactatcgctaattaaagtataagagtgtttaaaaccaatacctataataaaaatttccatcgattttatagagtcgtcaagtatatccgtcagtttgaaattgctataagattaaaatccttgacaatttataatcatcaactaaagtataggtaacaatttatagtcgacagttataactcttggcgtactctctctctctctct

SEQ ID NO: 184358 - DNA, 6744 bp, Cannabis indica
atatatatatatatatgttcatgtatgtctgtatctttattctgctttgtcttgatcagctgtttttcgattttttgttttcttattttttgtatggacatctatgattttaggctgctaatcatttgagaataaggattggatttgggttgtgttataaaccggtgcccattcacttttgcttaattaggattaattgaaaggaaaaactaatgtgatagaacaattgtggaatttaatttcaacgagtttgcgctgtgcaaattccttgtccgttttaaaattacattaactacaaattagaggttcattggtgtatgtcaatggtctagctgtgccgtgtatgatgggagatgtggccatttagcaggagcaaacatggttcttgatgagactctggaaataaatgtagttattggagcatagtgattgctggatatgatcaaacttcaccggtttgatggtggtatcaaaaatttgtgttcaaacacatcgttgaagatatttaggaatattgttgagagagcctctagtggtggtgttctttcagctttgtttaaatgttgtgaatttacaaagtacaaacctcttgtttggaaagaaatttgcccaaacttgttattgtaaaatacatctataaacctcttgtacggggagttttttacatagtaaggagtaaccggatgttccttcatggacatcactgatttgtctatatggttggagtggacttggggtatgtttggagctccttattctattgcttttataccgtttctcttagatcgtaggcttatgttgtgccagaatactttaggttttgatgattgaggagtatggttttatgacggatgtgttagggtctcaggcttgatgatgagcttttaaaaaatatgctgatgtagcctaagtgaagaggcagggagcttcgatgagctgatagattcattcaaaattttccacatcaacttattattgttacgttttgttatcaaaaatttaatacttacaaagcctgaaagatgtgatggcggttagatcattgatgaaaagcagtgggatcaagatactctctaactctggattaataggattcctagttttacttgtgggctgatcatgtggaggggagaatgaaggagttagggatgtccttgaattgtttttttccctttatgatgtgaaggattattgatgtagtagaattattctactatagtgaaaattattaggctagttgcttatttcttttaatgtgttttattttatgttatttccaattctattaggatgtcatatttcttggctatcaatacaagctaatgagtggaatgtcaaatatattgaatagtaaaatttgatatttagttcgcatttcaggtatctattttggtttaattacccagctaatgcctcatatatgtttaatttttggatttagacccaacaatttggcaaagtagccatttcaagggacgaaatcattagtaagacagggtggaaaatatcttttggtcacaaaggatactgatactccactatccaacggtgtaacaacacaataggctgacctatttaggtctaccatcctgaattttcgaagtgaaattgagctagtgagaaagtattaagtggggaagggatggtacacttgaggaccacctcgaaaatcttgatctgagaacattaaaataatggtcggcaacttatccttatttcaaaccaaaaaatatctcttgttattgaacaagagatcaataaattttccttgcaccaagcaatatataaaacaaaaagactaagaaattaaccttggcaataccctttaagaaaataccaaattttcttttggtatcgaaaagaagactaataatctctcttggctctgaagaaaagaacaataaatttctcatggtattgagcaaaatatcaagaaaatttctcttgtttggtaacaagagactttttgtttgtttctttttccaagagtagtttggtaccaagagaaaggtcttgatattttgcttgatgtcaagagaaatattttagtgtttgtttgttgccaacatagatttcttattctttttgttggtgccaaccgagagaaattttgtggccctttcgttggtgctgaaaatttgaaaaaagtaatttgattgagtatttattgaaaaatacaagtttattacgtgttagattgtcttggctatataatatactgtacccgccaagaaaaattttatggtcttttcttcggtgctgagattttcaagaagtaatttcatctagtgtttattgaaaaaaaaaacctagtttattattgtgccaaattttgctatataatatactgtgttaatattggcacaactcttagttttgtagtagaggatttgtatgtttgtattttcttcattcctattgtgctcaagtatagaatgccataccatgcaaagcttatatttaaagtaggtaaacttgaaatggttgtttgagatgattattgtttcaaactatgtcaaacagaacaataatagtaattgttctcattcaagaaataaatgtaacaagttatttatttttctttctgttgtctttgattatttttacaggtccagtggctgaagacatgtttcactggcaagcaacaattatgggtcctccagacagtccatatgccgggggtgtctttctagttaccatccatttccctccagattacccatttaagccacccaaggtactttctacttgttctgttgaaagaactgtcattctctgatgctctatgttaatgcaatctggatttggatttgaattgctaattcttatttttattaatgagatatttctgtctcaatagtattgaaatttgatgaaatgctgtggttcttctgtgtttgtactgatgatatatatgttctattaaatatgtaacaacagtgttgttctttttttaaaatgttacaattcaaatttaaatattcactacacatatctctcttatcttttataacttctattattattttttataaaaaatatttttgtattattatcatttaaaaaaatttaaaaaaatgtatgatattttaaaaacaatgaaactattataaaattaaaaatattagggtaattaaattaaaattataattaataataaattttgaatattgttatattttatttttataaataagatttaaattaaacattttttagtaattttttttattgaatgacatatacaaataagaaaaaattaattattcaactaaaattatacgtaacgtaacgtgtattacacttaatattaacttaatatatatatatatatatattttgagataatagtatatatatgtgtattcatattcatgatttttttggtttcttttttttaattctttgaacgcctcctgcattccatgttttcagtaatcactaatcacaccagccaatttttgtataaagaattcagatattgtagataggatccagaacaaagttgttactgctcacataactaatttactagagttttgttatgattttctctttttgctaaagaaatgtctgaggatcattgctattttatcactttacattgatctttaaagctttgtctctttctctcgaacttaatgatgtgctgctttgctttgcaggttgcattcagaacaaaggttttccatcctaatataaacagcaatggcagcatttgccttgacattttgaaggaacagtggagccctgctttaaccatttcaaaggtttgtcaaggcatttataatcatgaattaaaaatgacccttttaattttagactctagaggctgtttaacacaagcaattaggtgctattgttctctgtttttaaaatgaaatcatagatatgttgttcattcagccaaggcctctttccagtgttatgtatagtgaccacacacaaagacaaagctgataagaaaatacgctgtaaaccattgttagggatgccttcacataaatggttcatgtttccataagcaattacactctgttagttttctgatggtgtgaggtaatgttagtcacaaaaaagttacactggcaattacactgttatgtgtgatttcatttttagccacatgtgaatatatacaaaacacattttagtcactttcgtataaaattattatgttggaatcagttaaaggttcaagggtcatgtttgaatttattaatgaacaggtattgctttcaatctgttcgctgttgacggacccgaaccccgatgatccgttggtgccggagattgctcacatgtacaagacagacaggagcaagtacgagacaactgcaaggagctggacccagaaatatgccatggggtaaagttaaaaccaaacatacatggttgtaagtccatagaggaaaagctccattttctatgtttagtaaaaatttggtttgttagcttatatgtatgaatgaatgaaaatgttggtgaaatggactaaacaagtggtccactccactaagaaagaaagaacattacacatgttcaattctaaatgcgtgaatgagtagttgcctaaggatttgtcttttaccctaatatttatcttcccaatggaaatcatacccaaaaatatctcttaatttattcatctttctgggttttgggttttgtgttctttttttatttttatacctcttctgattagcacgtggtagtaggttgaatttcaaattaacggtttaacaatttcaagaaaaaaaaaaattgatttgaaccaattttaaatcttgtggagctaaatatatgcatgacagacgtaagaagtattttacaatatttatgagtgtgtatctttgaatgttataagaagtcgaaattgtaaacagaactaacctagattgatgatatgttatttgttgcaacgtgaattgagaggatcagtttaaaaatgattttagttggttcaaaaaaaaaaaaatagttgccccctaaattagtcagaccatctctaatggtgtttcacattttttatttaatagttaaaataaagaatcattttatttgcaacatgttttttatccatttattttcacaattggatcatgtgatagaacagagaacaacaaacagggaagaagaagaaaagaatcaaagataggatcttgattcatcaaaacctcatctatacataaactaagaaaggatataaaaatcgaaaaaactaacaaataattagtttgtagaaagttttatagcctaactgtcttaaccacttttactatttaacatcatttacattttccctcaaactaaatggtgtagacaccatttttagtttggactttaggtacaaaaatttgattaacaatatagtcaagatatcagctgcttgattgagcccaggaacatatcgaactaagacttattttgccataatttgatctcggacaaactgtaaatcgatttctatgtgtttagacctggaacggaacacatggtttgttgctaacgctgtagcactttggtcactttggttgtcaacccaaataacaagacatttgaactaaaggtacttgtagttcagttagtagagatcgaacccacattagttcaactgcatcatttgccaaagcacgaaacttgctttctgtgctcgaacgatcaacaaactattgtttcttagctaactagcttatcaaattgtctcctaggaacaccaagcatcctcatgttgaatgtctatatcatcaacacaactctcctagtctacatcagagtaagcagtaagagttgttgcagcagtaggtcttagataaatgcctctttgatagtgccttttagataccaaaacaatctcttacatgcttcccagtgtactgtccttggggcttgtaagaattgacttagtttattgactatgaatgccttatctagacgagtgagagaaaagtattgtaatgcccttattgtgcttctgtagagtgtaacatcatgaaatggttcaccctttttgagagacggttttgtattggcactagatggattagaacatgacttggcatcctctatatgaactttcaacagaaagtcagtaatgtacttagtttgaaataagtacattcatgtgctatccctatatatttccactctaagaaagtagtgaacttggcctaagtccttgagtgagaagcacttgttcaagtctgagatagtaggggtatattttttttttttttgttattttaactcattaagagtaacatctatttattgtgttacaggtgacctttgacaagatagtacagtatagtcataaacgagcattttgacctagagtggattcgaggatccaattttgggtaaaatgtatttgtggctattgaaatgacttctgtgcgcataatgttcttttatattgattttgactttggagggtaatttggtcatttgaccacactttatcgagacgataatgcttttgtgatgctcaatcatattggagtacataacaaagggtcaataaagatttgagattctctaagatttgaagaccaaagtgagagaccaagatatcttcgttgaagcaatttagatccatcgatgagtagacactgataaactaataggagacaaaacttacatctctcaccaagacaaaaacaaaccccattaatctgatagggtggtagagaaccaccattaggaaaaacaaaataaaaactacactaaacataacaataaaaa

SEQ ID NO: 184359 - DNA, 9975 bp, Cannabis indica
tcaaattattaattgatgaaaatacaccctgttgttttggaacatgaattatttccatacaacttcttaacattcatttatttagaacttgttttttttcaaacttcaacggagaagaagaagagtggtgtttttgtcagttgattttttcttttcttctaaatttattatttgttttaatttggtttgaaattcaaactgtatgttccattgattaattatatatatagtgaagtcgagtgtagtttgttcatttttagaaatgttattgtatttgtaaatgatcaaaatcatcatcggagctatgtatctacctcatttgtttgtgaatgagatctctctctcatttatttaagcttatcttcatgcatcgatcatagtatatccatgcatatttcgacaatatatgcgattgaactcaataaagattggtttttttatgattcttatgtattagagtacttttatgttggaatttttaagtgatttatttaaatgaaatttacttgagtttactttgtgtgttgtgtaagggtagggatgtctttattagcatccttttttgcttagattaaggttaattctcatgagagggattatgtttggccttttgggaggctaatgacggtgtcatattccttagtgggatgagaatcctcgaggtacaacgatgacctaattaaaggaggaagaagtataaaatccctatataactggcacgtggtctccgtgattgtctaagttacacatgcaatctttacttgagtttctttatgctattattggagagtacgtaccaagttgtattggaacactaatttaggatgttaccaaaggtacattatagagatgaagaatggggaaataggttaataggtgttgtccttgattttatcaataaaagtgactcgtggatcaaatagtattcattgaattacgtaaaatccaatgtttcatttttattgttattttcttttcttttttattttatcgtgctaaaacgtacaaatattttgagatttgtattagaatgatgacaaaatctattttatcgctaaataaatagatattgtgacaagaatcatgtctcagcctcatgagacatgcaagaccttacttttccctatggcaaggaaacctcatgccttgcgagggcaatgattgatcttggttgaagatctaacgaagggtgacgagcaaacaaagctcctctcctacaccaacacccaccaccacatgtagcttgactaattgttgcagttagactcacacatgataccaaatgaacatgttgaaggtcgtgtttgagttgacatggagttgccatgagtggaaattccactacatgaaggctcattaattgggcaacaacaacaaagtagatgtttttggaattagttgcaactcactacaaaacataaaaagattcttgaatcgtataaaatgcaaccaaaggggtaatttgtaattattttcaaagttcaaggagaattttttacaaaattataaaaagttaggggaaaaatttctgtacatgtcatagttcggtgaacaaagttctattactctttggtgagatttttacacgacaaaaaattatgttgtgcgataataaaatgattattatagtcgttttgtaaacataaatttatacaattgcaactattatagtcctatagtgtaaattcaataagcgtatcttacaaatttacattttgacgttgttagtttgataaattttatagtatgagttaagaaatttttcgaagaaatcatatacaagtattaaattagtaaaataaccgtgagtgattctacaatgcactcttaaaaagtacataaatgcacttattttataattttaatatttaaatagttataattttttttttatatatataatggtgtgtattgtagttatttaagatattatgtaaaattttaataaatttagaataatttacaatacaaaagcaaaattcaaattgtctattatacatgcgtgtaaaataaaagatacgcaagtacaacataatattgtttgaactttattttttatgcattaaattttttaataactgaaagatattttttttagtgaaagtattaaataattatattgtatattgtaatatttttttagaaagttatttgtggaaataatatttgacgattgggtctttactattagagtaggcaaacacttgaaatcatcattattcaacgccggcgggaagagaaagtaaactttatttttctccggtggtctgttctgtgaggcctagggctaaaatgacactgaattattctggcttcacagtaggcagataggatctgaaaccttaacctacattctctaattccgtattcctcactttcatttcagcttttaaattccaattctagtattaattattgtattgggggttgctgttgtttgaagctttcgctatcatctccatgggaaaacctctttgttacggtattgttttctagtcttgttccttttctgggtaccgtagcttcgtgtagtaaaatttatggattattatttataatgtgttacagcaattgagctttgtgcagtacagtttgaatttttgaatgctgttgttgtttgttttgtcatcagatgcggggaaaattgaagtttctcaaagctttatcaatagaatgtatggtgttttctctgaaggcacacacttcgcttcaccaatttcctccttgaggacaaatgaatttgacttggtaatgtctcattcttttctagttgatttatgattgtgtgttatggtttttcttatctagttcatttgttaattactttgaaaggtgcgagctttacttgaaatgttacaagggttttctagttccttattttattgggacaatgatgacaactgttttcgtgccaaaagtgggatatatgttgctcatctttctcagacaagtcttaaagccgttatcaatcaacttatgtatgccggaacttgcttgcaactggtgggaattgtggttgccaaagttgagaaacggacaggatcttctcctcctactttgagagcatttgcatgcgctgcttctgcttggcttcgtgtatgtatctgaaagctaatcatcgaataaaactatgttcattctaatttttttttctttctttaacttactttcttgcatcagagattacgggatattgctctaaaggaacaaacgaaaatgagcaatgctggaactggatttactcctaccttgttaggattgacaaattctttatccaggtttgtatttaatgattgttgatgtagctttaagaactcttatttgacagtcatgtctgacatatgttgccttcagtttgctaaaatttgtttcggttccatcaatggttcattaagtggatgatgcaactgctctcttgatttgtttttgttatgtagattgctgattactgtttatttatattagcctttgttcaggtgctgagtacctattgcaaatagtgcaaagtgctgttcctcaactatttttcgactcaaattcttctgttccatcagctgacatagcagttcatatccttgattatctttacaagaaactagatgaagtgtgtcttgctcaaggtggtgaggttgtgacgagtttcatggcaaggtattttgcttttggttgtgttctcttcattgtgcaatcaaagtttataatttttaataatttcaggaggaaggatatcagatgctactttacatgtttattggaagtttgttgccctatattgaaggtcttgattcatggctttttgaaggaacacttgatgatcctcatgaagaggtaattgtattaaaccttttctttttgtcttaaaatgtaaacaatttcgtttgttttgggcatttgaaggtagtattctctctccgattcttatgagaattgtaatgtagcacaaacaaaaattaagtatataaaggagtactctttctcttttgatagattgttattgtcctttatttagttgaatgctttctgccttgtattttatctgtacaatgtatagattcatttcatcatttgtgcagacagagtatagttggtggtgtttctgttttaataatgttttatttatatagactctctagactttgctgatcttattttcctctatgcagatgttcttctattctaatagaacgacatctgttgatgaggctgacttctgggaaaagagctacctaattaggcaaacacagtgtccagaattatattctgatataactgctctagtttcttcctatggacttggtaccatggaaaatgaaaagaaggaagttggccaaagagaaaccatctcgatttctagttctaaagggaaggaccggaccaatgtggaccttcaagcttgtcctttgtttatcaaggacatagctagggcaattgtttctgctgggaagtcactgcagctgattcggcatattccaataacatcctcagtaacagctggcagaggatatgagaatgacgttgatgctgattttggcagtttaaaggatggttttgtcacggtcaaagcattgccggtttaacactgtcagaagctttttgtgtgtcattatcgggtcttataggtcacggtgatcacatcttccgatacctttgtcaagatgactggcataagaacaatattattcgatcatttgaaaaaattggaggcaataaacatgaacttttgcctgggggttgctctgaaaaaaattggtataaatatttggttgatacactaatggagaaaaaactgattaatgttgacactaatggagatatcacaggtggagagaaaatgactgaaactgatgcaaataaattacatcttttgagagccttctgtccagaaaatccagttatcagtgtgtgccaagagatcctttctaggaataaagcagcctggaaagcattaaatttatccagaaatttctacttgcctcctctaaatgatgaggtcttacgaaaggctatattttgtgagagtgacacattttctgcagcggaaggaacagactatacttttggtttccagtttggtgaatctgagtatcttcgtacacaggatgactctaagatgttggaaatgttgtttccttttcctactgttcttccttcctcgaaggtaccttttccttttatcacaatttctgcaagttgcctccctccccaaatctggagcttctatagatttcctttggtggatttttgtaattgtttttattgtttcttggagcaggataattctcgtctgtcagagctcttacctttccagaaaaatagcacccttccatcaagggttcttagctgggtccagaatttcaagcctaaaaataatctacttcctgtggttattatgcaagagtgttttactgtgtgtatcaagaagcaggtaaaagtggtacactgagccaaactttgtgcctttttgggttaataatgatgtttatgtatttaaaattcacttatgctgtaggtggattgtattggccaacatatattgtcaaaattaatgaatgattggaggttaatggaggagctagctgttttgcgtgccatttttttgttaggatcaggtatctcttaaattgaaattctctttttctttgtctcctaatagacattgactcgttcctttatctctgtaggtgatctgttacagcactttttgactgtgattttcaataagctggataaaggagaaacatgggatgatgattttgagttgaactcaatattacaggtgcagggacatatttttaagaactatcgtgtgctgttatggatataattttgaagagaagaaaagcggcgtgatttatagaagtgcaagcatgtttcagataattgttttgacatggtttttgattattaatttattattcatattatattatttttacttttgaaatttcatcattgttataatagattgttattattatgttatactgccatttttgaaaggaaatagagtaaggactgctgatgttaaactaccgaccctaaggaaatacatgtcctactgtgtcatcttagagaattactgtctggaaattcatataatatcaactttttatatcaaaatgaaattttaggcacaggtcaataattttggatgagggtgttcactattgtattttactgtgttaattgagttatatcgtgtgatagtgcctgtaattgtttttcactatataactgatcttatatgttctctctgttttcccatttcgttcgctccttttactgacaatatctgtacttaatactgcaggaatccataagaaactctgctgatagtgtgctacttagcgctccagattcattaattgtgtccctgacaaaacatcagggtgtaaatggaaatgagcaatctagtacgggttcccgtccatcaactcctcatagaagtcatgcacacatctttggaatcgatggccttgatttactaaaattttcatacaaggtatactctattgattgttgtgatgtttcttgtgctgtatcctttcatgtttattaaatgtgtatatatttacatttcaacaggtgtcatggccacttgaactcattgctaatactgaggctataaagaagtataaccaggtattgtttccacttctagtcttggcacctatttttaggatttaattatattccaggcattaatgttttaaatacaatgtaggtgatggggttcttattgaaggtcaagagagcaaaatttctactcgataaagctcggaagtggatgtggaaggtttatttctagctccctgtagcatgattctatagtttattatgacactagtatattcaacgactgtaactattagaatatgaggaataatctcgattttttcttcactaaatatcagctgtctgatgtaatttggctgtttcattgtcttttttctctttacgtgcagtgtaaaggtgctccaacaaatcaatataagcatcactggttggtggagcaaaaacttctccattttgtggatgcttttcaccaatatgtgatggacagagtaagcttttgtgaaattaacttgaaacttggacttttagttgcaatctatggacttttatgagtcttgttcctcatttatgcttgtagttttgttcactcttaaggcatgttatcttgtgtattctggcttctttttaaacttttaaacctctattctataagtttcagcttacctcttactattttccccctcaactggttgtcaaaattctactgatgtgcctgtttgattgcattgtcccttttataagttttcaaatacaaagaacttggcattgggtttcatactcgagctaattgaaaagttaagttgtgtagtagtaattatattctgcatttcagaagcataacattgccatcagagtcatatatagttcctagtacattttgcattttgattatgtttgataagagcataaaatgttaaatttctaataggacgtagtaatcaggtatatcacagtgcatggcaagaactctgtgagggcatggcagctgctcgttctctggatgaagtgatagaagtacatgaatcctacttattgtcaattcagcgccagtgttttgtagtcccagataagctggtgggtagcttagatactctctttctctaactaactgatcttttattgagtgtgatttacagactttttatcgttttcttttgcactcagtgggctctcattgcgagtagaatcaacagcatccttggattagcattagatttctattccatacagcagacactgagtggcggagcagtttctgcgattaaggccaagtgtgagatggaaattgatcgtattgagaacagttcgatgattgcattgctttcctcctaagagtaaaccttctttcattttccttgttttgcctctacaagttttagttttttttcttaaaaaaatatgtgcttctcacgttcggtgttgatgcaggtcctttctttcaagctgaacgtgggtaactttcctcatttggcagatttggttactagaatcaactataatcacttctacatgtctgatagcgggaacttgatgactgccccaaactctgaaaatgcttcaagagggaggaaatcatttgttggcagaacagagtgattttgtttatttgttttttaatcgaaaaagtaagatatatagttagtttattgtgcataggtagtgcatcgttcacattagtctgaatatcagggaacttgagtcgaagcctaagcctgagcgaaacagtttgctcgactctagttctcggatggaagtttatgtatccttagccttgcaaaatttgtcaccagcatcagtcctggtatgcaatggaatgtggatgacttggggtgataatcacaatgattttgaggcttaaagaaaatagagtatggaatgcttctcctcggaaaacaatgggatgacatgcgggtacgagatctcgtaccagaaaatgattgatctactcaagtgtgtaattattttgtagtgttgtagcaaagtttgggcaaacttgtttctatggatgtcttacaaattgaggttatatcaacttactaacattgtattgtattgcatttgtacgtctttctgtcaaagaattggatataaataagtatgtactgtaattagagtgcccaaatagttgttaaaaacatatctaaaggatgtctacaagatatatgtccacaatagtcaaacaatccatcaagttttgtgtcaataaaaatgtaaaatcacagaaagtggtaacaaaccagaaagtaatatccataaccaactaacaactaacacaaaacaaattttttttaaaaaaacctagctaatgctaacactacaaatgcacatgagaacattagtgttttttttttatttgaaacaaaagatgatgcagttttttctttctccaactctcgtggtgtctcgatgaatttggttggaggatggtgtggggatgatgatttattcttcagctttggctttgatgatggcttcgagtttactctgcacaaccatgttactgtttcaaggaatgcctcattcagttcatcaaccatagcagccttcttatactccacgatccatctctttttgtgttgctgctaattttagttcgattcaatcgtatgagaatgagatggcagcttctgtctcagatcaacaacttttagctcagccttttcgagctcttggaatttttgttgatatcgggccctgtatcggacccatcgtgtcataataaaatttaaaattatgaggaccattgggttcactatcgggacctataagactattttcttcaacatttaaccccttcaacattaaactaccatcagacctatgtcgaacctacgggccagacgaaaattacggattcttcccaaaacacaaattcgagtctaaaaacttcaaaaatcacataatcttcattaaaaaccactaaaaacacagacctaaccctaaatctaattgctttaaccctaaatcataaaaaaataaaacgactacagttaaaaattcatgaaaaaaattaaggattatctttgacgaagacattatcggcgttggatggtgtgtgtggtcgcaatggtccgtgggtcgtttgggtggggtagtcacgaggtcgaggtggttcgtgagttgtgtgggtggttcaattgtgtgttcctccgtgtgcatgtttatagaaagctagagaaaaaagggggaaagacaacgttgctcaaatgaaatgggtagaatgaagttttacgaaaaaataacctattataagaatggtgaatccccatccttatagtaatcaattagcaacaaaatatataaatacacaacttgaatacaaacaaaatgaaaaatgaaaccaccttacccttttcagagtacgtattaaaatttattaattcttaataattttttttt

SEQ ID NO: 184360 - DNA, 3157 bp, Cannabis indica
  modified_base (3121)..(3121): a, c, t, g, unknown or other
ttttcggaaaagtgactttaacataggtgagtgtcatgatttaagctgggttttcgaggaaatacctcaagaaacactggcaaacgaagttctagatttgcatttcatgcatgcacatttaatgtttggcaaatgaacccatgtattgatctaaattttcaattatgttttaatggggcttaatgatgtgtcaaatgcaagagaataagaaatctcgatggcgtagctgacggtttagcattgtctttgtattcttcagcatgtgtcatattgtcatagttttaagttttgggtggcgggggcaacaaagagcttcatagcagcttatgtgctcttgctgttggtaattttcatttcataaaaatggactttccttcataaaagacctctaacacacgtttagagttagtgtttttgtaaattgagtacagatttatacttgcatgtgtttgatgcataaatgacattagattttttataacaaggcaaactataaatgtagaatttgaatgctacactagagcgtaattttttatttacctgatgtactgtatatttcgcaggatgacatacgtagggaagctcaaacaatgagcttgatagatcatccaaatgttgtaacagctttttgttcttttgttgtcgatcgaaacctttgggtggtcatgccattcatggcagagggttcttgtttgcaccttatgaagattgcatatccagatgggtttgaggaggcagctattggctctatacttaaagaaacacttaaggctttggattatcttcatcggcaaggacatatccaccgggatgtaaaggtcagtagagactgggagtttctcattttatcattttgaaagatctattgattgaccattttttgtttgaatttgatggctgcaggctggaaacatactccttgataccaatggaattgtgaagctggctgactttggtgtttcagcttgcatgtttgatgcaggtgacagacaacgttcaagaaatacgtttgttggaacaccctgctggtacgaaatgtcattcattggacattatgtattaattttggtgacactgaactctttctctttttctaatttccgtatgcttgagattgttactcatcttctccttgcaggatggcaccagaggtattgcaaccaggaaatggatataatttcaagtaagttgattcttcatttataagcttgaaagcaaagtagaattgctgtagcgttctctcaaagtatttatttcaagaaattacacgagttgcgtttaagtgcaatgtgttatcgtttagatgcaagggacattctttacctatattgtctgctcactgaggagctgactgactgatcatgatgtgtctgcataactatttgataatatgttcattaaatcaaactttgtgcctcaagcaattactttggatatttacattgaaaaaggatcatagagtctgatcactttattttatggtgcattttccttgtacagagctgatatttggtcacttggtattacggcactggagttggcgcatggtcatgcaccattttctaaatatcctccgatgaaggtacttacatcaactacacatgatgagcaagaatggatttgcaaatgtggcttggcatcatacaaacatataacatatctatttaacttttctctcataggttctgttgatgaccatacaaaatgcccctcctggacttgattatgatcgtgacaaaaagttctctaaggtattggaattctttctgaatagagaatccactggccgatttatatatatacaacctaacttctaagaatttgccaatgttttacttaagctgagtaacggtgtcaaatgtagttacttctttcttcccacatacttccaattgtagaatgtattctaattagaggatttccagttgtgaccagtcttttaaagaaatggtggcgatgtgtttagtgaaagatcaaacaaagagaccaacagcagagaaattattgaaacactcatttttcaaacatgcaaaacctccagagctttctgtgaagaaattgtttgctgacttgccaccactttggaatcgtgtcaaagctcttcaggtggtacccaaactatattcatatataaattgaaagaccttcttggttcgtgctcttatgcttaattatggatttttgtaatgcttgaagcttaaagatgctgcacaactagcgcttaaaaagatgccttcagcagaacaagaggcattatcacaggttcgtagcttctcttgattgatagcaatgtgactgaaatttttatttcacttttttggcattcttttgtgcaataaagttgtagtagagagcaaaataataccctatcctataagtattatcaatgggacatgatctagtagctaatgcaaagaaacaaacactatcaattgtataccttgtcacataagctttaatatttgggagttcttttgttttggctggattcaatatttttatgtagttctaaattatttaaaggcatacactgcccagaaagcacttcattagattctaaggtctagtgtatatggtgaagagtgattcatttattatagaggatataaaagcatatataacctagaataccgtaatcaggaaagtttataaaagaaaggttaccagctttcctcctatgaatcaagaagaagaaaatgataatcccgccgtacagaataaaatggaaaaaggaaattttctgctaatctatgaatttcacacgtattatttagcacatttaatcatattattcaagtccataaatgcatgctattatttgtgaatatgatttgcaatggcacgatgtcagactcttgtttctttccatatgactttgtggctgaaaagttaactcatagaaagttagcgacctaataatctatgtaagatcagacaacataagctaaatagcttttgcatctaattcataataaaattacaatgacaaggaacttgggagcatcaatccaagatcagaaatgtatacactgctaaccttttagttatgtcttttgaagttccatattattttctcatagctactctcattgtgttccctggtctgagtgagtatcagcgnggggttagcgcgatggaattttaatcttgatgatct

SEQ ID NO: 184361 - DNA, 1991 bp, Cannabis indica
ttttttttttatttttctttcaatatattgaatataaatttcattttttaaatctgtaccgcgcaaagcaagttttcgtttcccagctttgtctatatgcctaaaaacattcttaggtaagccgggatgtgacttagttatttcaaaaattgtactattctttgagaacggtcatgatatctcaaacattcgcaaatacccaacgcatcattcaagtgttgtctcttaatagcttcttaaagtccacgtttggcatattccttttggttttgatgtttccaaaactggcttctttggttccatttctaacttaagagcatgtccttataacaaaatgtttggcctttacagcaacattacaaccactcaataacgttcacaacacatcttatttagaaactagaagctagaatccatatcaaaatattgtcccctcaaagtttcctaatgagttctacatcttcaaatccttactatgttcaatgccagattaagcttgtacacacgtatatatattcatcgattatagtccaaagcaatatacacaaaactttttatgagaggatatatcctagttaacattactattttagctgtcataacatcatatgaataaggcatacagtaacacatggaacaaagcatttaaatatattggagaaaatcaatgttggggtttcatctcaaagatagactttcaaatttcttttcaaataatattttggagaaacaatataagaatctgctgtaaattttacaagcaacaagcttgatatgttatgtataaattaagcaacaaactaatctacatcttataaacttacaacagctgtttaaattgctgacaatcaactcttacagtttgctggatgaagtgttagtgtcttcgagcaggtacatccgagcgaaattcaaacataactgcctgtctctttcgtctccccagcctccccaacctttgaatccagctttatacccagattgattttctgtgaatcgcacttcccattccggtttgatgtttgcaaccttatccacattatccacatcaaaatgtactacgccattgtcaatgcaagcattcttctctccctggccctgatgcaaaccgcacttgccaaagtgcaccgcacttgttctaggccctcgcagagtgtaaacaggatcaccaaatgatggatagactttcgtccacatggttatatcccaattgtaatcatcaaaggagcaaaattcccttgctttcttatggactttcctccatacagtccgattgaaagaatagcccacgtttcccattctctctgcaatcaaacaatcccaaccttctcctcttgaattcacatcacagggtgctaaattcacagcatagcaatcagggcatttttcaggcttcaattcaatgagcctttgcaagttccggtatgcattgggatagatatagtgatcctcctctatgaaaagaatatgacccgactgccctcgagtttcatccaatccatcccacaccgtgttcatcatccaccaccaatgatgcttcaatgacacaatctttggtgatctataatttccatactgatcagaagtcccttgacattgtttctcagaagaatcacccttatctttgcaatcagttggtgagatcccaggaaagctatcgggaaagacatgcggagagtaaggagcaaatatctgttttacttggcaaaatctaatgctcttaacaatcttgttcatctcttcaaagtacccatcatgactgactattagtaaagtttcacttattcccacaacgtgtgataagctctcaacaactactttgagatattgaggcctattgtgtacatacaaaactattgttatatgattcttgggtaatcttggatatagatctctgtttctagggggtttctggtttagcttctccaactgaattgacaattcactttgctttgggagattgattttcttgttaatgtttgaatggttat

SEQ ID NO: 184362 - DNA, 5965 bp, Cannabis indica
aataaaaactaagaaaataaacattgtgcacttgtgtcacaacaaaaaagattgagtatttaattaattcatcatacaaatgtgaaatattgagtatttatgccattattttttttaaaaaaaaataatttaatgtaatttattgtctgattttgtttttagcataaagtattcaaaaaattttcaaaaatttgcaaaatattctaatttctagacaatgcagagaaagaaccaaattttaagaggtataattaaatatatatgcaacaaaaaatttaaagtaagagaattttattattaagcatgattttttgtgcatgttaaaatatttcaaaaattaatttttgttaattagtcttaccacatcaggataaacagtaatagtgcaagcctctattgtgttcaacaagcattcatctactccatgctgcaccataaaattttaaccaaacaaataaattaaaaatttgaatacaacccatcaattaaaggaaattaattcatttttattttgattttcagagaaaaataaatgtaactctcaactctcaacataattagtagttgcacttgcacatgaatgagaaacccatgagtatttacagcccaaatcataaagaatggtcaactacaccatttatgtcattggcccataacccaccaaaaaatcaaattgattttataaataccaattatccagaactcactaaaaatttaattaattttatatattccaatttcttttaggtgatcaaattttaattaatttataataataaaaataaatatgaagtctaatattgtgatagataaagatataattttagagttcaatagtagcaaaaattaaaatttgatcacctaaaagaaattcgtatttataaaattaattatattttggtgttatggataattggtatttaatttgattaagctaagagatattttcataaaaaatcttttaaattttttacatttttactttcataccttatttcataaaatcacaaaaaaaaaaaaacaactaaaaaaccagacaaaaagtaataaaaaataacattaaaataacaacaaaataacataaaaaaaaaatacaaatataacaagaatacaatataaaattacactaaaaaaacttaaataaaatctaaaaaaatcataaaaatattaaaaactctatacaaagttacaaaccgtatttttgtaatttctcttttattatttttgtgctttttgaaattatcccttaagctaaatcctaaatacagtgcaataaactttcttattttcttaattactttctttggggctcttcctcttaaaaaatgtcatatatttctaaatcgatgattttatttcatgagaaatcgagtaaaattctctctcttacaaaaaaagagtaaaataaaaagaataatagagaaaggaatgttaattaaaagagagaaaattccaaaagaacaaaccaaacttggcaataaagttacagagttctctgttctgattccaaattttcataaaaagtaacccaaaattaaataataaagagagagagagagaatgagacctggcaagagatagagccatcaggattgggagaagcattaccccaaggaacaagcctgagatcaacggtggagattaaaccgttctggaacagcttgaccaaatggttgacgatgaaattagcacagtacggacacaatgactcgtagtacaatgaaacttggaccttgttgttattagaacccatacacccatatgggtttatacacagaaatagtatcaagtaaccaaaacccaaaaagctccaacaagatacaacacccgccattaatgtcagtgatgagattgagatcgaatccaaactctcttatgtgttgtgttgtgagttttgctttgcttttttatctttgtatcttataatgaatgaggaatgaggatgcttttggaggtgaaattaccaaaatgttttcactattgagaatgcttgtggtcctataacgatttcgagacattaatattgagggtattttgggtatttttaatttaatttttttattataaatgaagcattattattgttattattttcagtttccatagatgctttactgtgaaatttgttcagtggagaatggagattagtggttgcaaatatgattttggttaaaaaatgacttgtaggttagaattgaaaaatattaagaaggtcaaaagttatttttttttcttttgaacaaattggaattattattattattattatttttaaatggaattggaattattaatttatagtgaatatattatttgttttgctatagagaaaataaatttagttgtaaaaagaaagttccttaaaaacaatatagcataacttattcactatctgatcattaattggtattaaaaaaaattatttagtgctgatattttatgacaaattatttaataaatatagtaagtgaaattattattattattattattattattattatatgaatattttttttattttttattttatctttttgaataatgttttagctatttatttttcttttaacatttttaaatgataaaacattatatttataaaataaaatatttcttcaattttactattaatttaggtttttttttatatatttttctatattttatataaattaaaatatattattattaactttgtaaaaattatttggggtaataaatgtgcaatagtttaacatttcgggtatctttgcaacaaaaaaatatatttaggtatttaaatattatgttttatcaattttgaatattttttcataagaacaatgaaaacataccttataaaactatgttttaagtgttaattaaacattgactatatttttactttcaaaaaaaacattgactatatttgccggaaacatcccctaaatttactgtatttttctaaatttataaaagaaaagtgataattatgaagttaaaatcacaaactacgtaaactgttggcccatatagcacacaatgggctttcttgcggcccatgtaggacataatgggctttcttacggcccaaacttcgtttcactcgttctcgtaactgttatccgtatagagaacccttctttcttcttcccttgcaccgagtccaactcagtcttcaattttcaaactcgttgagactcggaagcttaagaattatcttcaatggcgtccatcaacttcaaccctttcgaaagctggttcggaaaaccccctaagccacttcctcccctgaacctcctcagactaaccgattcattcttcctcaagacccaaacccctacaaaattcgcttcactcagctcctcaaacctcttcaatcaagccaacgagcctctaaacaagaattcagaagaacccaagtcagaaaatgcagagcccgaagaggaaaaaggtcatttcgggaaaatgctggaccagtacttctgggaatgtgagaacttgcctgattacaggtacacaccagaagtagagaagattctaaaggaagaccctttttgggaaaagaaggaaaatccaaccgaggaagagattagagagaacgagaagttgttggaagcaatcagggctaatccagttatgaagtttttagcccaagctgaggagattgcggataagtacaatgaaatggagctgaaagagaatgagaatccttacagaagggaagataggaagctatggaaatcggttcctcatgttcttgggcttgatggccggcctatgcctaggaaagccataaagaccagagaggaatctgatgataagttctgggattttgccaggcagttcttctttgggctttggggcttcagacagaggccttacccgcctgggcgccccattgatgttgctcaagctattgggtacaagagactcgagaagcgttactatgattgtaagtgttttgttatttttgatgaaattgaatattcaaactagtttgagacatgtgttatagctcttatttaagagattcaaaggagttatgatagtgctgttttacttagtttagtgaaaaagtttgtttctttatcatattctctaagaaaaaccttagcttttcggtatagatgggactgtatttgtaggacccgaaaagtccctgagtaaaatgaaagaaagaaactatgttaccatatgttaatgtggttattgttgtgtattgatggcagttatcatgaggagtggtggattttactataaggatcggttgggccgtactagggggccttgtgaattgataaccctcaagactgcgtggggtggtggcattattgataaggatactttcatttgggctgaagacatggatgaatgggcgccaattcacatggtttacggcatggagcgtgcgattgccacttgggaaggtttgttagcttttcttgcattattgcttgagccttgagccagttggttgactataaaaattgtgtcttggttttctgatgcaatgctgtcaaaacaaaatgtgaatcaaatcataggctgagttaagctggtaatgatagcgatttttgaatctctgattagctcagatattttgagatagcataacatattgcagggttgccattgaataagttgttatgctgcctcttgtcattttatcttttgaatattgttagaatcaaacttgtccttattcttgttttatagttagatttggagctgctgctactgctttccttcacaaattacaaaaaggtatccctccttgggttcctctaaagggtcgtgagcctaagacttataagcaggctcaagaagaagcttatgaaagcaaaagacgtgatttagcggtactgaaagctaatgatgggatttggcctggtgttagaattccaagtcatgttctatttctctgggctggcggttctgaactcacgacaattcttgaagccgatcacatgccaaacaaatacattccaaaagatgttaggtattggtttaacaaaaaagcaaataacaaaaatgctttgtaaacccaacttttgattttcgattataacacgagtcctgataagaactgcttgcttatgatactaattcactatttgcttatctgggacaggcgtcaattggctggaattatccctggtctaaggccatgggaggttctaagtgtagaacaagcaatggatcaaataacatatggcggggaatggtaccgtgaacctcttggttcatacaccacaggccctccatacattcaggagtggaacaaggaagtcatggtactatatacactggcttctgacttcaaaattcattttccttacatgacttttatgtttcagtgatgccgtgcgaaacctctaacgagttctctcgtcttattttgttcttgcagagactgatagatgtttatacattgcttagcacccatgtttacgaaaaactgaaacagacaattcccggtttcgacactgtactcgaaagtgtccttgctgatgcttcagtgagggaaaagaaaaggaaggagaagaggatgagagagaagaaagaacaggaagagaaagaattgattcgccgacttgctcgtggtcggtagcatgatcacaagaataatccaattttgagttagtagcaagcaagattctaccttcaattcattacaaatttacttgtgagtaactcttgtactgtttaaccatgcaaatagcaacttcagattttcatgcttttggattatataataataagtagatatcagtattcagtatcaatcaaaccaattatggggtcgtttcatttgataaatcatgttctttattttaggctctcttgttacacttctaaattataaccatggaaaaaagccaggcactatttcccataattaccttaattgtgaaacatattgttcttacattagcagcattatcacacacttgttcaaacttggactttgtttatgatc

SEQ ID NO: 184363 - DNA, 2545 bp, Cannabis indica
cctatatgttctgatgagaactcctcaaaaactttctcaagccactttacaatgccacctggccacagtttcaaaatcgaataattccataggaaattccactagcagtactttttcttcatgtaataatgattgtacctctaattctgtgagcagtagctcacctatcaattgtacagatcatgctattaataaaaattcaatagtttctaagaatcaaccacaagtattgctatcttctgctagctgtgatatcaatatgtggcaccaaaaactcggtcatcctggaccaaatatcctcaaacagattatgtctactatgtcattaccaacatcattaaaggaactaaaattttgtgatgcttgccaaaaaggaaaaagccataaattaccctttactctgtctaacagcagggctgcacaaccgcttgaactccttcacaccgatgtgtggggaccctcacacacaccctctatagatggctttagatattacatacatttcatagatgactatagtagattcacatggatttttcctctcacccttagatcccaagcatatgaagtcttcacccgttttaaaacacttgttgaaaaacaattttctttacctattaaatctgttcaatctgactggggaggagaatatagggtgtttgctaattttttgcaggaacaaggcattctttttcaacatccatgtccacattcacatgagcaaaatggtcgtgccgaaagaaagcatcgacacatcacagaaaccggtcttaccttattggcacaagcaaatcttgatatgtcatattggtggcatgcctttcaatgtggagtgtacacaattaatagattgcccacaaaaatccttgactacagcagcccatatcaatgtttattcaacaaaaggcctgactacaagtctctaaggacattcggctgcatctgctaccctcaccttcgaccatatcactctcataaaatgagcttcagatctgaaccatgcaggttcctaggctactctcccaaccacaaaggatatatatgtgaaaattccaatggccgaagatatattgcaagggatgtcacttttaatgagcaacaattcacctttcccaactcaccttctatacaccagcaacccactacaaatttaccctccactctatttcatacacaaccaactcaacctaccactcactttgaatcccatgctcctccaacagattttaccccacctgatattaccccaccatctgatgttatcccacctgacacacccagttcatctcaatcgaccaccccatccacttcaccaaatattccaacatcacatattgacctcccacccacacagccgtccccagcaccacataattctcaacctgctcttcgaacccacccaatgatcacacggtctcaaagaggcatctttaaaccaaaatcatacttggccacaaaacaccaactaccctctgccttgataccctctgaaccgacatccttaaaagctgctctctctgatccacaatggaacgcatccatgactgctgaataccttgcacttaaaagacaaaatacttggactttggttccttacacgcccaatatgcaagttctcaccaacaaatgggtacatcgaattaaattgactgccgatggctctgtggatagactcaaatcaagattggtagttaaaggttttcttcaaactcctggaatcgacttcgacgagaccttcagccctgtcgtcaaaccagcaacagttcgcacagttctcactcttgctgtctctcatggttgggaagtcactcaactagatgtgaataatgcctttctacatggcacactcaatgaacttgtctatatgcaacaaccggctgggttcattgattcttccaaacccacccatgtttgtcgacttaacaaggctctatacggccttaaacaagccccaagggcttggaatgataagctcaagtctactctgctccaatggggatttactcaatcaaaatcagacaattctctttttatttctggttcgggttccaacattatacttcttctggtgtatgtcgatgatttactcatcactagtcctaacaacaatatcaaacagcagcttattaatgaccttcatcatcatttttcactcaaggacttaggccccttacatcacttcttaggtgtggaagttgttcgcaactcagttgggatgtatctttcccaaactaagtatataacagatctactagtcaagctccatctcgatggtgtcaaaccaagctccaatcccacaagctccacttccaaattatcccttacaattggcgatcctttccctgatgttcatatgtacagaagcacgattggcgctctccaatatctgaccttaaccagacccgatgttgcatttattataaacaagttaagccagtttcttcatgcccccacgacaactcattgggaagccaccaaacgcctcctacggtatctcaaaggcactatccatgaacacagggccatagtaaaattgtccaggaac

SEQ ID NO: 184364 - DNA, 3968 bp, Cannabis indica
gatagtttaattattggtgatagacaaaatcacaaaaatcgcaaaacagtactacaccccaccattttttgcagtgcagtttctgtggttttttagtttcgcggtgcggatgtattttgaggcattagaaaaactgtatgtgcgaattcatttgaaaaaatagtcgaaaatcacaccacctgcactgcgaatacccctaactattaccacaattttttaaaattgaagactaatctgcatcaaatataaatttttaagacttatgtcgcaaattttccttaaaacattttttttaacgaaaaaaaaaaagaaaaggaaagaaagaagggcaggtcaggaaaagagagtacacgtatatatacactatattcagctcaatgcactattacattcagctcgactaagcaaaactaaaactacaccttaactaagtttgataaaacggatctttaatcttttaaacaaagagttttagtcttcgacttcttaaccatatcttcttactatgtttagcatttacttttgcttgtttttttattcacttttttttggggtgcttgtcaagaccaacaccaccctctgaaagtacatcgaccaagaataccaatatacgttaccacaaaaatagttcagacgtcaattaggcaaatggccaattattacaaatcacaatccatcttctgctacaagcctagaataaacaatataatgtattaagtggagtaatcaatatatatttcataacaattagagaaattacctttccttcttcgctcatatcaattcatgaccaaatgaaaagaattacaattaaaaaaaatatcaaggcaagaaaatccaattacagttgaaacttcatgcatatgagacaacagtaagagttattactctagcaatctttccccagctatgaatattcacaatccattagtacaaaagcgaaaggcaaagatggcaaatataaggctggtataatataaaatgttatttctgtaaaatactatggattgaatatattccagtgatgatctgcaggtaggctgtcctttatcttctcaagcctcttgagaatgtccaagaaagaaggcctgtggctcatgtctgccgcccaacattgttctgttaacctaaaacattcaacggaagcaaatcagtaacaaaaatctagaaatgaatgaagaatgcaccactctataatctgagttcggtagaaatctcgtgttcattttgatgtcataatgacattgttatgcttaaaaatgtaatgttgcagttgctttgaatacaaaaataagttgaagcttgacacattttctcagatcagttgataacgaaaaaagattaataagacttactccctcaggtcagggaggtatccctttgcccgaaatgaaggtctgtgtccttctgccacatatttggctgcttcataaggctcataatttgcaagtggcgggtccccttcaagcatctgcatcggttgaccataaatgagcttagtaagaacaagtggcaaatttgctcttctgattatatttttttaataggaacaaaccaaattacctcataaagtatcattgcaaaagagaacacgtcaacctttttgtcatatctccgatgcttaaaaacttcaggagccatatatcggtctattgtttgttgcatgcacaaggagcaaaaagaaaataaataaataactagaaaatgaaaatttagttactattatcttattttcgtcaacaaatgttatatgggacagcactcacaacttccagtctccccggtcattttgtacacatcgtgagaattctgaaccttgataagcttgcttagtccaaaatctccaacttttaaatggtctgcgctggaattgactaaaagaacatttctgaagtacaaaagaaaatttcagtaggtaaatatagaaagtactcttatggggcgtttggtgtgaggtttagattctcattctaatcaagtctcacttttttaattaaaatggtagtaatgttaatctcctcaaacacatgggtttcacattctctccaaatctactccctccaactcaaactcacatagcaaacaccctattaggtggcgtttggttggaagaaataaaaacatagctagaataagaataaaattccaacactttaaaataaaaccaaacaaagaaaaagaataaaatttgtttcttttccattctattccatttcattccttccaaccaaacgccactttaaggagtactataggttctctaccagaaaagcaagcctgcaactatacagaatctccagaacacctgtatcaggagcagctactaggtaacatattgcgagaaaaaataagcttaccttggttttaggtctcggtgaattatgacgtttggttcgttatgaagataagccatgcctctggcaacataaaaataatcagaagtgagatcgacaggatcttatttatttatgaaagttgcatttttcaatgaagtaacaggcaatgtttcccaaaaattttatagatcatacatgtttgatattctagagttgtttatttcagaaaactttctgccatcaacgatatttcatatggacatttacatggaagaaaagaaaatgttctgatatattataaggatatccacgtgaaaaacaaaagtcaatacatacaatgcttctaattattcagcaaagaaacactagtcaaaagacttaaaacagacttaaagaaaactgtgaatgctttctaaaattttagtcccaaaagcttactagtagtcagactccattttcaacagtgcaaaaaatccagttaacaaataaatactaacagaggcaaagaccaaaggcaacataaaaacgtaattgagaggcatgtaatttaattgccatcaaagaaattataggtatagcaaccatttctgaccatgacaataatgtgtttcgaaacattgtaaaattccaagtacctagcaatgtccaatgcaaagtttacagctgttgagggactaagcgaacctttttcttttaggtactgatgaagatcgccctacaacagcacataatggatgaaaataaggaacatggcttcagaattaccatcaaatttttcaacaaatgaaatatatctctaggaacataaatcaattatgcatcaacatacccctcgtaaatactctgtaattaacataagtggcttccgctcagtaacagctccaagaaattgaactatattagggtgacgaagcttcactagcaaattgacttcatgtcggaagtcctgactgcaggcaagttaacatgtcaggaatttataattacttcaaatttcaaacgagagattttttttttttgggtggggggttgggtttttcttttaaatttttgtaacataattcttattattgaaaaattcttttgtataagagaagtcatattttggaaggtcaaacttaaattatgcatatatcaatttataatagtacaacaatgacaaggttgatgtctcataatgcatcggatcaaagtatgactctaaaaattacattaaagaaaaactataaagatctcctaacaactgtgatgcaacagattatatcaaggttatataataattgatatgaaacttacatcaccaatctatcatctgagagagatggaagaatacgcttgacggctactggtgtcccacgccaataggctttcaaaatctcaccaaaagaaccctacaatcatcaacctttgataattaaaacaaatgttacaaataactaagaatacaacatttgcctgcctgctaacaaacaaacttcaagcagaatgcaggtaactccaatatatagtcaatttatgactttcagacatccatgcacagaggaccaaagggcaatatatacaacaagttaatgagtgaaaccagaagtaggctctttcactattatattgatcctgtaggtttctctttcc

SEQ ID NO: 184365 - DNA, 1960 bp, Cannabis indica
ttttggtttacgaccatttgtagaggcataaaatagggataacccttttgtacccaatttgaactcatggcggttgcatattagacccttgctattcctttgagggatacacgtgtccataggtgagtagttcgtgtggattacacaagtgaggtgcgtgctgtctcaaagcgtgaactggcgagtgatgatcttgacacattttccaaggtggcattattttaaagcaattctctttggttctgatgagaatttatgtggtgtgcttccgccttcccccaatcgttggatttgtgggtttgtgttttgttagcttgaagttaagctgttagatctaagacacatggatccctttcctccttataaatatttaaggatttctgactaactcattttttagccatttcaagttacctgagctttaagagaaagagagagagagagagagaaaattttcattgaacccaggatttcattgcaggttgatgtctgacgtttacgacgaacttcaacataaacttcttcttctccaatccagactttttcaaaatacacttcctttcattctagtagccgtaccagcttcttcagacttttagttggattttgacaaattcgagaggagtttgcaagatttttaggtgaagcattcgacacctatctagaatttggtatcgccaccttcaaacataacatgtaagtatttcttgccaactttcgtattgatttttctggaataaggttgttgggtagtgtactagataggatattgccatgtatttggagtttttctagcacttgtatagtagcaccgctacgtagggaagatttatcctttatgtttgcttgagaagaagatcctcggattaatgtgaacttgccatgcttatgtgaattgcgtatctagaaaacttttagggcttttttttttcttttcctgaaccacatttgaacgacttttaatctcatgaaggtggaaggtgtctttgggacctattcaccaccttttccctcggtctgacaccctcttagtcccaaactatagtatttatttctttattttattcttgtgttctcaattctattacccgagagaggagcgtaccttgatatagggtctagttgagacttctttaagcagttattaaggaggattctcccgtacccttaataatttgtttcgattagggtattaactacttggtgttcatttctttcaaattaccatcatgtcatacggtctgcctgtggatgaagatgaaagcatcattaaggacagggatgatcctcgatagaatgttaacatcctccccttggttagggacaaccctcgggagcaaggcactagatgggagatagaagacattgtcaacaagttccaaacctatcaaatgctgcagtagctggaagacaagtggagcttcctaaacacgtcgtgtctttttcggaatagactgtcatgcaagactgagaagggtagctgcaatatcgacggtttcagcgcatggagcgcctcccacatcgctggagcacaccttcctctccaggactacttcaccaactttctaacatttgttaggatagcccctttccagttaatcttatagagttacaagcttctcgcgggagggtatatcttttacaaggagttgggcatggatgagcctcgttccacaaaggttctttacttctatgaattaaatatgctcttttgcaagatggcccatattagggatggcttctactgcctcaaggtgtagagtaaaaggtacaatgttctcatagtacctagaaccaccctccggacatgagggaatattggttccttaccttcgtctttccactgcaaaaggaacccaactctggccctgaaattcctgagagttggtaagttttgtttgccatttttgtttttcttttgtctttaatttagtgcatccttcctaactcttgcaatgat

SEQ ID NO: 184366 - DNA, 8889 bp, Cannabis indica
ttttttcattctttaatgcttgcttttcgggttatttgatactaggttccctaattggtgattagtgattactttccttgtgagtggcaaatgacccattcactatgagtgggcttggttgggatcgatttcgatgggcactccagataagaaattgtctgagttagttgacatagtgaggtcctggatccctcggaagtctgagccggcgaatgtgtccagggatttttggatgcccgatcagagttgccgggtatgctacgagtgtgattcacagttcactgtatttaatcgtagacatcactgtcgactttgtggccgagttttctgcgccaagtgtacagcaaactctattcctgccctttccaatgagcccaggagtcccaggactggccgggaagatggtgagagaatcagggtctgtagttattgctacaaacaatgggagcaggggatatcagtgggtgataatgggactggtgcacccagccctggccttagtccatcaccatctgcagtgagcttggccagcaccaagtccagttgcaccggccaaagtagcggtagcactgctggttcaacaccttattcaactggtccttaccaacatgtaccatgtggttccagccttagccctcgtcaatcttcacaaatggattcagtgacggagcaggaaaagaatgaagcatctcagaggagcacaaatcttaacacagttatggaagattcattgcccaagcaatacagcttttgcagtaacaggtagatcttttcttctttatattattctgtgttgatgtgttgcgcccatgtttttgtaaattgcacctgtgtgatgttctgtaaattgtactcgtgaatggaataagattacattggagggaagagagtaatatagtatatcggttgagacttcttatttgatatattgtcctttttttttttctttttaaggattatagattaaatatctcgtttcatcttcaatataattggatgcctttacatgctagtcagcaattcatgtcttcttatcctctgggtttaggagtgatgaggaagatgaatacggcgcttatcattcagattcagaaacaagacatttctcttctgttgatggctactatactgctgttggtattgatgacattgaccaggtttatggttcacatgacttgcattcagacgaagaaaatgttgatgttacaactctggcctactcacctttccctgagcattataatgcagaaggtgttgcagaaacaagagtgggggaggaagctgatcaacacaaaaagagtgaagaacatgaatctccttcatatgacgaggagaagaaaaatgctgagcctgtagactttgagaacaatgggctgctttggctccctccagagcctgaggatgaagaagatgacagagaagctgtcttatttgatgatgatgatgaggaggaagagggtggtgttacaggagagtggggatacttgcgctcttcaaacagttttggtggtggcgagtatcgaagtagggagaagtcaggtgaggagcacagaaatgccatgaagaatgtggtagaggggcattttaaagctttggtagctcagcttttgcaggttgaaaacctgcctgtaggtgatgacgatgacaaagaaggctggttggagataattacatcattgtcatgggaagctgccacccttctcaagccagatatgagcaaaggtggaggaatggatcctggaggatatgtgaaggttaaatgcatagcttgcggatgtcgcagtgagaggtaattctgttaagaatcttatcatgcagttaattatgtttatctattttgctatatctacctacttctgtaatgctgattatgttacaattttctagtatggtggttaaaggagttgtttgtaagaaaaatgtggctcatcggcgaatgacaactaggatagagaaaccacgttttcttatactcggaggagctttggaatatcaacgtgtttctaacctcttgtccagttttgatactttgttgcagcaggtttcaattttataacttctcctttctactgtttttttgtaagatagatgttgaatattacggggaacaatagcacaggactcataatcccttattttaatgttcagtatgcttttccttcatgtcttgttttcatgagctttttttttcttttatttattttttaaaaagtaggaaatggaccacttgaagatggcagttgctaagattgatgctcatcatcctgatgttcttttggtagagaagtcagtatcacgttatgctcaagactatctccttgccaaaaatatatcacttgttctgaacatcaagaggccacttttagagcgtatagccagatgcacaggggcacaaatagtctcttccattgatcatctcacatcaccaaaactgggttattgtgatgtgttccacgtagacaaactacttgaagcccacgggagtgccggccaaggtgggaggaagctaacgaagactttaatgttctttgaaggatgccctaaaccactgggctgtacggtaagccctgcagtacatttgcataccaaatatagattgttaaatttgttaatttagtaatgctcggattgaccagacttgatgggtgaacttcagttctagttaatcttgtaatggttatctcaacaaagttgcctcttgatgagtgagtgtataattttctggtagaggaaattaagaaaataaatcattcagataaagaagattgttattggtagcagtcaatgggatatgctcttatggatcataaactctgtgtatcaatatcttgctggttgcaacctattaattatcttattaatatagaactcttaaagaaaaggaaagattttaaaggacttttatatgttgcattgtttcagattctacttaaaggtgccagtggcgatgagttaaagaaggtgaaacacgttgttcaatatggagtttttgcagcttatcacttggcacttgagacatcttttctggctgatgaaggtgcttcacttccggagttccctctgagatctccaattactgttgcattacctgataaaccatcaggtattgataggtccatttctacagtagccggttttagagctccaacaactagaaaatttttgggtcctgaagcagtaaatgagatagagaaattaaaagaaggcgtccttgtagatgggaatttatctaccaaccatgacccagttttgaaactagaagcagataattcctcttgctttgtagctcctccgtattccccatactctgtagtatctcctacatcattgcctcctttgggacatgatagttcgacttggtctcatgataaacttttttcaattgagatctctaaggatgctaatagtttgggtcctgaatttcaggccaaaacaaccatctacgagaaatctttaggggattctagtttggtttctaattatgttggtgattctgaatcatttgaagaagttaatggcaccaagcatgcagatgaaaacacatcaattgcaaatcaccaaggtactcttgaggaggcatccatacaccaatttggtattgatataaatgaggtaggatcttcgaaggaagactttcccccgtcaccttcagaccatcaaagcattttggtatccttatcaacacgttgtgtgtggaatggatctgtgtgtgaacgagcccatctttttcgaattaaatactatggtaactttgataaaccattggggcgttttttacgtgaccacttgtttgatcaggtaatcctttctctcttaatcattacatttttctacccattttaaatatgttttccccttcccaattgtatgagaaaagcttagactgagttactgttctttcttagagttaccagtgtcgctcatgtggtatgccatcagaagcacatgtttattgttatactcatagacaagggagccttacgatatctgttaagaaattcccggaattcctcctacctggggaaaaagaaggtaaaatctggatgtggcaccgatgcttgaggtgtcctcgaatcaatggatttcctccagctacccgcagagtattaatgtcagatgctgcatggggtttatcttttggaaaatttctggagctgagcttttcaaatcatgcagcagccagcagagttgctagctgtggccattcccttcacagagattgtctccgattttatgggtatacatatatatagtttttttgcttgagagtgttacatgttttatacacaaactcaggtgtattcatcttatgtgcattattttcttgatttgcatagttccttgctgcataagacttaaggaagagagaccactgggtcaccctctagaaaaatttgcctagtattggctcatttctttattcatcactaagcttcgtgggtgtttaaattgttgggtctgaggcctaaaatgatcatatatttagctagagcattcactttaactgtcttgtcacattgttgcttttacttgtacagttttgggacaatggtcgcttgctttcggtatgcatcaatcgatgttctttccgtttttcttccacccccaaaacttgagttttactatgctgatcaggagtggattcaaaaagaagcaaatgaggtatagtgattgcacgttacaaccctttattatttttgtacaaccaaccattgattaatccgttgactgcttttgttgtcatgacaatgtctgacaggtgcggaagcaggtagacctcctatttaatgaagtgcagaatgcttttcatcaggttttacagaagatctcagccatgggagtacaggatgccagcatgagagaatcaaaacagcaaattcctgaactgggtgaaatgctacgaaaggataaagaacaatttcaggtaaagggaaatatgagccaaattaattttgagggaactcattagatttgcaatgcacaatgagttgactctgaattaaatcaaacctcaaattatttgtttgttcaatggctatggatgacattgaagcattcagtcaacgatggaaatatattaattagccaattcttttccaaatatctgacattttagtgttccataccagcagaggacatacctattttgatacctagcctgtcagattatgtattttttattttttatacatggaatagaatttctcctgtttcatttgcctttctcatgtgtttttttcttttggctttgcctaaaaacatgttatgatatccgctgttgtgtcattctgtaggaattactagaaaaggcattgtacaatgaagtaaaagctggcaaacctgcaattgatatactagaaatcaataaattgcggagacagatactcctcaattctcatgcttgggatcaacgtttgacaaatgcagccaatttgagtaaaaatagtcttcagctaggttccattccaaaactcaaggagaattctttcagttcattggcgaaggttactgagacgaatgtaactgcaaagtcagtcaaagactttagtacctgtgattcctctcttttggtaaacaaagtatgatgtaaagcttaatgatcaagggagttctgtaccaatttgtgagcagggtgctggtgcccagaacagtaatgaaattgtattggcccaaagttatagaagtgaggaggaggcttgtctttcttcttgtgcagataccagtgatcactctgaattggaaactggaaagcaagttaggaggacccattcggctggtgaaaatccagttgtggcagatctatctgatactcttgatgctgcatggactggtgaatatccaactagtgtagcgccaaaagacgatacctcttcttctgcttctgattcaactttggtaaaaacagtgtcggaaaatccaaaactagaaaattccacatttgaccaaggtaaggttgaggcaattctttctgttagttctgctgtatctttgaaagggcttgaaaatgtagagcactccacaagcaagaatttatcatcgggttctcaaaagcatagcagtggtgaataccatcctgtccacatttcactggttcgagaattggaacagcaaagtggtgcaaggtttcttctgactgttggtgttggaggaattgttctccctgtttatgatgatgaacccactagtattgtagcgcacacacttatttcatcagagtatatttccaagatgtctgaatctgagaagcttaaagatgttggagataattcagtctctgtaccactttttgattcacttaacctgttatcacttaactcttttgatgagtcgattggtgagagctacagaagttttggttctagtgatgaaagcatcttatccacatctgggtcacgtagctctcaggttgtggacccagtgctttattcaaaggacttgcatattagaatctcttttacagatcatggctcccttgggacagtgaagtatacagttacttgttactatgcaaaacgctttgaggcgttaaggaggatatgttgcccttctgaaattgactttgtgcgttctcttagtcgctgtaagaagtggggtgcccaaggtggcaaaagcaatgttttctttgcaaagacattggatgatcgatttattataaagcaggttacaaagactgagctcgattcttttctcaagtttggaccagcatatttcaagtatttgtcggagtcaattaacactggaagtccaacttgtttggcaaagattcttggcatatatcaggtataaattttatcaagtttgtggtcatttttagaaactaattagagtacatggattgcatacaaatattattttttcacatacaagatatgcgacctgattcaagatccttttattgcctttaatccgtgcttcatctctatagtttttaaagtaaagctaggtttggttagactgagtagcaattattttttcccgttatccagcttaattttggttttttatcccccaagacgtttcttttggactcttttttttttaaaaaaaaataatgtttcattgggttggtataatctgttgtccgctctagtcctctagctggggcggtcggttggctgtccgacaggttcccttcaaaaaaaaagaaaaaaaaaaaagagaacaccttatttttaggacttatgctgcttttttcttattctgttgcactacttattattaatatgcaattttgtctttcttttattggccaacttgaaggtttcatcaaagcatgtcaaaggagggaaagaatctaagatggatgttttggtaatggaaaatcttttatttagacgcaatgttacaagactatatgaccttaaagggtcttcgaggtcgcgctataatgcagacacaagtgggagcaataaagtgctgttggatcagaatctaattgaagcaatgccaacttcgccaatttttgtggggaataaggctaagcgactgctagagagagcagtctggaatgacacttcattcctcgcagtaagttggatttgaatatctgtcatgatgtttctatggtgacattcttcctgtaatctttccatattgaaatcttgctgaataggttaaagcctacctggttctcatctctgtccctgttcttacttagtcagcagggaaaaaaaaaagtgaaataaaagttcagaaggaaagtaggagcaagatagcgatagcattcaaacaatagtatgctggactaagcatcttccgaaaacattataggaacttacacacataattcaaacaattctatgatctttttagtcagctgtaggatggatataaactggttactctttggatatgcacgcaccaacttacattgaggattttagctgttttttttttttaactttagatctctttctaaagattctgtggaaaaatacttgaagatatttgtgcttcccttctcttgattgctagtgataaactacttgtctttgcagtcaattgatgtaatggactactcgttattagttggcgtggatgaggaaaagcatgagctggttctggggatcattgattttatgaggcaatatacatgggacaagcaccttgaaacttgggtgaaaacctcaggattccttggtggacctaggaacacatctcctactgtgatttcacctcagcagtacaagaagcgattcaggaaagctatgacaacttattttctcatggtgccagatcagtggtcccccccaacaattattccaagtgaatctcagtctgatcttcgtgatgaaaatgcacaaggaccttagattgataaaaggagttcttttgcctgtacatggtgtaagttgtaacttattttccttctacttgaatgagttttctttatttttttaccttccttaattaaaaatcaatttccttatcagttttcatttttttaccatgtagttttcttgtgtcacatttgtaaatcaatatacctttttccccgtcatagaaaggcaggaactacaaagaaattataagtagacaacagtgctggatggcatctatcctgagtaaatgcaccatttaaattttggtttgaggaatagttttttcttccctgtcttgttactcctgtactttctcattagtaactttttaatgtgctatggctggtttcttgtgcatatgacgtttcattctcttcattctcctgtcactactcactcgtaaaaaaaaacaagtcagtgatcttagcaatcagtccattctgacaaacattaggatatagaagaaattttttgagtaatattagttatgtggcctaattgcctttgtggatcctagaaagtaatgagctgtatttgttactatgtgaatctgttggaaatttatttt

SEQ ID NO: 184367 - DNA, 2053 bp, Cannabis indica
aaaaaaattccttcaattttttgacttttttatttcagttttttttccattaacatattccattcgtaaagataccatttttttttttttgagaaaagagtaatttcaccatttttgtagtagtttagtatttggattatgctgaattaggtgaacccaacataatacccttttattttcaaataataatatgcaattttttgtcacttacgacaaagtttttgattcttaatttttattaaactaagtacttaggtactaggttaaactagacaaaattttaggattaattataattaattaatagactttcatttttgttataaaaaaaagacttcctttatcgaaaaaaaaataatagactttcttgagtatgtatgtatttatacatttaaattttgtggtagagcaactttaaaaataaaaatcatatggttgagatagtttatctaagatatcaaacattttaccatataatatataacaacagaaaatttataagtatgaaagacctttcaatgtgttaattattaaaaatcacaagtctttttttagagtatgtgagatatatttatataaatggcccaactaatatgatacgatcttgaaaataacatgtttttttctttcatacaaaaataaattaactaatcatgcgtcacatttgtctattataagttttagtgtcacaataacacgttagtactaatctaggattattaggtaaacgatatcatagttaattaaatactttaattaattttaagaatatagagtctttttctctaaaacactttatttttattttctttttaatttttgtaacgcgtggtttccaccgtatcgtcaaacgtagaaaggtattaagtgacggtgctgggaggttgacggcgttaactaacggcgaaaacgtggtgggcttaattgtttttgcgcccaatgaatccaaatttctgcctccggatcttgttaaagatttttcttttttaaatttatttcttttctttttatttttacttttttaatttcacaaaaataaaaattgtattttcagacgtgtttacagtgaactcatcttttttatggggcaatttgtcggagattcctcaaaagggacaagttctttaactgacaataatgcccttgctctaccccttccaccttttatttattattcagtttattttttctgttggtttattaactaaaaaaaattattttgttaatgatactaattatataacagaaattgtggagatttgcacgcatgtcggtatgatctagttttatatatttatttattgagatattaattttaaagctttttagttgactatgtactatgtagtgcttttgtaatctacaattagttttttttttaatggaaatttttatttttatataagaataataatacaaaacagcaataaattaccctaatatattttcttccttcaattcttctacattgaatattaaataaatgaatttaactgttatatttaccagcgtcaagtacaaaaaatactatttttattgctgaagtatatgaaaaatacttaataatatgcagttgatataaagtaccaatcaaaaatgtataagattgaatgaaatacaaaaccaaaggtgcttataacaatatataatatatgtactatttgaaagtcgggcataagaatcactatttctttttctttttttttttttttttttttttttttttttagagctaggagattttgattaaaaagttgtaatagacttcattttaaaaagagtaatttgcggtataaataattaaatttaactctcagttataaataaataccgaagtttaatttttcacgataataataccctgattggttcaagtcattaaagtttttatttgttaagagaatagtttaaatatatcaataaaaaaatgacacgtgaataataactaaacatttaatggtcatgtgtagttttaaaaatataacttaagtattattaacgctaaaaaatatacttaaatatttatttataattaaaaattaaacttatatca

SEQ ID NO: 184368 - DNA, 2346 bp, Cannabis indica
caaaaattaaaaaatacattatctaattataaaattaaacattcataaattgtactcaatatcacctaattaaacttaattaataaaaaactaaatttatatacattacatgtaacattgcctaatatatgtgtatatatatagataaaaaaatagattacataaaatataacatatatatataatatatataatatgaagaaggttagtaaattctacaactcactccttattgatcatgatgataaagtagacaatgattgcgtggtgtggagtagactccatactcaaacatagattcattcttaggtaaatgatgaactctcaatttgatttgatcgactctccataccaagaataaactccaaaagtttataactttttaatactctcttttattgttccgtgtgtaataattttgtaagagtcatgattatttgttctttatttgtcatttctccgttgagttacactacacaaaagtttgtggatggtgacactgttaaaaattgttacttttagtcccaacatacattttttgtgatatatttttttgtatatttagatataaatcttttattgttcaccatgtcattaatataattaaattaggatataaaagatcgatgtaggtgtgtaggcaggaggaaaatgttctttaaagataaatttattgttaatattgtgaacagcagataatgttctcttaagttttgccccatgtaatgatgttgtttgatttaatgagattttctcattttataaaaaaaaggacaacatgacaagaaaagagtgaaaacaatgctaataattgtggttacttttgtatattatcaacgaagtgatatgatgaattgaactaatgtgcaatgcatgaccaggtctttgaatatgaactaatgattaagagtgagcataaagtaataaataaatcaccaccaaccctataatattaatatctgcctattgaaaactgtataatatctccccaaactattaattaaaattatccacgaacatttttgcaagaagaaaattcggtgagaactatttaatgaatttttcattttaaaatattgatagtgtgtccacatatatacacatacttacacatacattgtatttgtatttgtatacatatttgttttttttttaaataacggagaacacgattaatgtcagactaataataattaataataagtttgtcggctttgtacctaatacatatatgtcatgatctaatcaatgtttattcaataagaaaaaaaaaacaaaaacaaatctgatcatatgtttattattgttcatttttaatatttttatatttagtttatatgtacgtatggagttcaaatgctctgattctttctgatatagaaacgtattgaagaattaatgcactatactattctgcttgagcttgaaatgtttcgaaggttagactcgaaaccaaagcttaaaataacttacgacactacccaaactccgaaaaaaataatagaataagaccggatgtaaattttttatatattaaagaataattttgtgatagatttacattaaattttaatattgtactttaatatataattattgatgtaaaacttagtattacactataaaattttttatttttagtcacaaattttgtgataaaaaaattgtaactagttataaatcatgattcctatgttgtgattaaaaaatttgggactaaaagtattagttacaaaaattacaatttgttgtaactaaatgaatttttagtcactatttattatgactaaaattaaattagtaacaatttgtaactaaatactatgttttagtcacaattaacataaattatgttgtaactaaaaaattgttactaaaaagtaacaattaatgtttttagtaaaaaataaaaattaataattttattatcaattttattattattttaatatataaaatataaaaaataatactaatacttcatattttaatattataattaaatatattaaaaaattaatataaatgacacaaatatatttgttttgctaaatttacataaaacttattatatactaattaaatttacattatttttcatatattttaattttttcttacttatttgtatttctaaaaaaaaagataaagacaagttaacaaaaattaaaaaaataatgaaaaaaaataaagggataactaaagacgaagtagacaaattaatagatataacattccacgtcttataaggaaaaagtcacccaaagattcgagccaatccaattctaaattaaccaagctctaactaatgtttcgattttactctcattaattattattattatt

SEQ ID NO: 184369 - DNA, 2695 bp, Cannabis indica
tatgtcagtgaatgaatggctggaaagagcacttgggtagatttctttctttctttttatttatttatttttttattttggttctggtttatttattaagttatttgtgtcttatgatcttgaccagtacctttcttaattttcagcttcccaatatcttggagcactatatattatatgtactacaacttatttacttgtttacttactcattatttattattattaatcaaaaacaagcaaaagcttgaccttgactttctattttgaggttattgtttaagtataatctttttctgcaactgcattttgagctttcttttttgttttaatttattatgttcatcttctctttcttcttttgttgtttatgtttttatgacattcctaactaccttaaagaaatttgtcttaactgagctggtaagctacttataattaaactactgtggttgttgggttctattattgtataatctaaacttgtcattttcttcctttgttgaaaatttcacaaccataaactcaataaggaaattttttctcaattggtttgctcacttaatctgtttacttgtgttgttgtaaagggactagattaataattactattaatgtctatgttgatgcaaaaaaatttaagtactaatttgtttccctttataggtgatataataaacaactaagaagctaaattgggtgagtcgttaagatcaggagaagctaaagtagaagaagaaattgaagaaaaagttaagagattttatggactggaactcgaaagcaccaccttcttgggaatttactgaactagaacaacaaactttctccaacttaggcacagttaatggagattataataagattatcagagaggatttttcagtagatttgaagctgggacaagtgggaaattgtagtaataatgacttagtggatgcaacatggaaggagtcaggggttccaagacatgttccttcttcttcttcttcttcaccttcaggatcttcgaaacggtctcggggttcttacaatggatctcaaacggtttcgtgtcttgttgatgggtgcaatgctgatcttagtacttgtagggattaccatagacgccataaggtttgtgagcttcactctaagactcctcaggtcacaattggtggtgagaaacaaagattctgccaacagtgcagcaggtatggattattgtgttttttgttcattaaacttaagagtttgagagatggaaactactcatttatggcattgtcatagttctagtgagagttttgaagtcatgtcttgttgttaaattgagttttgtggaaatctatgcttcatatttgtcaatataaaatcattttcactcagctgaagtttctcacagcttcatctgctttttttcttaggttccattcactcgaggaattcgatgaagggaagagaagctgcagaaaacgtcttgatggacacaacagaaggcgaaggaagcctcaaccagagcccttctcgcgctatggtagtttagtgtccacttattcaggttagtcactctgtttttcataatcattctagctagacaccttacttggttgagtaattccttaatgtttttatgccttgtgatcacatatcatgagttcatagccacaaatctgagctctattgttaatttcccaaggattaaaagcttataatctcatgttttcccacattaataccactttttctattgaactaaacatgaacattagaggagccccttttgatcatcccttttcggggaaagagaagaaggttgggaagtgagaatactttctactattatttgcaggtactcagatgttaccattttcatcctcactcgtttatccctctacagcggttgtgaaccccaactggggaggatgtgtagtcaaaaccgagccagagtccagtctcctttaccaccatcatcatcatcatcaacaacagctaccctttcttgataaacataacatgtttctaggatcaacctctcccaacaacaacaacaacaatacaaactacaaaggagatggtagtagtaacaagctattcccgattttgcaaggacatagtcctgaagtttcagcacgccatcatcatcatcatccccttcttctaaggacattgtcacaacaatgtaatgaggtgcctaggagcaaattgttctatgacaagccattaacatcaacaacaacaactactactacttctacaacagcacaacgaatccataactcggattgtgctctctctcttctgtcatcaccgtcaccaccgcaggtgcagacatctgagatgggtttgggacacaacataatgtcacaccttagctcctcaatctcaatggcagggcaacaccaacaacatcccaccctgcaaactcataataatggtttagagcctttcatgagctcagttttggtcactaatggaaatggtgccactactgatgttgttcactgttctgggatgtttagcatggggtcagatactcatgaaccccatcaaaatcttccttctcactgggattagtaagaagaaaaagataaggaaacaaaaaaattgttgaagatttctatgaccattatgagacatgaatttgtatcatctccttcataatttttatgcttgtgactttaacctattggtgcaatttttctttttttttttt

SEQ ID NO: 184370 - DNA, 2905 bp, Cannabis indica
  modified_base (49)..(49): a, c, t, g, unknown or other
aatttgcatggattctatattgtagcattgatattattcattttttaanaaaaaatagaagctaaaaagttattatagctaaaaattatgatatatattaaataataatgtgtgagatcataattatagtattttaaaagagtgctatatattggagtgtttttaaaagtaagggtgacaaaaataatgtggaagatagataaaataaaatattatactttttgatgatatgtaaattttgaccatccttaaaggaggatactattagagatgctctaagtaacttttgttgtgactaaaaattatatttatttataaaaaaaattatattgtgattaaaaagttacattgaaaatagtaatttttcgcagggcactctcccatgttttaagctaattaatcaacgttattactgaactaatgatggtgcggtttggagcaccaaagcaagcttcaacaggtgttgagtaagtttgttggagagagtctttagtaaaattactaacagatatggtatttgatgaaatcagctcaaatgatgctgatggattctatttccttttatagacaaagtgaatgaatacaaggcaattatagagtacaaattacagagcaacacgtggctaaagatattttacagcaaaggaattttaggaatacaatgctaacagaatttatcctgacagctggagcaaatcatttacgagattcttttccaacaaccttagaatgcagagtgactattatgcccctgcatattgtttcgtgacaccacccctcaagcgaaagggtgagggcattactttgagcttgtcgataagaaactggaaacgagagtgtgacaaggctttagtcaagcagtcggctgtttgatcatgagatggtacatagcgaatttcaagttgcttctctaagactttgtccctcacaaagtgaacatcgagttcaatgtgcttagtccgtgcgtggtaaacaggatttgccgcaagtgcacttgcacttaagttgtcgcaccagataattggagcagtgggaagtctgaatttcatctctttgagtagttcttgaatccaagttagctctgctgcaagatgtgcaagtgcccgatactccgactcggtacttgaacgagccactacggtttgtttctttgacgaccaagagatgagagaatctccaagaaacacacagtatccagctattgacctcctgtcatctgggcagcatgcccaatcggcatctgaaaaaccagtcaaggttaaccgatcacagggtgagatgtgtagaccatggcgtaatgtacccttcaagtatctcattaccctctttgtggcattccagtggacgttggtaggacactttagaaattggctgagcttatcacgacgaaggaaatatcggggcgtgtatggctgaggtattgaagtgcacccactgcacttctgtagatggcaggttcagccattggttctccatcatgcaatgacagttgcttatttgcaaccaccattggtgtaggacttggtttgaggttagccatgttgaatcgttgaagaagttcatccacatatttgccttgtgatagatacaaaccagtttcatctcttagaacttcaattcccaagaaataatgaaggggcccgagatccttaagtgagaaagtgttgttcagttgagatacaaattgatttagatggcttgagctacttcctgtgacaattatatcatccacataaataagcaccatgagaacataattcggatgcttcaacatgaatagagatgtgtcagctttggatctaacaaagttccatttcaacagagtgttctctaactgttcgtaccaagctcttggagcttgtttgagtccgtagatggactttaacaacttacagacatgatgaggttttgttggatcctcaaatccctggggttgcaccatatatacttcttcatccaagactccattcaagaaggcattgttgatgtcaagctgtctaatgtcccaacctttcgagaccgctatggtgagaatcactcgaacggtagaggctttaataactggactgaaagtctctccaaagtcaacaccaggacgttgatgaaaccctttagccactaaacgtaccttcaaccgttgaacggatccatctgcattaaacttaatcttgtacacccatttgttgccaaccacattatattcaggagaagggggaaccaatatccaggtaccattctttttgagagcataaaattcatctcccatagctaaattcctcccctcatgttgaagtgcatcatgcaccgagagtggttcatggtggtcaagggaaaatgaggcttggccaaggaaaactcggggtttgaagatacctgctttgccccgagtcatcatggggtgagttgaggtgatggttgtggaagtagcttgcggaggaggtgaagaaatggttgctgaagtatcatttagtggttgttctaatgagagaggtgaagtggctgatgagtgtagctgatgggaaggataatgagatgaggccgaggccctggagagaggtgtatgtggtgtttctgcagaggaaaggtcaggaataacagatataggtgaaccaaaatcagtaaggggggaaggagatacctgtgttgatgaagaggcagccgaggtgggtggttctgcagaagaaattactggtgcagcagtaggcaagttaatccacgagtgaggcatggacaaagcaacttgttgctcaggagaatgattattcaagaaacctgatttaaagggaaattccttttcattaaatactacatgtcgagaaatgtatatgcgaccatgaggactaagacatttgtaacccttatgggcctcactatatcccaagttcacacacttaatggagtgaaa

SEQ ID NO: 184371 - DNA, 6301 bp, Cannabis indica
aacaccccccagccttgacaaattcatccttaaattgaccctaaacaacatgaaaaatacttcttattcccagtataaataacaaactgattttgacaatcaaaagaaagacaagaaattataattatagaaaaatcacttggaagttcagagtttcaccttccctgtaattccgaagtcacaattcttcaatagagaagcaacagaagccaaagtattatttggaatagaagaccacaagtcatctccagagaaaccctgcaaatgtaagtataatatatgatgatgttctattcaagtaaactacatatgaagcttaagagaaggcgtgaaaacctggcgatctaatatatatttccagaatctcttcacaagaccaaattctggtggatatgagttggacactttctgcttctgcatagccagaaaagaaaagcaattgacatttcatacacaaagagttatgattacaaatgaagtcatcaccaaattatcttgcatgtgcactgaagtcaagcccaatattgagattaacatcttaccaaactacttaagcaaagttattgtcttatctgttgagaaacataccatgttaaaaatggcctaattactgcgttacaatgttaaggtggcataagtaagcctgaaaattaagtctacagcaggctgcatgggctgcaatgttatgcagtttaaagccaactcaatattttatccaccttcatgactataattttatccaccagatacagatcttggcaccctaattgcagttctataattttaaggtgaaatacacttaccagcttgtaataattctgtttataggaagtgttaaattggttctcatgttatctgggttttattcaacttaaaattagtgagatccttcatgtttgacataccagacagatattaacaaatgaatttgcatataattttataataaaatttcataaaataaacaataagatgtcaatataccaagaactgaagcttgtgtcgactaagcattgacttgacagcttctatgtgtaaatcaggtataaaatccacagtgacagttcctgcatccaatgcaataaagttaagagatgtcaagtacatgaccaaatctaacaagtagggaaacttgggaaatttttttacctttgtaacaagatgagaataaatcacgagcaccccaagcagataaccgaaggattacaggcccactaagtccccaatgagtcacaagcatggggccaacctacaatttcacaggtcttgggtatgtggtttgtggtaagtgacattcaaatcaataatgtacccaacgagcaaagcatacctgtgtaaattgttgtatattccttttaacactttctaatatcagttttgccttaacttttgaaaatgtaacctgtatatcatgaagaaaaaaaataacatttgaaaattgaatttattttatccaaaacttaacaattaacaatcaacatatcgtatcgtgcatagttaaataatatcatgagtttggacattaagggattggaaggatattaatgattataacaattctaagcaaaaagaattcatatccttaaaatgaaggttggaagaaataaaataaaattaatagagatgttatgctattggaattagaaaaggaaaaccatcagccccacacaagaatctacttgaaatggttataacaattctaagcaaaaagaaatcatatccttaaaatgaaagttggaagaaataaaattaaataaatagagatgttatgcgattggaattagaaaacgaaaaccatcaaccccgcacataaatctacttgaaaattattttacactttttaagtctaagtgcactatatacttggataccaccattttataattacgggtttcggccggttatggattccttatgaatttagggtccaaatacaacagtcacctatacacatgatatggttaaccactaacaagaaaaattagaaacattactcctgacaactctgctaactgtggatccacagtcttgaaagtaaacaaacttggcactgggtctataattgaatgaccaagttgtgatgcaagactaaaaccctgtaataagaaccagcatatttcattaacacaatgatttatttcatagaaatgggaattcaaaactgcatttgtccgtctttacctgactactatttccactagcaatcaatagataatctgcttcaacatattcaacaggactggttgtttgcttcccaattccaagaaggaattttccaccattagcagatgccgttctcacagtttttccagtctgcaaaacaactgacaatgaatatgcatcttaggctgtcagcaaaaaataaaaacagtaacaatgattttatagcataatgcaatttgagagattccacaccaccctcttccctactatgaggaaactgagtaataccatagctcaattcatagactacctcctgttcggtttgcttcagacatgagacaatcgattattgtagaagagctgttgctgacaggaaatacccttccatcctcctcaacctataagaacttttccatatatagctcacataaagaaaatcaaaataagaaacaagtgtcacaccagtttataggaaaaaccttcaagtcaactccatgatcagaaaaccaggacatggtatcatctggcccatgcatgtcaaagaaagatcctttgaactctttatgaccccttgggtaattttctgccaaaatctatgaacaatttatcattttaaacaaatcattcatataaaattggctcaaattacagtaaagaaaaaaaaaacaaaattgtagaacttgtccaactcacatgaaggcaaagtaacatgctcaattaatcaattctgcctccttacatttatttaatagagcacaagcaacagcatagacttgttctaaaagccacaataagcaaactatacagttctttttctcaattttcttaactaaaactgattcccttgtactaagtaataataatagcttaaaacacagctcacctttttttcaacacagtgcccattagtcacattgcatcggccacccccagaaattttaacctgccaatacaacaaatatcaattttcaggagtttaaaataaatccaaaaaagaaagagctaataagaacatgaaaattgtaaggaaaacaaaccttagaaagaggttgtcctttctcaataaccaccacattaagcttaggtgctacagtcttagctctaacagccccataaaagccagctgctccacccccaactacaaccaataactcttcacttccctgtccaccatagaaaaataatcaaaaacgacaaattattagaaggaaaaaaaataacacaacatattaaagcttatcatgatatgcacaggaacattgcaatttgattaagaacaaggtgttaccttttggactacggaaatggcagccgtacaaaatttcttcttcgcaggggttatacggaggcagccaatgtctcgagtggagcatccaaaggctgaggagagacggaaatggcggatgaagcgagtcgaagtgtagctcatgtgtgcccagtaaaaactcaagggtgtttggctagtaggatttttgttttctgaattctaggataaatcttcaatttttcgtgtggttaaaatttttaatgtattattgaaattatagttctatttttattaatagaaatttaacaaagtttaaaaaacataatttataacaaattaaaaatacaagacactcttatttaatatattgataagttgagagtacattttggtagaaagacaatcgtgtaaaattaaaaaaataagtccttaaatttaatattttaaagaataattaatatttttatattatcaaattttacccttattatatatagtatattatttgatgataatctcaaaatataacttttataataacttaattattttactatattttatttaattttatgtaattaataaataatacaaattaaatatcttttacctattttatattaatgaataataaattaaaagacggaagttgaatgagaatgaaaattctttaatatatatcaaagtttaaaaatgtaatttaatacatgttaaaatttagaaacccaatttaataaaaaaaactataatcacgttaataaaattatataaaattaaataaaatctttaaattaaataattaagttttaaccatctaaaaaattcaagtggtaaatgtaagagaaaaaagcgtaattaattaacttttttttctttcaaaatatgatatggttagatttttttttttttttgtagagaatgatatggttagatttgatgaacagtcaattagaccaccacagcggcagcatggtcatccatgacgcagctgcagctccaagcatggaagcgttgcatctctctggctcaacgctgcgccaatatgagccaactaaagaccattcactccatctttatcacccacggtctccacctcgacaactacgccattagcaaactcgttaccttttctgcactctccgactccggcgacctctcatatgcgtctcgtctctttaatcatatcgagaaacccaattcgtatatttacaacacccttatcagagcctattcgcgcagttctaagcctcatttggctctgtgttacttcaagctcatgttaagaacatgcgacgaattagttatttgtgatcactgtacttttcattttgtccttcttgcctgcgttaatggcgtttggttaattgaaggaaagcaaattcataactgggttgtgaaaaatgggctgagtttgttggatggtcatgtgcagaccgcgcttattaggttgtatgcagagtgtaaggttatgggtgatgctagaaaggtgttcgatgaaattcctcaaagagatcaatttcagtggaatgttcttatgaatgggtatattcgatgcggtttcgcttctgaggctttaaaagctttccaagatatgttggcgattgggtttgagcctgatgagttttgtgtggttactgcactcatggcttgtaatcatttgggtgctctttggcaggggactcgggtacatgagtacactaaggaaagaaaaggatttgaatcggatatcttcgttgggacggcacttgttgatatgtatgccaagtgtggttgtctagacatggctgtggaagtctttgaaaacatgccaaaaaggaatgtgttctcttgggcagccataataggaggacttgcattacacgggcatgctaggaaagcaattcattgcttggaaaggatgcaaatggaggatggaatcaagcctgatggggttgtccttcttggagtgcttgtggcttgtactcatgcagggcttcaaaatgaaggccagcttttgttacacaacatgagaagtcagtatgggatttcgcctaaacatgagcactatagttgtgtggtggacttgctatgcagggcaggaaaaataagggaagcacatgagctcataagaaatatgcccatgaagccacttgcttctgtttggggtgctttactatgtggttgccgaattcataacaatgttgatcttgctgagcttgctgtcaaaaagcttctacagcttgaaaatggggataagacaggggaagatggagtctatgttcaattgtcaaacatttatttggctgcacaaagaagtgaagatgcagttaggatacgaaagatgattggcgatcggggaataaggaagacaccaggttggagtatgatagaagttgaaggaaagatgaatgagtttatttcaggagatgttatgcattcatgtcgattcgagatatgtatgatgctggatttactatcttctcatatggttaaggaccctttgtagagtacaatgatggccaaagatgagtttacttgctctttttttcaaatacaaaaatacatattgtacacaccagaaattgtgtgaaaaataagtaaattttattcacattgaaggtctgagaaattgaagtataacatttccatcaattcccataacaacactcagaattttttatagctgttgaaaatcccattaatggaaaatactcatcctacaaatttctttctggttattggaaattagagtagtatattaagaagttgagtactatacagaactacagaacagagtacataaaggtatttgatgttgttgatcacgcctcaactcggattgaatccgccggatcacttttctacttcaaaactgcataaaaagaaaataag

SEQ ID NO: 184372 - DNA, 2989 bp, Cannabis indica
ttaatgcatgagtattgaaattcatatatgaaatttacatatatttttttcttcacattttttaaaataaataaataaagaagaatggctgttatgtctcatttggtgttcaatcaacaatgattagagtactccttaaaaagaaaaaagaaaaaacagacaatgattagagggtaaacatgatgtttaagcatctagagtagaccctcattttttaataagtataataataattatactaaaattaaaaaaaaaaaaaaaaaacaaataaaagttttaggctggctcaaatcgcaacacttcaagaagccatgtgaggtgaaaatattgggaaagaaggaaaaaaatacagtgataaattaaaattagagcacatccaatcaagagaatcgcttcacggggtcttcataatcttccttgcttccttttatatatcctttacgtggcaaactgtctaagaactttcacacccacagtctcaccttaaatattaaatctttttccatcttatttgtaactcctttgtcctaaacttgccaacaatccaaatcatgtctgtcccttatttttcttctactttttctttcattgccttgtctattatcatggttgttatactaagtagtacttcatttgctttagccaaaccctccaaacaaagtcgtcctcgtcctcatcgccatctctcggttgattactatgccaagtcatgccctcaactcgaacagctggtctcttctgtcacagcccaacagttcaaagaatcaccaatttcaggtccagcaaccattagactcttcttccatgactgttttgtcgaggtaattaaatgattctaattgaaaccatgcacttgcaatattatattacgtacaaaacttttacttcctcaagcacatcatgaattaatgaacaaactctttactgatatgttttatttttcatcttttgcatgggttggaataattaagggctgtgatgcatctatactaataacatcgaggccaggaagcaaaatattggcagagaaggatgcagtggataacaaggacctaagggaagaaggatttgagagtattaggctggccaaggctttggtggagaccaagtgccctggtgtagtttcttgtgccgatattcttgcaattgcagccagagattatgttcactcggtaaaactctgtatttggattattttttatttttttatgtgattgaagctttaaccagatcagataagaactaatggaatagtgtatcgacttctatttggcctttggtttatattatttttatttttgttctggtgtgggaatgacttaaacaaggtccccccacccacccacccacaacatgtgtcatgaaagtattggttaaagggaaaatgccatttttttaggcgtggtctgagttgatgatgatgtgagcactaaagagtgaagacccacatgctcctcttggaatgaagttcaagtctttagggggcaaatttctgttattggaaaaaactgcttatgagtacatattttgcaaaatttggggtaagagtaattacaaaagttgaattgcagctctgcttttcagagcaagttgctattacagagagggaaccctataatgtttaataaaataaatgttattatttgacaaatttgtttatacgtacaaactatatgtaatgatatataaaaaggatgcttccttaaaaataagattgggagacgagctgtctaaaataatttcaaagaggacaaaacgctacaatttgtccttcagtggttgtaaccactgcctctattattcaatcttggttttgtctaaaattatggaatatcaggcatagtaatgagtagagtgacaatactagttggattttgtcatcttttattcttatgctataattgtagttttaacaacttcgatttaattcaggcaggaggtccatattaccaagtgacaaaaggaaggtgggatggaaaaatgtcaatggcatcaagagttagctctaacattccccaagcaaaccacacagttgatcagatgctaaaactctttaactcaaaagggcttgcacttgaagaccttgttgttctttcaggtgcacatacaatgggcttcgcccattgccagcaatttgttagcagactctatgactaccggggctccaagcaacccgacccagcaatcgaccctaaactcctcaaggccctgagaatgtattgcccacactttggtggaaactcagatatagttgcaccatttgatgttactacaccattttcatttgatcatgcctattatgggaacttggagagtaatttgggtttgttagcctctgatcaagccctatttttggacccacgtactagacctttggttaaggattttgccacagataaacagaaattttttcaggctttcggtttagcaatggaaaaaatgggctcaattggtgtaaaaagaggaagaaaacatggagagaaaaggaaagattgtagtctgcatagctaattaaactcaatttattatctttgtcctctctgtttccctcattattgatttgtagccatctgttttcaagttggtttttgttcttaaatgaggcctctttttttttcttttttttttcttcacgtctagtgaaaagcatgagtttcaataacattttccaatcagtttaacaacttgatttgttttagatttgtgacattctgcatatttcttgtattagattacaaagttttgctttcttttattcggaagcaattgtaaagagtatggcaactctatttcagtccatctatcaaaattgaaagaaactttttttatttttgtaatttttaaaaacgcagacccatttttttttttaaataagtttagatatgggattttaaatatggcttcttttaatgttttacattttttttttggattttttgtcacttttttttttcgaaattgatattggtaagtactgtaaattcgtttg

SEQ ID NO: 184373 - DNA, 2856 bp, Cannabis indica
ttttttttaattttttaaaacaaagagattctagatatataacgccatccaatcctaatatcctatccttgtcctatgttttttcttgtttggttggtcttcctatattgctctcattacttttaaagaccccattttgtaccttccttgtatccacactccctccctctttcccattctgaaaatttttctcaattgtgcagattcacagaatgagaatgcaatagattcttatttaaaaattcaacctttacaagcttttaaatctgttagcacagagtgtctttgctttgttcattttcacaaaatcaaaaagcttcaatctttgccaagactaagaagatgagcactgtaaatctcacatgggttcaaacctgttccatgttcaaccaaggaggtagatccagatccttatcaactttcaatctcaatctctaccaccctttgaaaaaaacacccttttcaatccaaaccccaaaacaaaacgacccacttcaccattttcatcaatctcagctgttctaaccgagcaagaagccgttaaagaaggcgatgaagaaaaatccatcttcaatttcaagtcttacatggtccaaaaagccaactcagtcaaccaagctttagactcagccgttttgctcagagatcccattatgatacacgagtccatgcgttactcactcctcgccggaggaaaacgagtcagacccatgctctgtctctcagcctgtgaactcgtaggcggaaaagaatccgtagccatgccggctgcctgcgccgtcgaaatgatccacaccatgtctctaatccacgacgacctcccttgtatggacaacgatgacctccgccgtggaaagcccacaaaccacaaagtcttcggagaagacgtggccgttttagccggcgatgcacttttagcctttgcttttgagcacatggcggtctctaccgttggtgttccggcagccaagattgtcagggcgattggtgagcttgctaagtcaattgggtcagaaggattagtggctggtcaagtggttgatattgattcagagggtttggctaatgttgggcttgaacaacttgagttcattcatctccataagactggggctcttctagaagcttctgttgttttgggggctattcttggtggtggtacagatgaagaagttgaaaaacttaggagctttgctaggtgtattggcttgctttttcaggttgttgatgacattcttgatgtgactaaatcttctcaagaattgggtaaaactgctgggaaagatttggtggctgataaggttacttatccaaggctaatgggtattgacaaatcaagagaatttgctgagcaattgaacacagaagccaaacagcatctttctggttttgatcccataaaggctgctcctttaattgctttggctaattatattgcttataggcaaaattgatatcatttaatattttattagtacaataataattagtgctgctgctctactttggtatgtatatgttcaaattgttttggtggagttagttcactatactacagcttaagtcaaatcttgcaaaaaaaattcttatactttatgatgagttgatcttgttttgagcattctcaatgaaataaaaatattttctctgtctgttttaacccttttgagtattgttgtatttttcataattgtttgttttcctccaacacatttggtttctttggtcctttcttctgcaagtgtttattaggtacaaaaaatgctcttgttttttttttttttttcccaacaaacatgtttggttttgtttggtcctctttgtaaattcttggtacaaattgttaggtactcttgtttggtctaatattgtacttctagactctgttaattcttttatatttaatgcacttgtaaccttgagtaggattagtgcattttttatcctatgaaatggggtttgttgtgaaagaaagtcattgggcgaaagagttactagagctagaacctatggtaatcagtaactagtaactcgtactactaattatgattatttttattattatttctcttattgaatttgtttctcaattattaagtatacaagaaatcaaataagctgcggagctgttattgttttggtactttcttcactttgttttactatttgaaattagatttgatgaaaacaagaatcataaaatcccaagatttgcataaattaatactcattaaaattgtgggcattcttcaagttggtatgaaactttactggtttgaatgttaaaacacaccccaacatgattcaaatagttctaactagacacttgcacactatacagacacatttatgttttaataaatttacttatctaatttatggaagaaggaaaacagggttgtaggtaggtgttagttaatataaaaatgatgaataaaaaaactataataaatgtagacctatttggttcttaactttttaatcacaaatacaaaattggaaaagaagcaaaatcgccgttgccggggatcgaacccgggtcacccgcgtgacaggcgggaatacttaccactatactacaacgacatgtttgtttgtgatttagaaacaactttatttaactatttgttattaacttttctgagtgacatttttcatttagttatttatttatttattatattaactttttaaaggaaaaaatctgtacccactttgtatttacatgattacaaacgacaatgaaaccttttattcaatcaaaaaaaaaaaaaattcaataagcgaaatttccatttatcatgctgaccaaagcattttgggggccttatttaaaattttaaaattagacttttt

SEQ ID NO: 184374 - DNA, 1579 bp, Cannabis indica
ttgatttaatactaaatttaagtagtaatcaattcttttatcattctctattcaattttatctgccatgaataataattgatatgtaaattaaatataatttatattaataaaaaaaataaaaattattttttatttttataataattcatattttaaattaattttcatctatttattaattattattcatcaggattgaatcatattaattatttagatgccgaattggtaatgtaaaaaaatttatgttaaaaaatgttaattattctcagaaaaataatctcaattctcaacccaaaattaatcctttaaacaaacaaacaaaaaaatttcatacatacctgtaaaccccattatttacatttgggtaaataatcccattccatttctcaatctgatccttcaaatatggcggattaagatccaaatccgggtttcgggccaacccattcaactccgaattgaacaattggatgatatcgtagctctcattacaaacaacttctttcgtctccttatcccatagcattggaaccgtgcaccgtccattatacccttctcttctaagtccgtacacttcttttagcgttctacacccattggccttatccctagtcgggataacgatatcctcattcctaccttggatatccttgaattcccacgaaccatctgttcctggagctgcaaccgatacgggtatggcttcttcgaggcctttcaggactcggactatgagggctcggtgggcccacggacaaggcaggcccacgtagagatggagtgttgttgggctttttcgggttaatttttgggcccggaattttgaagcgggtctggagtaaccgccggctgaatcggagggagcgagctgggacatcatgagacgccacgtggagtgccaggctgtacggacggtggagatgagagacccggtggaagggatgggccccagaggagtttggtgacggaggagattaggtcagggggtttgggggtttcgtttagggacattttaatggctaaacgacgtcgtgttgggttggcggtggtgtcgaagcctaaggaggttttggactttttaggcggtggaattgggatgtgggagttgattagtgaagtgcactgcatttttttttttttgctcaactcaagttgtttccttctttataagtattatcatgaaaaaaaaaaaattaccaaatattaacatgcataaaaaattatttttatgattagaatatttttatttacaaaaattagtattttagtaaattgtttgataattcaattggctgtgtatttaatttctatgatttgatagatggtatttttattttgttatctttttttctagagcaatggtttctgatgttaaacgggaagttaataaaattgctcatgacttagctaaatatttatttttcgataataattgtatttggttggaagaaatttcttcttcaatctactcttttgttgttttggattcattaataataagagtgttttaaaaaaaaaatagttgttataagatagaattttttgttatgttttgtttggtttatataatttat

SEQ ID NO: 184375 - DNA, 9978 bp, Cannabis indica
cccaagtggactatctttctaatagattagatagcattaataataatgactttaaaaaagtgctatcagtaactttggacactcagctcataattgctataaaaggaaaatgggaagagaattttgaagacttataaaaaacaagacatgtctagcttttgcagagctatggagctcaaaaactgctgcaatacaaacatcaatggctatgagaggattatgttttgcagtgtgttattatttccaagtgggtcaagatggaaaatgctttggacaaagattatgaaagaaaagaagaagttttttgagtgtacttcttcatcatcatcatctcaagttcatgttccttatgatttttatacttattcacagaattttgatcaaggaccagccacttaccccgaaaatgtctcccgatctttctcggctcgatttgctgttccatcaaggattttccaggagaatgaaatgggaagataaagaaaggttttttctttagttgaagcatgttttcttctctctctttttgatacaaatcttatgtttgagggattaatgttgttgttttgttgttcttctctttcttctcttacttgttttttttttcttgaaactcaagcaattcttcactcacaagaggaatatgcatatgagatatgagatatggtattaattacttgttattttctttttatgtatagcatttgagaatgattgttgtgagtataattatatattcaattgatttttctgaatcaagggatgtttctggctcttcaaagtttcaattttgttttgttttgtatttaaatgaagttgattaaaatatattcaaatgtttgaggaagcaaaaatgaaaaccagaatttctttaaaacttttttattttatttttctttatgaatccagaatctggattaaagggttcaaaagtttattctagataaaagaataaacataagaaagaaggaaagtaataaacataacatgtaaaaaaacacttgttttaagtcctttctttttttcttttgagacaaactttgtttgagaacagagcttttgtctaaattgtggggtagggtaggggaaatatgcatgacaattcatgttgcaactgtatatttctactatattaattatctctgcaattccattggcccattttggtaggtccatattcttgaataatgttttatctttttgtgccaagctttactctcctcatttaaattctttttctttctggggttttagtgataaagtgtaaccaacaatttgaaccaatcatatataagcttagtaatagctttgaagagaacagagaaagaaagagttggaaaattgaaacattttttgtatcaataaatgtcttaatggctggaactacttaactgcttaaattaaaaaaatcccaacgccattgctctcacaaatgacactttttaagcttgagtatttatattgagcgttgctattaggtattactggtgttgcgcaccacgttttataaatagttaatgatattttataataataattaaattaaattatgtagagtttaatatctaattatatcaaaaataatatgatacttgtaagtagtgttagaaggcatgtgtagtgcccatcatcttcatgatattgtcattttgttattagtgaaacattgaattttacatattttaacttataattgtgaaaaattggtaattattcacaaaatactatctctaatttctaacagcaacgctcattatacatggaattgagtaattaattgtttttcatattaattactaaattaaatatatatatataattcactattaaattatactaataataatataatcaaggtacactaggtgtcttttgaagtctcaaatctttgagacacgtataaggtacaaaataatacaagagaagacaatgtatggatgcagtgtgcaatgcattaaatacaaactcaactcttgtaaagtggtcaaaagctttcttcttctttgtttcatttcccacttcgtatctaaagatgcttgtttctattaggagacttgtcactaagatgcctatctgggttgttcataaatgatcaacccattctttgaattggtccccaattttcatttaatgaatctcataattcagtatcatatatatatggtcctttacaactggacaaaacatggtagatggtaataaggtatccacccaacctaataaaaacactaaaccatttctcactaaataataaaaacatagttgggttagaaaaaaaaaattatttcatataggatgacttattatgccaaaaaaaaaacacaggacttaaaatcaactaatgaaaaatacacataatttagaggaaagagaggccacaaatgacaacaactgcataaaaactaaaatctatgaaaatcccacgaattgcttggtaaacaaccaaacctctctccaaaactttaacagcttgaatccaattatgtccattatcatcttgagcctgaggcattatttcttcttcctcctctagactgttatagccgcctcgattttcgaggtataatcgagcaaatacaattgtgacatcagttagtagaagaatgtaaagaggccttgaagctacaacactctcagccctcactatgtttctcccaaatattgcataatcaacatatgataacactaccaataatgctattataagagcacagaatattcttgtagtctctgaagctattatgctggaattaagtcgttttgaagtgaaaattgttggcttttccacaataattgatgatggttttaattctttttcatctttcaattcatggtctaatttctttaaacacttctccattaataactcctcaagttgggtgcttttgataacacttttttcccctgaattttcttgagtaaaatttttatgttctaaaccagctgccaacaatagtgaaaatcaatgagaaaaggccattattaaatggtacaatttgttatgatggaccacataaattcgtggctggtacattgtaattaaatggttattattcaatttagtaatatcttcagaaaatacgaaaatatattataatgagaccgtaatattaatctaatatctatacatataaaattgaatctctttcatatgatcattaattaaagttgaaaatgaatctgttaatacaaagttatgatatcataagatcatgtaattaaacagatgatatatatatatacctggaatattatgatgatgatgatgagaatggatagatgaattagcaggggatggagatggtggtggagtaggaggaacacgacctatgcaatcaaattctcttaacattatttctcttcttttttctttgctaatcatctccatctccattgccattaatttctctctctctctctagatctaccttaatttcatcttaatagatcaatttctttctttagaaaaaaagaaaaaatagcatataccatagatactacgatgtcgtttcttcagttaataaattaaataaaagctattagaataaagattgtctatttaataatgaaatgtaaataaatacgttgacacttgacagttatttataaataacgataattcttcgattattcgtttaattcatagttttaaaacatacaaactttctccttaaaaattaaacataaaatttacagtagatttagaaaaataacatcccatataaatttctgtcagctgtcataaattttcaaaaaatttcattattttgaattctttttcgtttcgagtgaaattcttaacttaaagttcactcatatttaatatttatttatatatatataacattcacgaaatttcacatgcatatattattatttaatgcactaataaatttttaagattcaaacgcttttcactaaaccatttattgtatatatatgttacgtagttactgtttataaaacccccgaaaagcccagctcaacgccaaatacaaaatttatggccaaaaaaatcgaaaaatgtctacaaaattttcttcccaaaatccatttcacttctctatcctcatccaaagattggataatctccaattgtagtaaacaccccaaaacgctgtcgttttcagcagtccgaaatcaaaacgacgattccgctactctaaccgacatcgaccaattcctctttgaaaatttcaaatcgctttacacgacaaaagacgacgtcgttcatagccaaaacgacaacccagatgtcgttttgtttgaatctcctcgcctattacttccgaatctccgtgggtcccaccgatttttcgtaagtaccggaatttcaagctcgctaatcgaggaagcccgggcaagtattaccaccactactactactaataattcaaacgacgtcgtttttgaagatacgacgtcgttttcgtcttcaactactgtcgatgatgataatagcgatgaatgggtaaggcttccagatcaatgcgtcgccgttttggccaactcagcaaacccttgcgatgatttccggcgatcgatgaaggagatggtggaagagcatttccggcgacggaagaaggttgagtggagtttcatggaggagcttctgttctgttacctgaaactaaacgataaaagatcgtacaagtacatactcagtgccttcgtggatttgatcgtcgatttgcgtggagatgcggaaccagctccgtcgagatcacggaaagtagtcatgaatccacttcgaaataagctggagaagaaaacccaaagagagagagggaaatcagtaacgtaacaactcggtcggtcatggagttcagtgtcgaattgttaaaaacaataaactttattatttatgtttttggaaatatttaatatttattttaatttctgtttttgtaactaaattattacataatataaatttcaagtagtgataaaaaaatagtgagaactgatagaataataagagttttgttattggataccttctatggctagcaatacttaaggtgtttagtttgaaggattaaaaatataaaaatagtaataggaatggaataaaatttataaattacataaaaaaaaattaataaaaaaattatatttatctcaaaatacaataatcattccactaaaatagtaggaagagcataataaatgaatggaataaaatttattttcttttcattctattctattttattacctctaatcaaaagttgctaaaaattattatattatcgagacacattactcataagttaaacatagtaaaatttttttcttatttatctctagtgtgcaattttagataacataatattattacaaaaagggtgcaacttttattttatgattttaatattataatttttatgagcttttgttggtgagatttcgtgggtgttgccggtacttgagtcttcctagaatatttttattgggtattaatattattttaataaccttaaagcagcattgtttgttgatgaaaaaaaaaagcaatggttaaaaaataaaaaataaataaataaataataataacggaaaaagtactaatttcaaaaaaacaaaaacggaaaagtactatataatatagtgttttatccttaacgtactcaatctctaccatgacaggaataagcatatcttgactttggcactgattacaatactaagattaactatattgaggaggctgcaatttttgtggggcttattgaaaaaaaaaaaaaaagtattttaatgaaagttgaaagtgtttccaaaaactaaaattacagtttactctaatcaagcttttataataatagtatgttacttttatcagtatatatttatgtttcttatgataaggatatgagttgcatgtgcataaaagaggcttacaccaaaatacagggcctctctagagttgatcggacactacattgcttaaacttcaagactttagtttttactcgtaaagacaaaatttatagtgtgtaaatatcatcagtagataataaatttattaatattattagatagattcaagtctttgtcgcctattttggaccaatattcagttacaacttggaaagcttatccatgcagaaaccgaactataattcaattcatggccaccttcgaatagtgcagctactatttcaagtacagatctgtacaattaacactaccatttgctagttagtagcatccccaaatgaagtggctttcaaaaaatggcaagaaataatactataactttaggtttgtcttctttctggtggttcatttttctgcatatggcaagtgaaaaaccctttgatcagtgaaaatttaatcatgtgtgtgagcgtactagtacatctctatcaaaaattatcatttcaatcaatgtgatgtgataatttgagaatatttgatagttataattgggacaaatcaaatcacttcctaaatatatgcaaaacttagtcctagtttttgcaaatactataaaacatatctactgttcttgttccttaccaggactcttagttgtcttgtcatttgctccaagatattggtcatagagagcatgatacttagcagggataaaatccttgaacctgttaaaatgtagacaaaataacagattaaggggatctaatattcaaacggcaaagcaatgacatcatatgatagctaagaagcaatctgagaaacaaaactgagaatctttcaccactatgaggaagctcattatcatcaatattgtagacacaataccttacgagaagagggaaccgctcaggcccagaaaaaattctgacaatagatctaaaaacttcatttatcttgactgctttcgatttaagtgccttcatggaattcacgaattctttatactcagatatactaagtttctctccaacctaaaagtaaacaatataacacacatgatcttaaattcttttgaaatttaaacataaaatgttaaaagtaagcagagattcggaagaaataattttggaatccttacatctctaagtaagccagatgatttagtcattactatacatttaaaaatttattaaagaaccttacaagaaaaaaatataattaaataagaatcagaaggttaatgaaagttcaatgttgtttgtaattcatagaacaaacaaaactgggaattaatatatttaactaacatactgttaacttagttaaatgctatagcattggttatgttatgttagttaaaatgctacagcattctgctttgttggtttgagtgtaccggtagttgttatgtcttgcttttacctattgaaagaatttagtcattcttgttagaaacaattcatactaaattgagagaaactgaatcagagagaagagagattgcgaaatctggaccaagaccagtgttcttggagctaagctcaagcagagtttcaggggtgtttcttctgtaactcttctctaggatgcacacaaccattaaagccttgtattcatcatgttaatggaaaagaaaacacagaaagtaaccggaagtaggtccttggtttgaccgaacctatataaaaaacttgtgtctgttttattttggttctcttgttttttatctctgtttttgatttctggtttgaatatgcattagttgattgtctatagacttgtgtattggttcttggttgagttctgtgttgtaaaattacaacattcaaactaagcaaaaagagtaacatggtctagctaatgaaagttctacattcttaaaatttaccgtattactaacaatttcacattgtgttatagaaatttgtgacctcggcctggcccacgacattttgaaattgctactagtaacgaataccatctctcacattcgtggacaatcacaacataaatatttcaagaaatcatttaacaatctcttagacagcttattatttatcaatagcctagcagtattttactatttagtataatacatattaatgtgatttcaactcacctgaatcaggaattcagatcctctggtttccacattatcaacctgagcactttgtatacttctttctgcagaatcaatacccttgtcgcattcctgagatttagaagatgaagaattgggctccgaatttctcatacgagatgaataatcactaaaactttcatgaagcgatacactaggctttgtgcctattgatttccgcttcttggaaggacaaggagctaatagtcctctaaatgattctctgtctaatatagaattattatcgagagaatcacatttaacattttggtactgagccctccctgcagaaatgagcaactttttctcattgcaaatctgttcatttgaactagtcaatattgaagatttatctttgcagcaagaaagagatgcgcgatttgcaggttgaactttctccaacaaaatagaaaaatcttcacccactgctgctgtctgcaagtatgatatccagaattcaaatcatgataaaaagtggaacctaattttaacagatcatacgagtttatgcaagaaaaacaatataagttaccaagcgtgtgaagtcttctaacttttcagttgcgtttcctgctgtttgtaagaaatattattaaaaaattagtcagttgactgaaatctgagtagagtccttaatttaacttttgcaaattatttcttttttaaagagagtaccatcagctgacattgatgaggctaagagagatgatatattatccaatggggcttcactgatctgcttaagtgctgctgattttatgctagaattcaagtctcctacatgttgcagagaaaaaataaaaatcattaataattaatatcttcacccaaaagtggggaaaagtaaacaagaaaaggaactaaggttatgggccaaaatcaatatgccagtccacgtcattttttaggctctaactaccaaggaaattttctgtggagattgaaatttcctgtccccatttgagtccatgatgtggagacccctaagtagcagtgggataaagagtttatgaatcagcagaatttgaacaggttatttcagtctctagaggagtccttgagctgttggcactaccattgcacatttattagaggtctgaaaaggaacattaaagaaaatctctcttttcctagttcggactcgtaagtttcctcttgcctttttatcacataacttctaatgttatttaaggttcttacccagtttctcggtttttggtaactccagctttgtgggacccaaattttttccatcacgaaaaaaacgggtcaatgtaaaaactatatccccaaatttggagtagcactgaaaaaagaacatcacttaagtacagattataaagatcaaattgttatatcttttggataagcattagaagattatatccaaagaaaaagcaccttgagatgaggttggatccaaagtgaaatttgagactgacgatttgaatgtgaaaacctgttatcaactcaggttacagtatgtatccatatgttgtctttaaaaaaatatatatatgtatcaatatgttctaaagaaaaaaaaaaataggttatttatatatttttaagtagggcagggtacctcctcatcacaaaagatgattgctccgtagtcatggcgatgccggattactcgtccaacagcctgatttactgctcgtgttgcttgttgactgtaccattcttccccagtaagaacttctgtcttaagaatttgaaaaggtgacaaatttagtaatgataaatatagacagaaaaagatcatgactattaagcaaaaaaataaatttcagtagcatcacacaaaatgcaagtacataataccttgcatgcttctcttaggcgttgcgcttgttcatccaagaacaagcgtttcagacgaacctgttgatttttcattttattttttgaattatgacaggcaaatatgtcagcattcaggcaaaataaaaaaa

SEQ ID NO: 184376 - DNA, 3081 bp, Cannabis indica
atcttgtattcttcctcacatattcaacatttcaacattggtgttggaatattagctttagttgtaagaattaggatagattgtatttagtagtttcctatttagtctcttagttttatatataaatattaaatatatactattttatagaatacaatacacaattcaatcaccatattttacctgcaaccatttatatacaaatatatttatacaaatattattctacactatcatttgtgaaagatggtactcattataacaacaataaaattagaacattaaaataatatatttgtagggaaaaaatggcttagtttcccaaggaactaatgcaagtcaatatcttcaaagtaaaaataataattgagaaataaatatggggacaaaagggtaaggaatcatacctaaggaatccacctagacgatgatcaagattctttctccatgaccaccataatttcctattctcttttgtatcctctaaagaggatgttgaacttgataggtggttttcttctaatatcaatttaaattctggagctacatcatccaccagggtggaaccccaaggacattgccaatgcttgcaagaatcttttctttgagataaattactagagctagaactttcagcatcatctgaaacttctgataaaatgatactactatttagcaacaaatcattgaaatatttattacttatgtgagcataactatgtattgagaaaataccttctattatagaatctactggaagaaggacaacaataggttgattcttagaatccaaacgtgatactagcatccacgcactaacacatgaagaatgatgtaggatctcttgtaaaaaattagcataagaacttccaagcatacttatacaaattgcagttgtgcaaggaaggccctgaaaaaaattctccacaaattcttcaaaatcttgtgtagactcaggtgcaaacctgtaaataaatattaacaaaagacgaaagcataaaaaatggttagactgatttgaaaattcctttgttcaaataattcaatttgatgtatactcatagtaaagacctaggtttcggcatttctgctgtcaagcaatttgagccagtactgcttgaatcctgaaagtaaagacttttctgttattcatgaacgaggacggcaataaatgcaaattcaggaagaaaacactatctgtcaaaatacattgaggttacgtaaatcccctaaaggcaaaaagtcttcgaaaaaaatattttgatcagttggattgattgaatgggcaccttagctcaaattgcattctttgttttgaaaacacattcaagcaataaattctaatatgccatagccatgggcatctcgtatgatggtaaaaatatgcagtgcaccttaaaggtgcaagacaccagcactttcgaataagacttgaaaaaaaagccttgtaagaaaaaattaatgaaaaagaaagtaacataattgatgatttaaaatctggaataataaaatctagcaacaagattttccctggtagtaggaaatcaatctaacctttgtacagatgattaaatagataaaataataataacaataataaaataaagctcaaacagataatacctcagaaataagatcgaattcaaatattgttagtagcttttcctaagtttgtaaggaagaggtgactagggacataccacagcattcgcaagatgatggacttcatgtctcccatagtcattagtaatgatttgataattaagatgagacccaagtgaagcttgatgaaagtatgcagcccaatgattttcagagattgctttggatgaagaaagagaacaaagctcaccagaagcagcaagtatgaacacaacagaaagcaaccttgagacctatcgaaatccaagtcagttatctacaatagcacacgagaggtcggcaagaatatatacagaaaataagtgtgctgattaatagcatttgagtattacttagatgggaacctgctgccaatttactcaaaccagcagcaaatacacacaaacaacagcagcagtaatagtagaacaataagaacagtagccaaacagtaggaattgtatattgaatatatgagtaaataaattccataccccctatttccccttacacacatatatatagtaatttctcactcagtactgccctcccaagcaaagactcacaaagactcatatacccttattattactatattctagcacaccatgtttatcctagggccctaacactgtttaaatcagttttccaaaaacaaggttaacattggacatacttgactcttgtttcatactttcaagttaatatttataatgagctacaaaatatatatatatagaagaaaaaccacagctttaccttctgaaagagaataggaacttcctggcaaagtacaaaagcttgcattaaccaggagattatatgttgtggctgaatatgagacagatcacagcaattattcctagtaagcaataccgcagaacaagttagctgtgaagttctaagcagatggcaaatataacagccacttcaaatataaaagaaagatgatcttgtgtttgtttgctaattatccctagattttagaatgatataaggtgaaacaacattaccaagagtacttattttttcatttcccctttacgtgtgtacccaaatatttaagagagaaaaataaactagggaatgcaaattcaaagaagtccaacatgtgaaaatttgggagttgcaattgcacatttccaataactgaattcaagaacatctgctcttataccaatactgagttttccaagtcaattaaccttcagcctccacataaggcaatcaggttgccaaacttgcttctttaaattttcttggcaatcttactgcgcagatttttttttctatccaattgcatcttttaacttttttacttcatgattattttcgttttattataagtccactaaattgtacggcaagtgctctttgtctccccagattttcccgtctgtgtaggcttaacatctcagcgtcagtatatccattccaata

SEQ ID NO: 184377 - DNA, 5016 bp, Cannabis indica
taggaggggtggtacctaagagatatgtatgtgtccattaattatgttaattaatatatagattatgttaaagaaattaatatacctgactggtaaggagaatggaagtgggtttcgaagaaaggaaggatgagataatccaggcagattgcaacttatgctaatgtacacaggtttgctatgctctaatgctgcagctatggccccatcaatttgctcttgtgcattatccaagttattcacaaccacctacaatataattataattaattcaaaatactaattattaataatacatttaaatatatgatgttaagttattttattaaaaacctgttgacaagtgatttgttggaagcatttgagctcttgactaaaatcagctaacccaatagaatggtgaagaattctgttattagctccataatcatttgagttagggcccccaactatacaaatgaccggaagatcctcactgtacgcaccggctatagcgttcataacgctaagaccgccgacagtgaaggtcaccacgcaagctccaacaccgcgtgaccgagcatagccatcggctgcatacccagcattcaactcgttgcaacaaccaattaggttgagttgaggctcggctacaagatggtcaagaagcgcgaggttgaagtcaccaggcacagagaaaacgtctgacacgccaatctgaacgagtcgctgggcatgttgagaaatagaaattctgcaccaggtgtcacggacctattcgttatcagcctaacaaacttctggtacagcagcaatccccaggatgatttcagcaatcattagtgccttttattgttagaatattccccttttcctttgtaattctctgacagctgtacatgggctaacggccctattttcatcacatgtaatattttggctataaatacaatatgcagcagctctgaattcaagagctgaaaataccatttcatagttttatctgttagcttaattttatcttggtatcagagctacatttcaggcctacgcctatggctactcaagctcctgggaatggtgatcaaacccctgctgcacacccaacagcaagctctgctaatagctctgctgtcatgggaaatgcagccaacagatctgaaaataacccctatccaaacacttacccacaacatttcagcacattaaaccaaccattctcccttaagttggacagaaacaactatactctttggaaaacaatggtctctaccattgttagaggtcatagactagaaggtttcctaaaaggaacacgcatatgccctaacgagttcattacagctggccctgcagatggagaaacgggaccagagacagggattcaagtcaatcctgagttcgagcagtggataatcaatgaccaactactgatgggttggttatacagttctatgacagaatcaatagctactgaagttatgggagcaactacagcagctggactttggcaagccttggaaagtctctatggagcttattcaagagctaggatggatgaaatcagaactcttatacaaacaaccagaaagggctcaacaaccatggctgaatatctcagacaaaagaagaactggtctgatgttttggctcttgcaggagacccttatccagaagcacaccttgttgcaaatgtgctatctggtcttgatgccgaatacatatcaatcgttgtccaaatcgaagcaagagtgaaaacaacatggcaagaactccaagacacccttctcagctttgacagcaagattgagaggcttcaaactctcaccaacaacaacaagatactcggttcagtttcgaatcctcaagccaacatggcagcaaaaccatcaacttatagcagaggtcgtggatcctactctaatcaaaacagtggtggtcggttttcgaatggccgaggtaacaatggaggaagatcaagaggaagaggaaggtttagcaacagtggaaccaaaccaagttgccaaatctgtggaaaatatggccattctgctgcaatatgttacagtcggtatgatgagaatgtcacaggacctgaacaggggcaaaaccagatgaaacaacctccaaatgccttcattgcaactcctgaagtggtggacagcgatgcttggtttgcggacagtggtgcgagcaaccacattacttcggatgccaccaccatgaacaacaaacaggagtatgggggtaaggaatcagtgacagtaggtaatggaaacaagcttcttatttctcatattggtagtggttttcttaaaacaaactgtgataaaactttgtgcttaaaagaagttttacatgtgcctgacattgctaaaaacctcatcagtgtttcaaaacttactgctgataatcccatattaattgaattttatcccaatgtttgtttgattaaggacaaggaaacaaagaaggtgctgctacaaggggtgcttaaagatggtctttatcaactcctcacaccaaaaccatctcagtccaaatctactccttctttcaatcaagagttcgcaaaccagatctgtttgctggtgttgctgatactcaaaatgttagtgtagatcagtcgcaagttaagcatgtttctgtttcccaaaatgatggcataggagattaggccatccctcttctagaatattgagtcatgttttaaattctaccaatgtaagatttgcttcaaatgaaatgaaaactttctgtgacgcttgtcagtatgggaagtctcactcactgccatttaaactctctcaaaaccgtgccaaaaatattcttgatctggtgcatacagacctatgggggccagcaccaattgcatcaaatatcaactataggtattatatccacttcgtggatgatcacagtcgatatacatggatttatcccttaaaatttaaaaatgatgctctatgcttttctaaaattcaaagccttagctgaaaacaaattcgaaaggaaaataaaatgtttgcgaacagattggggaggagaatttcgctcttttactgatcttgttcaagctcatggcattgaattcacacatccatgtccccatacctcggctcaaaatggtcgagccgagagaaaacatcgacatatagtcgaaatgggactcactcttcttgcacaagctagtatgcctcttaagttctggtgtgatgcttttcacactgctgtttatttaataaacagactgcctacaccagtcctatctctaaaatcaccacatgaagttctctttggagaaaaaccagattacaactccattaaaacctttggagccgcatgcttcccttgcctaagaccttaccacactcataaatttcaattccattctgtcaagtgtgttaatcttggctttagtaatgtgcacaaaggttataaatgtttgagtccaactggtcgagtgtacatatcaaggcatgtagtttttaatgaacttgagtttccttttcagcaaggtttcttgaacaactaccaacctgaaactccagtcattattcaaaactcaacctggtccttgttaccaacaccatctctttcacattcgcaacccaacttcatgcattcatcagatggcactacccctggagcagcatcatctctgttgcctgacagtcctcaatcgccacacacttcaactactcctgcttcagtgacaacaccagaacctcctcaacactcatttgaccacaccagtagcccatacttccatacctcaccgatgcccttgaataattttgacactcttattgatcctgctgtttcggctgatccttcttctgagcctgttgcagctcccttggcaccaactcacagcatgatcacccgggggaaagcaggtatattcaagcctaaaacgtacctaacccaagctactcaatcctatttttctgaacctacaagtgtcgaagaggctctgcaggatcctgtgtggaacaacgccatggatacagaaatagctgcattaaaagcaaagaagacttgggtgttagttccaccatccgatgactacaatctcattggaaacaagtgggtgtacaggcacaaattcaattctgatggttctcaccaaaggtgcaaagcccgacttgttgcgaaaggctttcatcaaagacccggggttgattacaaagaaactttcagccccgttattaaagcttcgaccatcagagtagtattgacaattgcagcctctagaggttgggaaataaggcaactcgacatcaacaatgccttcttaaatgggattcttgaagaagacgtctatatgacccaacctcaaggctttgaagagaaaggcaaagaacattttgtttgcaaacttaacaagtcgttgtacggtctcaaacaagccccaagggcatggtttgaacagctgagaaacacaatgttaaattgggggttcaagcattcaaaagcagattcatcactgtttttcctcaagacagccaaggagatcattcttgtactaatatacgttgatgatattatcatcacaggaaataactcaggtacattaaatgccttcatcactcaactcaacaagaagttctctcttaaagacatgggctctctgcattttttccttggaatagaggtatttagagatcaaactggtctctatttgactcagaccagatatatccaagacttgttgacaagatttgagatgagcaatttgaaaccgtgcccgactccaatagcagcaggaaaaccagtttctgcaactgatggtgaacctttgtatgatcaaaccaaatacagaagcttaattggagctttgcaatacctttgtcatacacggccagacatagcttatgctgtaaataaactaagccaattcctcaaatcaccaacaacagttcactggagttgtgcaaaaagaatcctcagatatctcaaaggcaccttgaactttggccttcatatcagctgctgcagtagactcaatattactggtttttctgatgcagattg

SEQ ID NO: 184378 - DNA, 2390 bp, Cannabis indica
tcaaagggcgttggatcgcggagggatcaattttggcggctgaggctttccacactatgaagaagattcgaggcaagaagggatacatggctgttaaaacagatatgcataaagcctacgatcgcattgaatgggatttcctacacaatgtccttattgcaaacggtttcagttcaaaagtgtgcaatctgctaatgagatgcgttacatcagtgagctttttagttcttctcaatggaacccctttgaaatcgtttttccctggccgtgggcttagacagggcgaccctttgtccccatacttgttcatcttatgcagcgaagtcctctctaaactagtctgtcgtgctgaggccaatggtgagataacgggtatcaagttaggtaaaaatgccttgcctctttcacatatttcctatgctgatgatgctcttttcttttgcaaagcctctcctggcaaagcaaagagtttgttaagttgtttggagacttatgaatcttggtctggccaaagaataagtgaggccaagagtggtgttttcttttccccaaaagttggacgggaagctagaaaagaaatcagtgagaatttgggaatctctgctcttttgcacaaggagaaataccttggcaaccctcttcttgtttcgatcaggaaaagggaggagttctcgtttttaaagtccaaggtgcttagaagacttgaaggttggaaagcaaagtgcctctctcaagctggtagactcactttggctcaatcggtgcttcagagcattccttgttacactatgtcaactttccggataccaattacaatctgcaaggaacttgatagcattatggcccgtttctggtggaaggggagtcctcgggacatgtcaagcaaccactatcttgccttgaaaggttggtcttctatttgtcagcctaagaagaatggagggcttggcttgagaagattcagagatatgaatttggccttactggccaaactggcgtggagtatgttaagcaacactaataggtcgtgggttaaaatcctcatagctaagtattgtggcacttggagtttttgggatgtggaaaagcaggggaatgaatccttcttgtggaagggtatacttgaagcacgacaactatgtgttaagggtgctgggatcatcataggcaatggagggactgatctctggagcacgccgtggatcccggggttcagaccggaggaagtcaggcacaatttcaccgttgtggcaaatctcaaattcaccactctctctgatttatttttgccaggtactcgatcttggaatgcttccttgatccaagcctgcttccctcccaacattgcagatgaaattcttcggatcaagcctttgcctgatgaggaggacgttgtgttctggcaggctaggaacgaaggagccttcactgtgaaaaatgcatattagctgtctcagaagcatcgttttcattaaggaaaggtgtcttggaagcaactttggaagctgaaacttcatccccggcatgccttgctgttgtggaaaatgatgagcggttgtcttggtcttaaaacaaatcttttctttcttcatgcgcatgacagaatatgtgttctttgtaactcgatgatggaatcagatgttcatatgttctgggattgcagtctcgctcgtgcgttgtggtttcagtgcccttggagttttcactctggtgcactccagttcgagaccttcacctggctctggagctttgctgaacttagattcttatactttgcagcctgtgtcactgaagaaatctggcacagtaggaatgacatgagtttcaacaatgttcccctcgattccaatgcttcctacttgagaattatgatgcattatgcagaattctattctttcaaggagaaagacagcatcagtgcccagcaggagcctgatccgtttccagaggtttttgatgccgttttcatgacagatgcctcagttttggaccaatgggcggggcttgcctttgttcaaattggagatgcagctgaggcttttacaggccaagactgttgtcatgttaagagtgtgttacaagctgagttggaggccattcttttggctttgaaggtggcttcgacaaaacggttctctaagatccaaatcatctcagacaatgccattgcaatcaaggctttaaaggtgcgggagttacattttgcttgaggatccttttcggtctttcgtcactgtgtggatttgtttaaataattttcttgtatttcttttaaggctgtttgtcgtgtggataactctcttgctgatgggcttgcctatttggctagagtaaacaatgtgcgttcttgtgtggttgttagggaggcagtactgttgggttttatgccc

SEQ ID NO: 184379 - DNA, 2679 bp, Cannabis indica
attaccttaaaagccaaagaaatgactctcctccagaaggatgaagcctttttacattttacatttcagaatccattcctgccaaataataataatagtaatgcatagtactatgacataaatctcaagctatagctactattaaataaagctcaaactatagctactatgaaataaagctcaagctagagcaacctggccttaaaagcattccatttccaaattatacaatgtaatatataaacgtaaaattaaaaaaaaaaaaaaaaaaagctcaaagcagctataactactatgaaataaaggtcaagctataactactttgaaataaagcacaagctatatagctactatgaaataaagctcaagctataactactatgaaatagagctctagctataactactatgaaataaagctcaagctataactactatgaaataaagctctagctataactactatgatcataaagctctagggcgtgtatctatgagactgcagtagtataactatatatagctagctacagtaccatgatataatattgtaaagccgccacatcctacatgattatataatataatgtgattttgtaacacaatttttagtttaacaattctttttaatatatttttttaataaaaactaatagggagttaacgttttgcattaacatctaaaaataaaatatccccaaaattattttgcatatttaaatcgttcctattaatcaagaggaggcttaaaaaatttatattgaaatttttattcaccattgagagttggcgaaaagagcttttccatgattgagggtggaagcttaaaattttttgattgaaactttcaatcactgctcctttgcgattgaggattggtttcggagttcgccaaggccgatgatgatgatgatgatgaagacgacgatctggctcagcagtcgattagggagcttgacttccttgagtgagatcaaatatagggagcttgacttccttgagtaagatcagatataggaggcttgataggtttaattcttcaatttcatacgatttgagtgcatattccttgagtaaaatcaggtataggggcttaataggtatgattctgcaattttatacgatttgagtgcatccataaaaaaacttctcccatcccgtataggaaagcggcaaatcaacttgtttgaataaggttactttttcttctttgttgtcatttttgttgcatattttcttctcccccttgaaggtgtaaaatgattcccatggaacaacactacaaggaggaggcttatgttggctgctgtacattatggaaaactttagatgttaggcaatagtcgtataaatttaggattcaatttagtgcattacaaacaagctttttagttatgctctgcttttcccattgtatgcaaaagaagctaaaataatattagtttccaggtttatattctctatatcgtatatatatgattggaatggaatgcatgtgccaaatcagttcttaataattgttaataattttagattccatccggtgaattaaatttgataatgtattttccgttgtggtaaacatattattcaaatttacagcttcttgatcttagtgtgtatgtttccaattttttgtgcatttgtattttttttttttaactcatgcaatagttgcaaactcaaatgagtatgttatacaatgacatttttttgttcctttaatgttttctaacgcaatgttttgtgttctatttgaattcaggtctggtattagtgataatgtgattagaattctgtaatgtgtttctaaacactcttataagactccttattgcttttattacttcaagtaattactttttttttttggctctatgataatgaacatattcattgttttgatctttgacttttcaaacattagttttattaatgtttcttaatataaccagttccaattcttaaactcatggactggcatggccatatatatgtgatcccaattctctagagcctaccttacaagaaagtggtgattgtgaagtacagaaaacatggcagtgccatagtctcacatatttagttaccagaatctgatcatcaaacataacggtttaaaaaaattaagcttgtggggtggttgcttgaataggagtttctaaaacttactagaaaattatttgtacttgtacacatatctttagatcttatattttgttattgtaagctgattaacattaacttatcctgtctatcaaatatttttactataaaacatgacagagactgtttctactattgttgtttcgttacttattattattttttcagagggctatcccaacagaaagtagtaaaaaaaagaaagtcttatttttatatattaaaagaaagaaaaagaaaaatatcattagttgggcttggcttgtagaatatcattcagctccaaaccatatttaaaaactttggtggaaaatctttgattttatctcatcattctaaatacaataaatatatgtattactattgctattgtattactttgctacactctattctttccttaattaatttatcaattattctccttaaaatacattatacgattttattatgctaatttatttattcagtgtttcattagccatttatgcttatatgcatttcatttttatt

SEQ ID NO: 184380 - DNA, 1775 bp, Cannabis indica
ttttcctatgtttgtgtacacatatatacaaacacctcatcatgttaatcttacttgatgttggcaccataggttgaaatcatgttgagactcagacatccaaatgtagtccttttcatgggagcagttactcggtccccgcatttctctatactgactgagttccttcccaggtgattttccttgtcaagctttcatcttgtatgctttaaatttactatcagttagttaaatttaaatttcaaattaatctgccattctggcttagctttcgtttattagcacataggactataggtgaaagaaatcagtcaatatatggtgattttcgccgagatgattatctatataatattataattaaaattatctcttctcatgttatccattggtacacagggggagtttatttaaactactgcatcgtcctaacccgcaacttgacgaaaagagaagaatgaaaatggcgctggatgtggtaaataattttaattttaatttttctgtttatttatttatttctctatgtaaagttttctgatggatacctttggctttcattttgtaggccaagggaatgaattacttgcacaccagccatcctacaattgttcatcgagatttgaagtctccaaatctcctagttgataaaaattgggttgttaaggtgaccgaaattagcatttcatttcattatttagttggtacaatttccttattatttgggtatatttccttaaatctgttggtttctccttttcaggtttgtgattttggtttgtcgcgcatgaagcaccacacttttctgtcgtcaaagtccactgctggaacggtaatatacttctaaaatctcatgtaattcaaaccgataggtatattatcgtatctttctgaatattattgttgtggatttcagcctgaatggatggcaccagaggtgttaaggaacgaaccagccaatgaaaagtatgcccctttttaagatgttgtctttgtacccgaaattgttactcgatgtaggcttcttttataacatgcaagtgttatttgcttgcaggtgtgatgtgtacagttttggcgtgatattatgggaattgaccactgcttgtattccatggaaaggattgaacccgatgcaggttgttggagctgtcggattccagaataggcgtctagaaattccagaagaggttgatccagaattagcccagataatccgtgattgttgggaaaggtaagttattatttctaacttctacttatggttttgactagcaaattagtgtaataatagcatgatgttaggattccacaagtgagtagttgaaaccatctaatgggaccttgttttagaagtgtcgacaacctgggaaaaattcaggattacatagcaattgctatagttttctggtttccaaattttgtagggttaggcggggattctagttttcgaacaaaaaaaaaattactcggggcacataagctagtttgtttgttctataataaaccatgttctacaatgtttgtagtaaattgaactttgcttctttctttgtgcagagatccgaacttaagaccatcattctcacagctcatggttcgtctccggcgtctccaacatcttgttgagagaaaaaactctaataagtaaacaaccgaacaaccgataaataaaagtaaagaaaaaaaaaaggatttgtccccctatgctcgaagagttaggggtttgattagttaattttccttcaatacaaaagaaaaagaaggaaaaaaaa

SEQ ID NO: 184381 - DNA, 2415 bp, Cannabis indica
gtgtgctgattatatttgtagtttcaagctaagccgagtaaggaagatagtaaagcgagcggacctcgaataaacgagaaaattacagctcaagttatcaggcttgtaatggacaatggtgtagtaatctctatttgactgaaatagttatgaattgctagcatattttgattaatatacgtattatatacttattttcttttttgggggtgattaattgcagaacatacagttgtttcaagggatgaagctctggaacgtgcaaggaaactcaaccttgatttagttgaggtaaatatatgcatatgtagtcattctctttgaatatactctgagttgtagttagtcacatctacaattgtttcttacaatcactaatcagtatgaactagaaaaaatgatgaagtaatgtgtctcttttacaggtccaagggactgctagtccacctgtgtgtaaaataatggacttccataaggagaaatatgtgaagcaagtaagagtaaaggaccgcattaaaagcaaggtaaggttgtatgtggactaagatgatgtgtttgcctaagtgttaatatctttttgtaaagattgaaaaaagttgttcttatgtgtttaagatacgaattgcatgagtttttttgtaatgctttagtattcaagcttagcaaagttgatagatgtttattcttttgtagtcagtattacccctaaattatttttttctgcaaacccatatgatagctgatacttgactagtagatttacagtatccagctaatcattgataataatgtcagatttcccttatttgttttgtttttgttttcttttggtaagagaccatttactttctgtgatgtgacaatattttaatagctttagcttgtatgcagggtgaggtggctttaaaaacagcaagtgctaaagaagttaggttttctgggaaaattgtgagttctttcttttcaccctcttttcgtaatgttctcctcctcttaccttgcatcattttgttgaattgcttacttatcttgaagcctatgtgattcaggaacaaaaggaccttcagatgaaagcagatactgttaagagattaatggagtctggttatcgagtgaaggtatttttctgttaatttatatatttattttttatgaaatgatgttatttgtattgtagaggtagcctacattatctgtttttttcacactttatttattgtcaaaagtttgtgtttgtcttggatgaggaaaatttagatggcataattggaaagctcgttctgtgttttttaaacagtgtcatgcaaagggtactggagatcaggatgtattgggaatattgtctcgtctctctgccttggtattattataacctctgaattaattttgcttctatccttttgtatttttttgccccacttttcaaattgtttatcagaattttgatttctagattgaagatgtcactgttgttgagagtggaccactaatggggaaagacggtgcatatgttatagtaaggcatgttaaatttggtctaccaaagaagggcactgcaaaaaaaatgacatctctagtagaggcaagctctggggttcaaaaggatagcttgacttcaacacctgattcacctggggttatggatgatgtaaatgatgtaaattccgacttagatagcaatgaagagagcttttcagatgatgaccaagatagatcctctaattcagattttcatggttcagacaaacgacattcttttcatgattctaaaaaatcaccagagacatctcgtatcactgaaaataggtacaaaaagggcggcgcaaacaatcaattttcaaatcaaggcaggcaatcaccaagagacacaaggttctcacagcaaacgagggaaagcgaggaagcatcaaccaatggtcctggatttagaagccataggcctccgctgaatgatgcaaccaaacgagaatcatttagtcctagacctggctatggcaattttagtggtttgaaacctaatgctccagcaaaccatggcgtggaagcaaaagttggtgagaatatggaggggaaccgttactctgtgaggagtccagcaccaagaggcagcctcggctcgaatcagaacttacccaattccagacctgaaggaaggcagccccacattgacacaagcagacaggggggatggggaaggttcagttcagagggtgctaaaaccaaataggatgcccaagtaaagttagatggattttacattgtattttataacccccattatttatgctgatatgctataaagggtatttgtccaatccccatcaatctgagatgtctcagagataattttgttatccataagagaattttgtcatctcaccagtgattttatttattcattaacatataagtggg

SEQ ID NO: 184382 - DNA, 5201 bp, Cannabis indica
taaaaaaaaaaaagagaagctaaatattgaagaggaacatctagtttgtttcttagatgaattgttgactaataaaaaatatcttagatttattctcttccattctgatttctttttatgattctacagacctacttgagtagacaaatgtgtgagcaaaaacatgaattaattatccttatttgcaagtagacatagctttccggttgaatgtaattctttactttatatggtcgcagacccaactgaactgattgtcattttcattattttcatgtgcgctaaagcatgcacaataatatttattttgataaccaaagcatgcacaatatttgctccctaaattcttgtttatttatacaataaggacttagtgcaagtggtctgctacttttgtttcataattttagcattatatataaacttgtgatcctacctggaatggacatttttttcctaaatgacttgtacgcaaacgggacagtctttcctcataatgttcaaaaatctttgggtgccccttaataattttgagcactctatcatgtgtttaacttttggaacatgcttttcggtgcttgtattttcttatgagtaacatgtatttgtggcataagcttttccttaggattgttgagcactcctcattaatcttatacacttgcttgaaggtgtggccacctttattgaaacttgtaaatagttctgattgctctaaagaacaatctcttatgacaaaatttaaaaatagtaaaacttaaaagtaaaaactagaaacaacttattaaatgtttgattgctttaacaagcagcaccttgcgaccacttgagctgtagtatttatttctcttttgcttaaacaagctcgtcaccttatcatgccttcaatctcaggtgctttgtttccttgttgctctgtagatatgctcgagtatattgatttaaggtttcgtccttgagatgtctgtattcattggtgtcgtggtctatatcattacgtttttgacaaaacttggttgagtccctttctctgttcttcttcataggcactagtcacttatatggtacttgggccccaatagtaacaaacaagtttttctgtgacttagcaagttagtgtacttggtgaaacatggttcttatttgttttttcatctgttttgcatgtttctggctatcttgttgctggtcactcactccctcttaccactacacttgctgccttgatagtttgtgctgacaccaacttgtttgttaattagcttgcctaattttaattcctccctcgttttcttgatttcataatctcttcggtttgccttagaatcacctccattaggtaacaactcttctaggctgagaactcttagtgagaatgccaaaatgttaatgtgatttttcattaatgaagaattctctacatccgctagcatctttttattcatctctttcattctttaccagattatactgaaagtgttttacatgttacatggaaactcatttatttatagggaaacccttttctacattttaatttgaaatatcctttccataaatggatattacaaccataataaattcaaattcaaataaaaaacatactaaatattcaaaagaaatgtctagtttgctttctaaatatttgctgctgactaattaataacacattcattctctttgattctaattcttttgattatttcatggacctagttgagcagagaggacatatgaactggctgtttttgtatacaaggaaacataacttcctggtcaaatgtaattctttcttcctgctcactgatccaaccacttgtcgttttctttattttttatgtgcgctaaaagcatacgcaacatcaccttactctccccatagaaaatctcttacctaaaatttgataaatcaatgctctcattaacaccctaaagattgatattgtacacatatctgaaatattacaactcagcccgacaaataaaataagtctgctagatagtatcctaaaaactactgtttttctctccaaatatgaatcaataatgttttgggcctaggcattaaaggcgtatgacttatattctgtatctgaacttttgatgggttcaagcagtgagctgtaattttgactgctaaggtttataatggtagtgttgaagataaaaattttacgtatgaaaacatactatttttcatgtgtccaagtaattcttttgccatttgtgctttcagatgtctttgtatattggtcaaatatcagcacgcactcatagagatgatcttgaacgggtttttcggaggtatggacagtgtgatgtacgactgaaagatggatatggttttgtagtctacgatttccctctaaatgctgagaaagctcttagaggactacaaggtaagagcatatttgggcaacaattaaccattacatggtcaaaaaaacagccaagagctttccaaagatacacaaggggcgcaaggtcctatgagtcacacgggagagattttggccggagaaaagggccaaatgattggggcaattatagctcaggtaacaggcaaacagatggtgatggtgataggcttaattctgaggatatgcttgctgaaggtagggattatcatcaagaagaaacaatcgattgtgttggagaagaacatgataattttagggaagatttacgaagagatggtgatgattaccttggagaagaacaggataattatagggaaaatttcgcaagagatggcggtgattacattagagaacgggataattttagagaagatttggcaagagatggtggtggtactgtatctaagattgacaatggtagatggggtgagcgagtggatgaccattcaaatgaaaatggactttatagtgacttgaatactgaccgatatgaaccttatcagggttatgacagaagagataaagatgaaaatcgttggaagactcgctctggtggttcgacacttggaagttctcaagagaatgtagggagagagttagatggttatagttgttttagttgtggagctttgggtcacaagatgcgagattgcccaagaaaacattcttcacggaggaaaattacaaggtttgatcgtggacctgatgatgatatcagtaaaggaagaggtgatggggagttggagagatttgaatctaagtccgggaacaatgtgcagccaagtaagggtgctaagttgagggagatgaacgataaaagaggtgatggggagttggagagatttgaatctaagtctgggcacattgtgcagccatgtaagggtgccgagttgaggaaaatgaatgataaatggacatctaattcagaaaagcatcaagtttcaataaagaacagaaattctgatgaagttgtgagagttcaaggaaaagatagtgaaagaaagaaaagaaacaaaagggaaactggatctcctaaaagacaaagtgcaaagaaaccaaagagatcagcatcaacaacttttgattcagagtatcctgcttctagagcacgttcagtttcaaaatctttaaagtcttttggaaggtcgatttcacaatctagatcaagatcagtttctgtaggttctttgtcttctgattcgaaagccagctccaaattgggttatttaaaatctttaagttccaaatcaaggtccaggtcaagctcacatacatccttgtctttgtctgtatccattggccggccagcatcctctcctggtaaggcacatattaatcacaaagaatctttgaatgatggtgtgattcccaaatccccttgcattgaagttcgaaagtccataaaaggtgacactcactgtgaaaatgctcaaactgaaattggaatgacagtactcaagaatggaaatgcagtctcagcctctgaagtagaaaacgacacagaaaagaaccaggatactactaaaagcaggtcattgttcaaaatgactagtcttggaaactcacaatcggatgtaggtgctgggcattcaactccagatgatttgaaagtgacatcagatcagacaaattctgatgccttagcaacgaaccgtatcctgaaaccaactgatgcatcagactcaggaactcccactgtctcctcgggccgttcaacaaacatatctttgaacgagatgtgcatggtgctaaagcactacggcctagaagtcccagaagaaagcgaaagacatcattctttagaatcttactttggatccgctcgcctgtggccgtggcagagcatctattacaggaggatgagaaaaggtccagtatcagttgagaactatgccaaaagggttgctcaaaatcaagaatttggtattgttgacaagtacatcagaagcagtagtggatggggagaaatgtttcaggaaaatccatgaaagtttttggtggttatacaagaactatcttgccttgtaaggccaacttagaacttccataaggtttctaagtataatttttgatcctgtagctttcatgcaaacatgtttcatatggttatagttattattcatcgttgttagtagtcatgcattacctgttattactttttccaattttctactacaaacaatctctttcagagcttcttcttttcttgttggtgtttctagctaaatgaagaaatgtagataaaaatatctatggctttggattgtatggctgagatcacatttttaatttttgtgtatttgagttttaatatttttattaaagctttttggttcatatgctcatgcttgtgacttcatcttcagctgctgtgacttcacttcacttgtttatttatttattcacaaaatataaaggaataggttggcataataatagaatttgagttaggttggtttgcaatggtcaaattactggaccacctaatctagattaataaatcttatacatatcatggctcgaaaacatatgctacagatattgaatgataaataaacttcacttcattattttaacattattgtctcataatttaaaataaataccaccaaccccttttaagctgtttcaaaaaaaaaaaaaagttttaatttacacctaaaaattaccctaattttataaatgcatcctattttattattctaattaaattatgtgtgaaatttaattaaaataataaataaaaaatatacttgattaataaaaaaaattataaaaata

SEQ ID NO: 184383 - DNA, 4264 bp, Cannabis indica
gaatttttatcttaaggagaagagatcataaggggggtaggcatatattttctaggccaaaatgtggggttagagaggccataagaagagattgcttagtgccaaatccaaatcggttggaaggtttcgcacattttcttgtttttcgatttaaacaaaagggaattatggaatgagatgaagaagaggtcatgggggtggaaaaggctgtagattatataattaaggaatgtataacaaatccttgctgtgtatgcttctactactcacaacattcaaatcatcacaaggccctacctcacttactaatagaaataccttgtttttgtggggacccttcattcacatggtgttttgctattgtttaaacaagtactctgaatcttcatcctgttgcttcagctgatccctaactaaagtgtgatccggtaggatattggcgattgattcctataatcattgaagatttgatttagtgtttatactaaaaataaatctttgattcacaaaaaatggcaatgaaagagtaaacactatgtttaattcttttgtgaaaggtctatttaagactgaacaactgcttttatggcatcctgtaatagtgtactaacttagattaaggtattgacaaaactagacctacacaatttccatttccaacttaagatgcaattatattgtaattaaggaataaggatgatgtggaacctaccatcataatacatctagaatgcaatttcctcaagcacctgaagtgtcttttcatgaacctggattagataaagcaacagagtgaatcgtttgaaaaaggaaacgtagaatagaaaaacataaggtcggttccaaagaaaaagattgttgagcatataagtcaataacaacttccataaagaatacctaatcaaagaaagaaaaaagaacctgaggaatttttgtcaattagtatctagaattttatgaagtactaatattttgacggggtaaagagagcagaacgtcgagaaaaaggaaaagttacccattctagatgttgtgctgtgataccgggaacattcccagcatatataccacccaagacctggacaattttgaacagtgaattgaccatattagattggattaagcagtacttgtttatcttattatagtggcctgaactgatctaaaaaggtatatgtaaacaattttaatcaaacagcaattgatcaaaattttcagttggacatgacatcccccaaaacaaagccattgccactcacaaggcatcattaagtccatgttttatccatgaagccaaaactcattaagcatgaagcaataattagctttaccttggttacagtctcgagaaacatgccagggcgaactggaagcggctttcttcccgacacactcgcctggtaataagtcattcgagtcaataagaataataaccataattaagtatgtctaacaaattttacattttaattgatacattacaatacaggagttctcagactcacccttcccctgagtccacctgaaaactgcccattagttgtatgttcctcatcagagccagcagtctcagcaccttcgtcttttccttgcatcacattttttatcatctcctgaacagctctccctggttttaaagcaaccaattttgttaagaagttcacctgcatggaaaatagctttaatcatgggaataccataatagccagagtcataatgccttacaggccaaaaacccaactaggtaatgttaggaaatgctttaaaggccttatgatgcaaaagtacatacctctgcttctggaagagtacttaaaccgcggtcatttctctcgtctaatatgccacctcccatcatattccgagcttcctctctaattaaaactagtcttgcgagcaattttcgatccggaacaaaaggtcgtgtttccattgtcttcaaaagaattgatgaacttggaatcaatacaggagaaagtaaacaatcccgcaaacacacacccacaccaacaacaaaaaatactgtagggagaaaggggaacactcaatcttaatgcccggaccgagaacttcaacaacagtgtcaattgcagctatgtcaaaacctctatcttctatcctattgtaggcccgcataatatgatttaatggaacacacaataaggaaacaaagggaatctgctctatcccaactacactaagttctataaagatctataatgctttaaaattatcatgaatgacaaatatagcaactgtccagcacttggccaaagaatccaaatttctccaatttctactcatatatgttgacagtatttgcttcactaacttctgtaagtaaattttgctataatgtcataacaaaatttctggccatcaggattattcctatgatttagtatatttgaattattcaatacaatgtgcagtataatgtgaagcaggtgttttattaataattacctccagtaagtcatcagcttgattagcaatttcattcagatttgcagcaggaatatgaactttagttccatttttactcttaaacacaccaccgccagcagctactctgcgtaacagttcctgtctgctctctttctgaggagttctacacagcaggcctaccacttgaacctacaaaaaaaagaagtaatagtttcattataactgctgaatttaattgaccataactgctgacaacatatcaccaaattaaagggaaggaaacatgaaattcgttccaagtaatagttcttacttgcgggggagacttttttgttagatgggataatactgtctcctttatcacttccagtagtgacttgcgctgaccaaaacagatcaagaaccagataaataagctaacatcataaatttctacatcatttagtcattctagtggtaataaaccaaaagttgtgtactccaaaaacatcattaccaacaagaagcgtaaatcaactacaaaaacttgtagcatatacctgtcctttccaacctccaccaacccaaaactaacaaccaaacaaaaacatgtgcaatctagaaaccatagaaatgcaagagcgaatgagagcacttaaaacgataggtatcaatcaagaaaagctgacttaaaattctagaggtcattgtgtttgtgttagaatcagaatatcctagccaaaaaataagttccatattacggaaaacagaaagatgcaacatagaaagctgaaatagaaccttatcatcttggtcattttcagcaagttggatcatgtagtccaaagccatcataaaaccagattccatctcatcaactctctttcctatgaccccttgtgcagccagctccacagccacctcttcagatgcctcgtccatgttcatatcttccaactgtagtcgcgcacatacacacacaagcaagcatacaaactaaatttattgcagttaaacttacaaatcagattcattgaattcttaataatattaatggtgactggaaatgaagctattatataattattatatcagttgcatatatatacagcttgtagctagagtacacaataactaacctatccaacttgtataaaaggagaataagtgagagagtgacaacaataatatctactaacaataagcaccaaatgtggggacattcggtcaagtgattgactcggatgtatctcttgttagcatacatagttagttagctgttaatgttatctgtcttaggtagcttgagggtaacttggtagagttttttttgcttaactttaaataaataaaggctttgctgctcaacaatttctatggtgttgagcctttcccttattcattttcaccatctcttaattattaacatctctatcacaatgttccaatgcaccagaccagctcaaaaagagcatcaaagtccagctaaaatgaaatcagaaatgtaataactaaatttcgtagaatgttactcagccaattgaaccaaccgtgcacaattataagaggtcactcacaccagataaaccagaaactgatggcgttaattgacgtacttataattgtttgaataatcttaaaacaccatgggcaatcaaaaaaattgtttgattaatcatatagaattgataaaacacaaaacacaatctttccatagtgcaactttcttccattatcaaggattaaaaaaagaatagaaactttaagtgaatgaaataataaaaacaagagagagagagagagagagagagagagagagagctcacaaggataatac

SEQ ID NO: 184384 - DNA, 2322 bp, Cannabis indica
ttttttaataaatttaatatttttatctgattctttaaaaaaatctattgttttttttttcaattaatagaatattataaatgcttttttaaaaaatagaatattataatttttaaaattagttttttttttaataaaagggggctaaattttgtattagttaaagttaaaggagtaaaaatgttaatttttaacggagaaattttaacaaaccgtatattttaagggacaaaatcaaatatatgtatacataacttatattttaagggacattattatacaaaatcaagtagtgccgaaaatactaattatttataattatttcacgtctttaaaaatttacgtatatttatacatataataattgatatattcagtaagatttgaaattttgaacattaatttttattttatgtgctaaaaattgtgagtgtattcatttgaactttattatatttttattagatgtgttgttaaaacttcaataagatattatatttttattgtgttgtgatgaaaattttgtattattatttgtttatttagtgataatgtaaacatcccacaccacaccacctttttgcgtttgatttctacagttttgaggttttatggtgtggttacgattcgagaaattataaaaattgcatgtcaagattggtttgagaaaatagtcataacctatatttttcgcacagcaaacacccctaatgttgatgttgataaatgatttttgtaaactatgttatgtctagaaaatcaaagtttaaggtggagtgaaattatatatgaatggactaaaatatgttaagtgagttggagaaagttaatggagaagaagaattacgaatttctattactctcaaaatgccttggttataaaaattttccaacctagctccttcacattttgaaaaatggggtacttataggtgagtgctattggctctgatttacaagatgatgccctagtggtcccaagacgataggaaagatgccgtattcttacaagtgataggttgaaaaaggtggtcttgtgcaaagtagtggttgtcgggtgtcagatggtcccaaagtgtagggatagttgttgcagtgtacctcttgtcaggacgtcaaggcgtgtaagtgaggcgcctccactactcgttctctcttgcagtcaagccttgtaagtggtgtggtcataccttgataaatacttgatcacatgcatgccttgtccttttattcctcgtctaatggtttctttcccaatacttaggaaaattttactaagcgttggcttggaccgagatgctctttaggtaaggggtcaagatggtcttaataaataaaataattaataaacttaaagaacataatgaaagaaaaaccaattattcccaagatcattatattaacgatttcaatctcaattgtttgattttaattgtctctcattttttagtgggtgtctctatcaatggaaacaaattagttttttttggcttctttatatttaattggttgataatttttttttgatcttcattataattttggtcatatatattcaataaaaactatatatacctggtagaacatccctaaatgaaattttgggaactaattaagaccccaagacaatataactacaggcagacaacattgctaaatgaaagaagtagcaattttaaacccatcaatgcagcaatagcaatttttaagtttgtatttttaatgtatttctagttcttgttggttcttagaacagtttttttgatagatgtcaaattgttgtcttttgaattattatttaattggatgaattggtgtttcttttgaatagtcacaattactaattaacaatgtcaattttaaactgttaaaataaacagaaaatatctacaacaaagatctgttaaacacaacaaattccatccattaggcatttattatatattatattttttgagttacattgtattttgtgtattttagatacaagaccaaatatagcattagttaacatttttagtgccaatgttgatcaatttacacctttacattattgcacccaaatatcatgcatgctcaaatcataagcttctcgacatcaaagtcaactagagttcttaagtcacatcatgatgcccttttttactactttaataatgcaaattatgtaactatacatatgtattattgctaatataattacatttgttttcgttttatcctgccacaaacaaagccaggacagctcacgagttgcaaggaaataacaaggcaacacaataatttgtttaagttgccagcataaataattaaatttaattt

SEQ ID NO: 184385 - DNA, 3827 bp, Cannabis indica
tttcttattttcttgtaaaaattgtataaatgaatagattatgctttattaacataccaatatcagcatacaactcataaaagagaatcaatttattaattaaactaaatccactaaaggacaaactactaatggcaaaaagactatattgcccttcctttaccaaaaccacttaaaaggcacaaatgggtattttgggaaattctaaaatcccgactaatcccgacattttcaatgtctaactaaactgccccgctatactaaaaatataggatgtgatgctaatagccaaacaccgcgtttcaatgttgtcgggcactgaaaatgtaaaatcaatttctatatgtaacacaaaaatgtattctgaattcaaataaatcatcataagttaataatttagaattaataaataatttctataattaaaccctaattatctgctaatttctaaatttaagctaagcggtctttacaaatggtgttaattgctctgttgatactgctcaaaataatgttcttttacagcctattcaagatggggaggttaagcaggttttattccaaatatatcctaacaaagcgccaggccccgacggcatgggtccaagtttttatcaaactcattggaatattgttggtaaggatatcattcaatttgttgaagaatttttttatactggtattttccccattggggccaatgatactaatcttgtcttgatccagaagaaaaaaaatttctcttctatggttgatcttcgtctattgcactaggtaatgttctttataaagtggatggaaaagttcttgctaaaagaatgagaaacattattgacaagtttatctccgacatgcaaagtgtatttattcctggatgattgatctcttataatgtcatggtcgcctttgaagttatgcactatttgaaagggaagacaaaaagaaaaaagggctatatggcaattaaacaagacatgagtaaagcctatgaccaggttgaatgggactatctttgagctgttatgtgaagaatggggtttccagacagatggatcaatcttatattgcagtgtgtttcttcagttagatattccattgttcatagtggtcgtgtcattgggccaatcattcctacttgaagaattcgtcaaggtgacccactctccacttatctcttcattatttgtgccaaggggttctcctctttactagaacaattcgaatctaatggcatcttacgtggcatttgtgttgccaatcgtgctccctctattactcatgtgcttttcgctaacgacaattacttgttttgtcaagctactcaaggggcagctgctaatcttctcaatctccttcactcctttgagaatgcctcaagcaagaaagtgaatgtttccaagtccaatattttttttagtcctaatacggacccccttctctgtgaccacatttgcaacactattggcatgatggaagcttctgaaggcagccattatttaggccttcccaacatcattgaccgtaataaaaatgctattcttggtttcctcaagaataaagtcattaatcgtctaaatagttggcacgataagttcctctccagagcaggtaaggaaattctcctcaagacagtgattcaatcgctccttacttattccatgagcgtctttttaattcttattggtacttgtaaagagattgaaaaacttatggctcggttttggtggaaaactagtgcaagtaaaggtaatgggatcatttggatgtcttgggaatgaatggccactcataaacatctaggaggtatgggattttgacatttaactgacttcaatcttgctatgcttgctaagcgaggttggagattattatgtaatccaaacacacttgccagccgggtataaaaagcaagatattttccccactctggtattctcaatgtggatcttgcctccaatcccaactttgtctggcaaagcatttggagtgctcaaaagataatcaagttaggagcctgtcacaccatacgatcaggtacaaataccagcatactacaccacccgtggcttcctgacaagaaccaaccttatgtcacaactcataatcctgacctgttaaactagcaagtttcctctcgtttctccactgatttaggcagctgggatcaagacctggtctgtgacatgttcaattccagagatgccagtctcattctcggcctcccactgagcattacggatgaaggcgactgttggtactagattggtgaagcaaatgacagcttcagtactagtagtgcctacttgttgctacagaaagaaaaggcaatacgacctgcaataaacaattttggcttttggaaagattgatggcagctgaagataccacctaaagttaagaacatgttgtggcgagccttaaaaaattgtcttcctacttgtttaaaccttgtcactaaacatatgaacatttctattctctgccctacgggccttttccaacctgaaaaacactgcacatgctcttatttattattctttggctgctgcttgttggcaccaactcgtagttccttgtccaaatcctccaggtacctttccctcttggctcaaacacatttactcgtctgtagctactgaagatgtgtgcaaaataggaatggtttgctgggcattatggaaaactcgtaataaaaaagtttgaaaaaaccaaacctcctctttgaaagaggttatggtatcagcaactacttctcttgatcactgaagaaaagctcaagatattacttgtctttcatctatattctttgataatataggggatcaaaatgagctttgggttaaaccagaattagaaattatcaagatatatgttgatgttactttattcgaggaagaaaattcctatgggtttggaattgtggcccgtgatcatcatgcttctacactccacattcaagtcgtgtatcatggaggctattttctagctgaaataattgaatcaatatgcattaaagaagctctcagttggatgaaaacgaatcactagaaaggcgttatgatcgagctcgccgtccaagcaattcattctactcagtgaatgacttctgtgttaagcttagttgttaatgattgtagaaaattagtatcctctctttctgatgttcatttacgttttgttagacgatcaaccaatcgagctgcccactttgttgctaggcacgttcgaattttatctggtcgtagcattcttgggacttctattttctctaatcttcagactattttgtattcgaaatgttaaattaatgaagttgcaatttcatgtcaaaaaaaaaaatacttaattaaattttattactaattaattcacttttcacacttaccaaatctaagtttttaaaaaattaaatatttatgtaacgttttatttttatttttgtaaaatgtttatgtgcgcgtgtgacaatctgttctaccaaccaatacattttccatgagtttcactatgtgatatagagatgtaaatataaaaatattatagtttcgttggtgtgatatagataatattatgtatttttcatatataatgtttgttgatctgcaaacaaaaaatcgatgactacaacaattaaattctaatttgactatatcaatagcatctcttttcctttttcaatttaattatattttacgtttctttctattatatttgagtaattgagtctttttcatctaatgtgaaataattgattactcaaaataatcgtcgaacacacacagaagcttcagtttttcatttctgcttagaaagaaagaaaaaaaaaa

SEQ ID NO: 184386 - DNA, 4326 bp, Cannabis indica
aaaaaaaaaaaaaaactgtctacaagattttttgtacagtttacaaacagccacataagagaatatgccaagggcatttgcacaatgccttatttagcagtatgacatgacatggatcatgaatatggcattgccaatatgatcccgtttcagcgaggcacattccacttatgaactttaagatctattggcaaaaccatatttatgacaagtggaatgtgtactaaaatagttacatgatgaaaccaatacttatcaacggtgcccattaatagtgcagcagctaacatgtatattttgatatgattttaaatattatattctacttgccaaatatgtaatttggaacaacacacaattcagtcctggaaataaagatgttccatacttctgcattattatggcttatatatacattgcaggaatcattcattactcataacagttaaagattgcatacattatatgctggcaatcgtgttcctcgtgcaattgctgctgtgtaagggaaacatcaaaaccctgtgctgggagactgaaaagctcacgaagatcctgcaaagatttattccaagacttaactcattttaataatagaatttaaaaaccaaggatattacttcaatataacaatcttcatcaaaattacctgttggctaaagtatctggtttgttctttttgctccgttgcagttctaaacaaacctcccttgtatatctagcatggattatgagaagttaataataccaatacaattatacctggcactcaaattctaccaccgaagagcactcttaaaatatcatttattctatcctttaaaatatatcaccaaaatccactatttctattttacattattttaagaattaacctaacatcatcttgtttattttttcgcatctttttcaaaaagagaaagaggtcatttgtcttagactgaacccccaatatacatatattaagaacctcacttatggcagatgaataccttggtaaaacaaaaattagtataataaaagaaatataagctcagccatcataacaaaaaaaatcaccaaatccattccctactcaagtctagaaaggaaaaattctcaaaatgcttagttcttctaaatagtcttttaaatattatattttttcgtatcttttaaatattatagttcttaatattttttattcattgcagaaagagaaactaattgggatgaatagtgttctataattttattttatttttgctgaaagtgttctataaatgtaacggatgtactgtaagtaaaatttaaaaattctgtttacaaatctaatggagggttcttttatcatcaattttttatattttaaggaactaatttagaatatccattgtaagttttctaagtagaccaattaacagtaattaaattctttaacctgctttctgtaaatcttctcttccactgtcccacatgtcattagtcgatataaaatgacatccttcgttttgaccgattctataaagcacgatcaacactttggttatccgtactgcaatgttaaacccaacagttaacatttgtaatcagataacacaagtattattgtgttacatagtaaagtaatagggaacattttgtagggaacccgtgaaccaaaaattgcagcgagtactaaaacccaaaaatgtaaccaaacagagcacaaagttaatcacaacaacagatacatagttccaaagcatctatatcctccaaaaaatttgatcttgcaaatccctttttttaggagagaaaataagataacaatatttcaagaagcaccttggattccatgcaggatcaacaacaatcacacgatctgctcttgtaagtgtaaggcccaaaccaccaacttgagatgttaggagaaatatgggcgccccaaccccattttggaaatcctaacgatgaaataaaatgacattcttagatagtttaacaaaacattcatcatcactggtatatcaattgtacttacatttacaatcgtcagtctgtcacttgcttttgtggtaccatcaattcgtaagaactcataactgttggacattagtgcttcctgcaaataattatattgttacacatcatacaaaaaaatccaatggcatgaaggcctatacgtagagcttattggtgtatacacatgtaaattacatcatcactgacaaagaaaaattatcaattctttctgagcatgcaaaaactgtcttataacattagaagcatgaaagctttcacagattgaatagggagctgggctatttgttgaacacttgacagacaacagcaattgggtggaatttttccatttattcatcaacaagtagagattcgagttgtttcagatcatagtccaattctttttcaatttacaccaccgaataatataggctgttcaccttttggatttgaaagtatgtgactggataataaagacttgaataaaaacttataagttagtgtgcccaggtgggaaaggtataaattcatgtccagaataaatattacttattagaagttttagtttaaaaattaaaagcttatgtagattgaaattttcttgatataagttttatgaagtttttgttctctgttgaggattatgcctcggcttcccacaacctggccgagctaaagcaaagcaatacacatcattccccaaaataatatttttaaactttgtgcataaatatagatgaaataatatcatccagctgccccaaaataaaacatcaaactgaaacaaatgtaggactaacctcgatgagattaagcatcttgcgtgtctgagaaaatatcaaaacattatgcccctttggaatcaagtcatcctgaaaaagagcattgagcaatttatctaacatggtacccagaaaatgcaaatgtaaattttagctcattaatatgtgcagcatctcaccaataaagataatatgaaagatattttgcatgagatgttcacgtggttctcttcaaagccatctttctcagcagcatctgctatgtacatggctaacttttctgccacattaacctcttctggcttaagcattgtatccatctcttctagaacatcttcagcagcacgctttgtcaacagaagtggatgatcacaaatctttttcaagatctgtttcatctcaaaaaatatatataataagtaaataaatacaagattaatcattctcttgctaaaaaaactaaagatgacacaacttttgctttctatatgagatgatgtattaacctcttcttcaatagtatattgcaagttttatgtaaataaaatatttgcataattgcaaagtactcatatttccaacaatgttaaattttgaataacccaacaatgttttaacataagtcattttgccaaaatgattttattttctttttaccaaagtaatttaaaattatctgatttcataattactctttttttttaacaacatctcataattactctttaaatgtattaaatgatctataaaaaaataaaaaacaaaacaaaacaaaaaaatacataaaagaccaaccacgtgaaaacgaaactacacattttgaaaactaggtatcaagtgtgactcgtgacagaataactttgcaactcatgacagttcaaacacaagtgcttgactcaaataattaaggaattgctgcaaaaaaaggttatactgcaccaaaaaacagccaattaattgagtcaagcacttgtctttgaaatactacaacataatcaagtttaaaatagcataatgctttgaaacactaaacaagttacattttgtgataaacaaattacaaaggaaaaaaaatatatatgtataaagaaatatttacttatattttaaattgtatgtaaaaaaaataatatataagaatagaatatacatttgatctattgagttttgaaatataattgtattatatgtattcgacttttaaattactattttctttacattaaaatattatttgtatatataattttttaatttttttataaagatgtatggattggattggattggatagattacttttacatatcaatcaacattcaatctgcacaagtgcggattttgaattttctaatctaattcaatccgcaccgagtgcaaatatttgcacttagtaaattagatttgattaaatcgtacgaattaaattggatcgtacggattagattagattgtaacttagtaacctaaaattatcacttaaggagcaatttatggagtgagtaatagtctttacacaaacaaacttgatacacattgtagtccaccttttaggctaaac

SEQ ID NO: 184387 - DNA, 1741 bp, Cannabis indica
acggctaatattcattactcaacaaacatcaacaaagtaaatgaaatgggtccaatgtcatgttacaaaccaatgtttgtgttgtttttatatttatttattagcaattaattaagttgttccattactattattgggttagtgatacatagaaattcattaatattattggcaggttgtgtgataatggattctgttgatctatagtcacgaagcaaagtggtagttatgaatttatactcttcaatttactgtggagtagtcatttatgtgtaaacaccaagatctattaacaaaaatgcattttctcattgaatcaccaataattgaccattcttgagctataagaaaaatcgttactgtacattctccaaatagttttcgtttttggtttgcgttatcttttatttactgaaaccaagattaaatagtactgaatgccaaacatttccctttcgatatttttctaacaaaaaataaacattctctttttatagactacatgagcaataagtactagctagatgtatatataccttatagatatacgcatcaatttattagtcaaagccccattttctttcccattgtttgtattttttgcttggagaaagccacacaaagaaatcttaagctttcgatcatgtttgacaacagtactatatatactacttgagtatagtacttttaaagttacaaagtaattatagagacatgtgcccatatatatgaattagatttacttattcttattttcttgaattatatatgatgtcgtatatatatatattttgaaaaaacaaagggagggtaaaattcgcatagacaaagaattatgttgaaacagcatgcggctttgtggtcctgtggcccatataaaaggggaattagtgtagggatatatgcccttatagaaaagctctctctcgacataagcactgtttggacatgggatttagtagggacaacaaacaaatatttgattggtcagcttcttacaattacatggtgtgagtgtggcaatgtgaagggtccaaatcgatcgttgaactagtctcaaaaagggcttgcaatataaggtgcatgccaatgctcccaagatcccttttaaaccctttttctttcctattctctcatcaagtctctcttttattatttattgctttccaaaagttaaaatcatccaaacgaatcttatatatacgagaccctctccctttttgccttcggcttcatcttgacatgtctttattatgtgacgcattattttggactcatctagggattatatacgatccagtccccttttgccaccaatatgtggtctgcaactataaaagaatcaaccacatttataatttgcatttctagggtagtagtagtattagtagatgtttgtgtattacctggtgtttataagagataattaattacttatctttttattacattataaactgaaaatgtggtcaatgtatagtaacatacatatatacgcatacaagagacaattataaggagtggaaaaagaaaatgaatagaatcccatatatctttccttatcttttccactttttgcctcgattacaaaacaaaaagtttactacttaaccccccttaatatggttaattttaatgacttaaataatcatatcaatttggcttttgcatatcattacacccaaacttgaattgaaatgttgagtagtgacaagatcttttgtttttaatatacatatat

SEQ ID NO: 184388 - DNA, 1875 bp, Cannabis indica
acaagaagaggaaatattttgattccctatgttttatatgttccatttagaaggtctaggtatgaacctgattttataatgagaaccaactagaatacattataatgtatggcattatatgcttagcaatttagcattgcagctctatcttagtttccagtttttttttgcttgacgatcactctgtttaaaggacaagacagctcataaaatgaaagtttgtcagttgagaataacgtgatgttttcttaagccagttttcataacttttctttccttgctatttcttcacattattcccttggcattatgcctcttggtgatacaatctcatttttttcacttgaaaatttgggattttaagatgacgtttcactgttatacaatgcctcccaggcttgaaataagacaggtgggtgaagggattcatcacgtgccagggcttgttgaggcgaatgtaagcaacatgaatgaagtctgggaagttcttaaaacaggcagtaatgcaagagctgttggctcaaccaatgccaatgagcatagcagtcgatcccactggtccgtttttcttgtttaatatatattgaaactttcaaataacaagcaagcagtatgatgttagattatgatttgtctgcttgatacagcatccactgcgtgatggtgaagggagagaatttgatgaatggggaatgcataagaagcaagctatggttggtggatttagcaggaagtgagcgaatagcaaagactgaagtgcaaggagagcgtctcaaggaaacacagaacataaatcgatctctttctgcgcttggtgatgtcatatctgcacttgcaaccaaaagcccccacgttccttttaggttgttgataagacacttgtttatttactttaaaaactgaataaggaatttctctgtgtctgtattctgtgcttatttttgtttttctgtactttgtaggaattccaagctcacacatttactgcaagactctttaggtacaattttttaagttcaagcaaaacgacttaaatttctgacaaacttaattgtatcatgagttagtttacttttctactttgcaatttggaaagagtaaacttctgttctatattttacaatgtaatttcctgatggatgtctgtacattttttaggaggagattcaaagacacttatgtttgtacagatcagccctaatgaaagtgatttgggtgagactctctgctcactcaactttgcaagtagggtaagaggagtggagttggggccagcaaagagacaactggacacttatgaatatttgagatacaaacaattggtaagagttgcttgttattactctattttttctacattgtaaatggttgacttaactaggcaatgtctagctttaacattttggagtattttacatcttaggctgaaaaagcaaagctagagctaaagagcaaggacttgcaaatcaagaagttggaagaaactgtacagggacaagaagtgaagataaaagagagagattttagaaacaaaagcctgcaagagaaggtaatatatttgtagtcggtaagcttttctccagatttttgaatagatgttaaatctaattacaatccactactaattcctttctactttgaatgtgcattttgtgtgctatcaaaatctattttttaggtaaaagaattggagtctcaacttctaattgagagaaagctagcacgtcagcatgttgacacaaagatagctgagcagcacatcaaaaatcaagaagaacatattaaagcaccaatcagaccacctcttggaagtcggccattgggaagtctcaagaatgtcagtgacccaactactgctcctgtcaaagatcaaga

SEQ ID NO: 184389 - DNA, 2869 bp, Cannabis indica
caatcaggtaacatacaaaacattgtaactaatctcttcagttttttatcttctgcttcttctctttcaacaggatttttttatctccactgttattctactcagggttttaaggaacataattttgagttcttaacacactactcacatgaagattaatcctgaattttatcaatttaataagtggaagctacacttgctgtgtgttttcttgtgaaattttcagtttttctcatcaatatatcagattggtaatggaggtattgcttggtcttggagattgacacaatgctcgcaatggcttctgctatgatttttgtccccaacaaggttttacttcttacttcttactgtttttcatttcttgtttgcccaatttttacttctgtttaatacacatgtctgtttggtttctgagaaagtttcatagattagatgactattccatagttgatttttaccctaaaacttagagcttgaatgttttagtttctcatatggtgaccttttcttttcttctaatccatgtttttcccaattcaggttgtttgattctttctctctgaagattattttaagctcttagctctactttgagtgtaaaactatacaagatgtacactaatttagctaagactcctgcatttccattggctgtgaggacttcttcacaaaccagttgttttaagctgttctccacaccaaagtcacaaactttaccaactgggtcttgtcccaaaccttatcaaagatctgattcggtcatttttactgtttcgccatttgggtctggttgcagaacagaaaatatgaatttttctgcttgttcatgctctagtatagcaaaatcaaaggatatttcaggtgggttttggcttaaaactgttactggacattctgtttcgatgaaaggaagaggtttatcgtattcatcagctcagaaggttaatggaagggaacgttttccaagagttgggaagaagctcccttggttgtcctcgaataatggtaatagaacaaatatagtgaatgaaacgcctgcgaagactagtagttcgtcttgggaggtatctgcccggaaactagataatagtagcagtaagtcttcttgggaagaatcggctagtagatttgagaagcagagtagcgagccttcttcagacgaatttgtaaagaaaaggactgcatctctggtggggagtagagaaagtaggtatagagaggcggatgtgattgaggatgatcaaagagaaaacaattctagggatgtatggtataggaaaaatgtaggagaagtaactgaagaagttgaggctgttgatgattcgagatggaataacattaaaaataggtacaggggagtggtggatgtaaaagatggatatgagaaacctgaatttcgaagatggaataagcaagagaattggggtaggaagacatggaaagaggcttctgaatcatctttgcctaagatggttggtgaatgtatttatggggttggtccagttctggctgctttatcagctggaagaagagaatttttcgcattacatatccaggaaggattggatttgagtagtaataacaggaagaagaaggacaagaaaggtttcgagaaagtgttgaagatggctgaaaaaaattggtttaaccataaatgaagtgtctaagcatgatctcaacatggttgtagataatagacctcaccaaggtttggtactcgatgcttctccgttagagatggttaagataaaggaattggaccccatatcaatcgaggaagagaagaattcactctggatagctttggatgaagtcacagatcctcagaatttgggggcaatcattagatcttcttacttctttggtgcttcgggggtgatcttatgtgcgaagaattcggcccctttgagtggtgttgtgagtaaagcaagtgcaggttcacttgaactgatggaactaagatattgcaaaaatatgatgcagttcttaacatcctcagctgaaaatggttggcgagttctcggtggttctgtgtcttccaaagctattcccttgaatgatgttgtgccgggtgaaccaacaatcctagttttgggtagtgagggtacaggactgaggccattagtggagagatcatgcactcagctagtcaagattccttctaatgttcctgttgacttaatcccgggtcaagatgaacaactcgaaacagcagataacagtgttggaggctcggctaatgctgattttcggtcatttttggctgtggaaagcttgaatgttagtgttgctgccggtgtgcttattcatcacttaatcggaaatgagtattataagaatgattccaccattgttgatcagcaaatgaacacagttgactgagaatcaagctagcctatgcactattgtttagtttttatttagtatttcatagaatattgatgtctttctattttactttttaccatattggttatttaggatcaattgataacaaaaaatggaaagcaagtttagaattttgaccttttctacacctctaaagtgtgaaactatggaaaataatagggattatttcatgaatagataaaaacaataaatatgattttaggaaattttaaatatttttatgagtttatttacaaaaaaaatatgctatggtacttttgttaatttatttatgatgttttattatttttttgttgtttgttgtttttatgttattttcttgattgttatgtaatttttttgttattttcgtattatttaaaaaatttaaaaattagtgcacaatctctccactaatggcatcatcaaaaaaaattatatcaagacatatattgagagttaagtgattgaaaaaaaa

SEQ ID NO: 184390 - DNA, 2602 bp, Cannabis indica
aaaaaaaaaaaaagactaaactctacttagaattaatatttaaacactaacaaggttagcttggaatatgtaataaaaacttgaaacccaattagataataagtaagagagtaagcttttatcaacataaatatttttttttagggtcaacattgataaattttagctttagctttatgtctatttttgttatatcattgttttggagtagttggcattgttggaatgtgatcagaagcactcattgtaatctttattgctccttctccttctaagctgttctcatcatgaactaagcttttggtctcttttctattgccccacaagaatgaatacaatccaaatatgattaacaccatcccaatcaaactgcaaatatgtatacacacttagtgtttaattgggtatgtataaaaaaatgtgttatgtatataaaaatatttgataaatacttacgttcccgttgttatggccacacctagtatgattgcctcagataaagatacgaaaatgagtgtgagcgggttgaacattgagggataagtggcccctttaattgagattgcccatgtcaacaggcaaaatgtcgcggctgtagcaagtgatccctataaaattagattatataataatgttaataaggctttttcaatcctttctttagggtgacgcagacgagttctaagcaaaatttgaaattagtcgtttcatacccgtctttaagataagtcagactatgccccaagccctcagaatttcgagggcctaaaaataaaaagattgtgtatgatgtaaacataaaaaaggataatatatttatatttaattgtatcataaattataattaacataattgatggagttgacttataacaagtcaataagtaagtcccttaaaatatattgggcctaggtctcgtccaccccactctaagaatgggcctaaaaaggccttatttagaattttaccctaagattcgtacgctccaccctaaggacaaacttaccaaaaaaatatatatataattatataagcttactgagtaaattatagtgatgagttgtaaattccagcctagtctccatgaagctacacttctatctagacataaaccaacaatagcagattgcagagctccaataagacatgtcaacattgttgaccaatacttatatggaaatatttgcttcaacttaacctgtattttataacacataaaaacataaattagaagtcaaataagtaaaaatcctcttaaccaaaagacataaataaatctatatataataaaggtacatacttgtataaggaaccatgtagaataacagaaacaacttccaaccaacatgagagtgccaagtggccaatttgtatgagttgtgttaggaatgatatgagagtgatttgtagtatggtcatgatgatgatgatgacttataatgtagtaagcttttcctttgtaaagactagttgtaagagctccacctacacacatcaatgcccctatacatttcactttacctccttttgtatctagattcaacctctctaatctacaccaaaacaaaattcttaattaattacacatatatcatacacatatatacacatatttatgtaaatatcttacttgagtaggattgataagacaaatgtgacaataggaattaaattgaggaaatttgttgcataagtagctgttgtatctcttagcccataatagaacaatcccatagcacatgttaccctgcatatacatatatatatatatatatatattattcaatttaagtcatgaaaagcaaataaaaatctgaaagtgacaaaaaagagcattgagttggccatttcattttcatcaagtaatcttaaaagtgaagctgaatgatgtagtccccaatctggtggaccagaccacaagaatataagtatatattatttttttcttcaatatgtgtcagttatatatatatatatacatgtatatttttattatcataggatccaatatgataaatatgttggatgaaagatttttaattgatttgaagacaaggaacacccttaatttaaaaagcacttttggaaagagaaataataattataattcaatgaatttaagtatttgattgacacccatgttcaatttaagtaagaaataaataaataaaattactaatatagaataaaatccaaaattacttttgatcatgagtactagaatttcagtacatttacataaagctgtaatctttatatatgtgtggttttactatcattaattatatatgccatctttctagaataaagggtatatatatatatatatacatatatgacacagaatcatataattaataataaacacagcacattggatagaattgaaaaccattttgctctgcaatgcatacataatatggtctgtttatctagtcacaacacataatacaatttgtgtgtatatatatatataatgagattgatatcattgctttttgaagaaccaattcaatgtgatgaacacattaattatatgatattaattgcttttctgaattgcattgaaaagggtcaataaaaattaaatcaaagagaagg

SEQ ID NO: 184391 - DNA, 8440 bp, Cannabis indica
ccgataatcctcttcttggatcttcattgattgaaaatgtgagtgactttcaagctattattaatatattcttttgaggatgaatacaagctttccatgtagaattatcatttgtttcttgatttgttgctatcggtaaaatctgttccttttaacttcatttaagatcttcaagttattcaccgaaattcctcatggacacagtgaaactatcagggtgcatttggatgataatgtgatgttaaggaccattattattgttgtgaacgtgataattattattgtctccttgtttttcaggctcatgtggagcaatggattgattttgcaacattggaaattgatgccaatattttgcgttggtttattccacgaattgggtatgctgtatacctacctccggttagtcctctctcctccccgccttgtgtttttccgtttttagagtagtgtttcttttcggtcaacttttcatctaagttagctcctttttcttgattgatcaccaggctgaggaagctacaatttctgcactgaagagagcacttgatgctctaaatacttatcttgcttgcaatacttacttggttgggcattctgttacattagctgatattgtcatgacatgtaatttgagcttgggatttagccgcatccttaccaagagttttacctctgagtttcctcacatcgagagatacttctggaccatggttaatctaccgaatttccataaaatattgggtgaggtgaaacaagcagactctgttccacctgttcagtcgaagaagccttcacaggtgcaagctgccaaaccaaaagccaaggatgagccaaagaaagaaacagccaaacctaaagtagagttggctgctgcggaagaagaggcacccaagcccaaggcaaagaaccctcttgaccttttgcctcccagtaagatgattctggatgagtggaagaggctttactctaacaccaggaccaacttccgtgaagttgccatcaaaggtactttttgttttattgaactacatatacaaagtaagacaggcaatcatttctgacttaggtgtaacctagtctgagaataccctcacacatgaaaaagccttgacatttgtttttcttaaattatatgtatcaccttgcaagtttgctgagcactctgataatggtctgaaaaggttttcttttgacaaggatttctattagaagttattgtgttttgttccttatttaatgaaattatggcattaatagtaagactgaagtatcatttcttaatgttatctttcttttgcaggattctgggacatgtatgatccagaggggtactctctttggttttgtgattacaagtacaatgatgagaatactgtctcatttgtgactttgaacaaggtgggtggttttctgcagcgaatggatttggctcgtaaatatgcatttggaaagatgttggtgattggttcagagccaccctacaaggtgaagggattatggctattccgtggacaagaggttcctcagtttatcatcgatgagtgctatgatatggagctgtatgagtggcgcaaggttgatattaccgatgaggctcagaaggagcgtgctagccagatgattgaagattgcgagcctttcgagggagaggctttattggatgctaaatgtttcaagtaatgagagcattttctacacttttgtgtcctattggaaaatcatcagattttatatttccaattttccttttcaacgtttattaatttagtggcagtcctttctgtggttctgttaacaatttctagttctgtttccaggacagtgtaatttctattttattacaaaaaaaaatattgaaactattgtgctaattataattttctcagagatggtttggaagcaagaatcttttttgggtcaaaactctcaaattatatgtagcttaaggcgttgaatttaaacaaagacagttgactaaaaacaggaaacaaaaaacgcacagggtactatctgattttacttgcattttccaagttatttatttggtaagagataacttgaggccccttcaaaatttgttctatcatgattagatctataccataccaattcgtaccattggtgtgtctgagcagcattgagattgaatttcaaaagagaaaaacttcttttcttttgcttgagaagttctcgatgtgttgttttcaagctgagtttgagatgtacttgatgtgttttcaagcttaagaagtaactatggtgcaatttttaactttgtcattagacgctatgtcatattggtttggaaagatatttgtagcgcaaatatttcagttatgctaaaagttgcacttaagtactcgagttttttcagcatctagcagtgcaaatttcagcacaacttaagtatgtttaccgcaaatgtattagtaaacaaatttgttacatcgtctaataaagttaacaagtacctacgatgcagctaacattatcattttagatactttttcgtcaaaagataaaacatagtatttttttccacaaatagttcctattttttttaacacaaatattagtgagttgaaagacacaattgagagagtcaacaacaattgtccaaatttatcactataaattaatacaacattcaatccctatcatatccacctagttaaaggcgtgatccttctcacgatactcaaaaaaacgattctttcaagtgagtcaaacgatgcaccgatatttataaatagttccttgaaaaaaacaaagtctaaaaaggtccccttaattaaggatcatctgatataaaacactaactaatcacttgaacactaatagttatattctctattaagatccgatgccatctttatttctttcaataaccctttttatctacttgacatacaaagaaaaccattctaacatcttcttatgggcctcattagccaaatttgcagccacttgatcatcagcattgtacctcaccgcccaaccatgtacaacatttggaaatatctccacatagctatcaacctatatcaatttcaaattttatgtgatataaaaacaaataagcatatacaaagcctactattattatcataaataaaaagactgaaatgaccttccattccatacctcaggtttagcagctaagatctcctcaaactgtttcaagagagcgggtggaccataatcatcaatctcagcacccaaaattgaaatgggaacattaacttctgtaaatggataccattttacaatttaataacaaaggttaataatggatttcgaaatattctacacaagaatccatacccttaatattgtccaaagagacaaaggaaggatgtaatagcacagcagcagcaatagatgattttgactttgatagtccagtaacaaccttggctgaattgacaaaacaataaatatattaagaaaaatcatggtaacaaattaactactaagcaaggagaagatgacactataaacatagattattattaacaaaaactaagaaaaagaccatttgaattaccaccccaacagaaaccagctgccccaactgcagaaaaacctttggctttaatggcttcaactactgcttttgcatcttccaatcccttatcctgtgacaacattgtcagttattattagtcctatgcagagtcgatcctgggataagacagattaggcccgtgtcttggctcccccaaagcgcagggcgcataaattacacacaaatttcatacacatctatgtaaaaagttacttttaacgagcgggactcatcttaaataaagatgatttttataaactatgtaaagtttatgtgtaatttgctttgaacatatcattactcttatatatgaatttgttgggaaaaaactaaaaagtgtttaaaaagtcattactgttccatgatcttttaaccaatcttgtagaggcctattgtcatatacaaaaggttcaccatagaagaaatcaggcacagcaacatagaatccagcagctgccatcttgtctgctactaaccttttatagacaaagtagtattaaccataattgaaatcattaaccattagaagaaaattgaatataagtactgttggaaatattcaatgacttgtctttggatcttgtaaacagagtaaaattaatacagcttaataagcataccgatactgcttctctgtttgtatttacttaaaaatactttccaccatagggttgaattttcttttagcttaaagaaagtgaagataaaaaatagatagacagagttttcaaaagaattgcataccttatgtttggggcttcatatcctgtaagatggtaaaaattcaaacaagtaaagaaaaagaaatacaatagttatgaaaatatgtccacacaataagactattaattatcaagtaaatcaatttaaggagataggtaacaatattagtgggaagggtaatgaccaaaaatgtcagaaatgagaagaagagcatgtttagagttagaagagccagagatataggttttgaggcctcccagtagttcaatggtgccttctccactgtgtgggttcagagttggtggattagaacagcactgagaccctgccatttttgttttttttttttttttttttctcttgtctaaaatatatgtgcaaatattcatatgttatagcataatataataacttgtttggttttacatattgaaagtaatggacttttctctttgtgttgagtgtgtgtgtggggtggttcctttcaatgataatgtcaactcttatgttttcaagaattaaatagattttgatctatgcattcttcttctaaattaagttcaaatccaaatattatttgccaatagtcaaaaaaaaaaattaatatatatatatacatatagtcaaatggtgaaattattagtctgactagttctactgatgtaatattattattattacaatgatttgactcaaaattaattaataatttttgacaaaaaaagaaagagaccacttatttaagaatgatccctccgccgagatgttattgttattaaaaccctcacttgagtcgaagaaatacgatggatacaaaaactttagctcaaaacgaactaaaacaaaacagcaccaattattccttacaaaaattatttttgagtgattatttatttgtgtaaaaagagtattggttggtgtgttagaccttttatttgggattacattaatctttattagttttattaaaattaagattgatttatctaacaaaaaaaaaaaaattagattgattggatagttctttgatgtattagcttatattgttagtgatcaataattaatggatttaatatctatttgtgtataaagtctaattgaagtagaaatatagacttttgtagttgactgaagcttttgatgagcaggtccagtttatcctaactctataaatacatatataaatacatatagtttcatcacagttgtatatttttgaataatcagataaaataaaactgcttctgatttagagatctagagagaaaaacttagttgatagtattgcactatcaaattacactaatttctatgaatcaatcaaatatgtatacctaattattatctattattattgtcttgtacattatatataaattagtatgttgagtttattattatttatttgtgtaaagaaagtaaataattaaatttaaatataacaatactaaaataatatttaaaaaatatagtaaataattttgatatttaggagtattttttttttttaatcatgtacttgattagttaagatcactggtaaatttttagaaattttaaataatttagagtgccaaaaataaagttcaaacagtgaaaacagtggtacgtgcaataaaatatttaaacttattttcagcacgataaattatttaaaattttataaaatttaacaataaattcaaacaaaatgataaataacagtgtataatattttgatacataattttagaacacactttatttgaaagctgaaaattaattattaatcagtacttaagatagttagagaaccaatccaacattttggaatgggcctcatttgcagattttgatgctgcttcatcatccaagttgtacctcactgtccaaccatgttcaacctttgggataatctcaacatggctctcaacctataccattgccaaccattcattaatttatgcatacaattaattaatataattaaaacttattcatttatacaattcatatcaattattatcaaaattaatttagagaaagtggccactcactcacccacaacaatgtagcaaaaggaaaatattatcttaaaaatttcccctaataataaatatatattttttcaagtccagacgtgacaaatgctaattggctcattattagagttattgtgagaaaagagaggtctttgccctgtgattgatcatattttaagatgtggtcatgaataatgcctggtgttgtttattgtggtggttggtataagatgtggatgtgttcatgtttgtttctctatttatcctaattaataataataataataaataaaaaaaaaacataattaattaaccaattaaaacaaatgtacctgaggtagtttagtagctaagatctccttaaattgttcaatgagagctggtggtgtaaaattatcaatctcagcccccaatatctcaatgggaatattaacctctgtaagtaagtaaataaacaaataaattaacaaaaccatttaataaccttgttgactcttatatatttatatgtgtttatgtacttctatccaataaagctaagccatagaaatatatgtggtcaataatcatattcataaatagtgtcattatcagattatctccacttataactaatctaaaattgtttatttggttaaaagtaaagaagggtactgttttaaagctaaagctaatcatcgagaattgctaaagaggaacaatagtgtgattgcctatctatgaatatgattattgacctattatcatgattccaaacagaatttaggataatagtcataccctttatatcatccaaagtgacaagagaaggatgtaacagaacagcaacttcaatagattttgactttgcaagttcagtcacaaccttgcctgaaaataaaaacaatcatttttgctcattcttatatgattcaatattaatcaatggttagtaaacaactcactcacttaccaccccagcagaaaccaacacccccaattgcagaaaagcctttggatttgagagcttcaactactggttttgcatcttcaactcccttgtcctgtttcattaaatatgtttaaatggaaaagatagagacagagagagaccaaatagattgaattgaaaaggaatgtaatgtatacatactgttccatgatcttttagccattctagtaaaggcctattatctccattaatattgtaagggtcaccatagaagaagtcaggaaccacagcatagaatccagcagctgcaaccttgtccgcaatcaacctttttttaaaagaaaaaaaaattaaaaaattagctttaaaatgaacaataatattaatagagtagcaaaaattaatcatagcatatataccttatgtttggggcttcatatcctgtaatatcatcatcaaagattcaacatattaaacgttttgacaatagcatcaagtacaactgtaatataaatattttcgttgattaccaaaaatgtcagagatgaggagaacagcaattttggagtgatcagaggaagaggtggagatgtaggttttgaggccacccaattcctcaacgaagcctaatccgctgtttgggtccagagttggtggattagagcagcattgagaaccagccattgatttttctttttcttaaatttctctttcgttttcgtttcacaaaaaaaccaaagatatataaagcattgacttcaatgctctctttctttgtattaattttatatttaaataataataacaagggactgacccatatagaatggggcaggctgaaaaaaaaatagaaaaaagaaaaaactctatacgtaagggaactacaagtctacaagtggtaacataaaataacataaaattattgttgatacattttaatttcataaataatagagatattggttgctaaactatttaaattttaaattttttaacacttaaccacaaaaattaatttttttgaagcaaaactacctaaattcccattttgtttttctatgtactcctctgtctaaaaattacagttaagtgtcacggtagactgtccacgtgtacacacttgtacacgtgacaagtggtccacataatattaattttaaaaagtaatttaaaaattataaaaataaataaaaa

SEQ ID NO: 184392 - DNA, 13987 bp, Cannabis indica
tttttttcttttctttctttctcaactgtaatttttttgttctttcttttgaactaagcaggactctgctgtcagatataccaagtgacctttctatacagattaacaatattagctatcttcttcacaaggtatgaatcgatgaaggagttgattgttgcccaattatcctcatcagtgaaaaacactatctattggataacctttgattatttgtttattttggtgcatgtgattgttcttgttgaaaataattgtggttcttagttgcagtttgcacttcttccaaggtgtggtcttttgcaacggctttgctcaagctctgatgaatcagaagataccaagatagagcttcatgacattcctggaggagaagatgcttttgaattatgtgctaagttctgttatggaatcacaatcaatctcagtgctcacaactttgtaccagccttttgtgctgctaagttccttagaatgactgaatctgtagagaaaggaaactttattttaaagcttgaggctttcttcaattcttgtattcttgaaggctggaaagactccattgttgcactacagaccacagtgaagttacctgagtggtctgaaaatcttggtattatcagaaagtgtattgactcaattgtagagaaaatcctcacacctcctgctaaggtatgtacaaaaacagttttttgatggtgaaattgttaaattgttaataaaaaaatggtgattatatattctttacaggttagttggtcctacacttataccagaccaggttacaacaagaaacagcattctgtccctaaggattggtggacagaagacatatctgaccttgatatagacatgtttaggtgtataattactgctatcagaaccataaacatcctaccatcacagcttattggtgaagctttgcatgtctatgcgcgtcgctggttacccgacacaacaaagattaagcctccagagagctcagtgtctcaagctgatgaatcaaatgaaaggagtagaagaattcttgaaaccatagtgagtatgatccctgctgataaaggatcagtttctgttggtttcttgatgaggcttgttagtactgcaaactatctaggagcttcaccagtgacaaagacagagttgttaaggaaatgtagtctacaacttgaggaggcaactgtagaagacttgctttttccttcacaatcatcccttaaccaacatttttatgacattgatttggtttcagcagtagtagaaagtttcttggtgatatgcaaaagacaaccacctgctactgtagaaagcagccaatttcttagatcactgagaaaagttgggaaactcattgattcttatcttcaagttgttgctagagatggcaatatgccattattgaaagttgtttctttagctgaaactatcccagatattgccagggaaaatcatgatgatatctacaaggccattaacatttttctaaaggtaaacataattgatggtaaagaaagctttcatattatattctttcaaaataagaactttatgattgattcttcaattactttttaataataagcaggagcatcctgacttgaacaaggcagagaaaaaacgactgtgtcgaatcttggattgccaaaagttgtccccagaggtaagatcccatgctgtgaaaaacgagaggctgcctttgagaaccgttgttcaactcctttacttcgaacaagagagaggctcaagtatggcagcaaacgacattaacaaactatacattccaagagctgatccccagaggaaaaacgacaccaaatcccagaaatgatcaggttagttaagctaaaacttggttctactactgatgataacaagtccccaaaaggagacaacaccggtagaagcacaactgtatcagaaataggcgaaaaagatcctcaccatcatcatcatcatcaccatcatcaccaacatcaccagagaatgaaaagagcagatgggaagttgcctttggaactggaaaaaaaaaagacaaacaaaggagaaattgaagaagttgaagcttcagtcaaaaagatgaaccaaaagggtaatagtagatcatcagagcttggccgagacagaaccagagacagatagtaaatacattaaattataaatctgaaagacccccctcatttgttttcgcagtttaatcaattggaagccattgttgtaattttgtgtcatttacattaggaagaaaatgctctagtatttgtaaacaaggttattaagtttcaggtccctttattacttttagcacctcaacagttttcgtttgtaaagggctattattattctattcatctcaaatagtttggttatcataataagcaatactaaagagagagtgtgtgtcccttactcctaaatccattgattattccaaattttcaactccatggcagaagagttaagctaaacattaactaacttttctaacatttaagaaaaacaggaatggccccatatttttttttgctgaaaacacaactgaactacgagccacgtgttattttttcttcccaaaaatgggaatcggcctaaagtagaaaatttatattaaataatttcattccagccgtcatatcatatctctcttaaaattttatttttaatttttatcttcgttttgatatgctaaaattaatataaaattattttacctagctagcttcattaaaaaataaaatgaaaagataataattaaaataataatataatcaatctcaatcattcacctgcttaaaaggaagggagagagagtcaagaatcttcgtccattatatttgattatttttattagtttgagataaaaatatcagcggaatatgtcggggaatctcgagtcttctttttcatcgtgcttgttatcattaccagccttgatgattttctctcccagtttatggtttctctgaaaggtacgatttttatattatcatcatcattattattattattatcattacaggtatggcagttattgcttgaattaggatctcttgttttgtttttcaatttttgggatttgaatggtgacttttggctatggagaattgggttatgggatccacatctttcatgtaaagtttgttagtttattgcttaaatgttcatcttggtttggtggttaaaagaaattttacgcgttttctacttttgttgttgaatcaattttatggtaatgtatttttgtatatttagatattgattggtaagttcattttttaatccttcatttttgtatgatggagatttgcttaaaatgtattggttgacgagttaaacttccaatttatggatattgcgccaggttctctcttctaatttttgtgtgcaactgtttggggctggctctcttatgtatgcttgaacaatttcattataattgtatgatttcacgtttcactgggattaccaaatttctgtaattcaatttattgtgatctatttttagcattttgtatattcgatatagaaactgtggagtgtatcgttgtacagtctctttggtatgcgagactctcttgcatattagtttccacaatctcattgatccgctgcttgtattaagttggtgttgaagatattagattttcagatctctatccagtcttgtgaaaattatatcaatttgagcactatatattaaaatttgcgtgactttcttgggacagttatatcacattgcatttgtaaatttatgttggtattttgagttaattttttcttctggggattagaagttttctggcgttcttggttcttagaagactgaaaacgtaatgttttatttttgggtgtgtgtaatgcatataaaataagatttctgatttctgaatatttatttatttcttttttgatcgaccaggctacagaaggaagcacacagtttttgttggttacatgataggacattgtgtgtagttttatctcagtcatcaagtggctctttgtggtattgccattttgcatgtttgttgctgtgatatatgaggaaagggagaatgttggattgctaatgactacttgaatcgttttaacaaatttgtaaggtttcttttcctttgccttttcatttttaagtttatgtagcaacaaggaagctggtttgactcctctgtctctgtcacatgcaagagtaggatatagtacaaattcttagcacttagaagtttgttgttttgctaagcagtctaatagtgtgcagcgttgaatgtgtcgtttgcatggtctttattgttgacaacaaattagccacaaagtaaactctgtaaattcagtggtggaaggttatttgttaccttcattagtgctatgtatattataaggtatagaaagggtttcaattagacatagggtgatggattttatcagatgttttaatacttttattctttccattttctttaattttatgcgatggaagttatgtttttttcttctttttggtcaggtatggagtgtgctgacatctggaaaagatcatggtgcagtgcttagaaggattgaagcatttgtgtgtccaagtggttaattgttgtgaagctgaaggatgtaaacaaccaaggggtctagaagatccagaagttctagcaagggagacagtctgtataataccttcccttttacaccttttttcccatctactgtacaatttttcaaatatatacttatgttttgctctctacgcttgtggttgtctgcataaatggtgaagttatgaattgtcaatttcttagccaaaggatacttgttagtattatttggggttactgctagttatcgtgtttcagcatgagttgtcaattacaatatttttggatatttctgtctggatatatgttgttgttaccatcattataactatttcttattttcgggcttaatcttccttaatttgaatgcagttagtgtcagtgaaatagaagctttgtacgagctgttcaaaaaaattagtagtgcagtaattgatgatgggttgattaataaggtaagaggaatatctatacttttgctatttaatctgtttgtttttttgagggagggggggttggtttacctttcctcactttgtacccttcaaggattgttgtgcttcttgcctactcccattgactctattattattttctttctcatcttgatagtttgtgtttcaggaggaatttcaacttgcattgttcaagactaacaaaaaagaaagtttatttgcagatcgggtactattcctttcttttctgccatctgtgtttcattcccattcttgcagatgcaatttcatatattattacaaaataaaaagggtagtttaagatgcctagttccccactttctgtttgttacgttaaaaatttggcacgaccttatttttcttcaaaagtctggtccctttggaaataagcacaaccagattcttctagactctccaattatgatcgttagatgatgtgttgggtgtctcttttggtgttgtaacttggacacatgctctcacacatgaaaatgagttttttcttttttttttttgttaaatagtaacatttattccaatctgttttccaaattgtaggtatttgacttgtttgatacaaagcataatgggatactagattttgatgagtttgctcgtgctctctctgtctttcaccctaacgcaccaattgatgataaaattgaatgtaagtttagcagtttttccaagactttatgatgacttctttaattttattatgtagttcatttgtatatttgtttatctattcgctagtgtgttgatttatgtggatgcctgaggttatgctttgttacagtttccttccaattgtatgacctcaaacagcagggtttcattgagagacaagaggtacttactattctttgtcttgcatatttcttaatatttgtcggccagttttgtttttctaactttgcaagatcatgtcatgatttctttcagtattatttctgaatactgtttaatctacttgtcacttttacgcataggagttcattcatatgttaggccatacatatacatcaaaatagcaactagttagtacaagtgggcaactacttccagcctcactgggttaaactgtttctaactcttgattttgtttattgcattgttaaccgactcatactcctaagttttaaagtttctttatatcttcatttatgctcttcttagatttcatcgtttcatttaatgtgcaggtaaagcaaatggtagtggctacgcttgctgaatctggcatgaatctgtcagatgatgttattgagagtattattgacaaggtgagttcctccatctaatacgggacaaaccaaagtggttagcactctggatatgtagcgacatgatattcttatttcattttggcaaccaagtagttatcacaatgtatgtatatttgtacttcaactttgttgtcaatccacctgaatttttctgcgtctctcttcctgactgaatgacattagtacaagattgtgaacaattgcagaaatttatcattagtataaggacttaatgtattacaaatatgctttttcttgtatggccacaaaagttttacatttcaattataatctagcttcatcatttctcttcaattaaacaaactgtaacatgtcttggggacttctagtcgcaaacacattcctacttgaactgttgatggctctgatctgagccttatcatttttttttttacatttacgagggttgtctaaaatttggctacactttcagaccttcgaggaagcagataccaaacacgatgggaagattgacaaggaagaatggagaagccttgtgttgagacatccatcccttttgaagaatatgactcttcaatacctcaagtgagttaatgtggttttatttatcgcctattggagtgctcttgcttgaatgacttccagtcaaatcttaaactgatagagcaagtgtgaacatttgaagtacatgaattagtagttatttatgtgtctttataatgtattttcctgcttattattactagtagaaaatgtcatatgacttttgagattttgagctaacatcagttttgttttttgcttggacagagatatcaccactacattcccaagttttgtgtttcattcacaagtgaacgattcctgaaatgtgagacaaatcaagtttgagagtatatattggggaagggaatgctttggtttgttgagacaattgtcattttttgtgcagaaaaactacaaattgacaaatgtcgattgtgactgttgtctctttgatttggattttcaattgctagaacacttattttggttggttagatgaggctcttcagctttgaccactgggttgtgcatgtttgtttgtgtgtagcagctgatcggggatcaaacaaacttggcccctgtatttgcatgccattgtatgtttttaagggaaaatattggtttttggctcaggctcaggctctcacgccccacttttgtgtaacatcttttaattgcttttttccttctaaaatttgtaaagccacctccctctctctttcttatttttctttcattatgtttgggctcttttcctgtaataactaaatttacagccaatcgtggttagtcgattgggaataatgaatttaatatttctttcttttaaccgggaactcaagaaaacagtatctgcctatctagtcttagggactaaaattttatcaactctaattcctcaacttttattttatttatttattttgcccattatcaccacaagctatttattttagttcttatgtattatttaagctatcatcattttatacggtattgtttatagtcgattaattagaaaaataatactattctttttaaggtgtcttacaaactctatcataattaatactcaaattactgaaaatttcacagaaaagagcgtcatatttaatcttagcataaattttaatttttaaattgtttttagaaataaatgaaaattggaatcaatctataaaaagacgaaattgccctccaggtagaatcattcgggtccgtactccgttctttcttctgggaacataaagaagggtttaagccaccgagaaaactctatttcatattcatcaaaaaaaaaaaaaaaaaggaactctcactggtcaatttccaggtaattattttttctccgtctattgtcttcggtgtcatctgggtttttctttttcttctccgaattgttatgatcgtgtatcatttcgcgtctctgtctgtgttttgggttgttggaggctgaagaggaaaagggttatgggagaactgaaagctcttactttttattcatgcatttatatctatagcataattggatcatcagaataatgtacattactttagtatttgcggttgagtttgcagataataatagtgatgtcggagaaaggagggaaactgttcacagctccccagccccagaagagaggaagaaaaccttccctcaaatccactaacggaaaggaaggtttgaaaaatttctcattcatagcttttgttaagttcttttttgggatcttttattttccttgcccctattagaaaagccggttcattgtttggagaaagcatttttcttggaagtgtgagcatttgttcactttgtttttcatcgtatacttcaccatggttaatcaatctgataactttgttctattcatgtcaaataacatgagttttccttacagtcttttgcattcataatagtttctttttaagtttgaaccttgaggtgtgcatgggattggaaaaccttacattttttctgaaggcttaagtaatacataaattgtttttatgtttttttccttacctttttgtgaattttattttaaaatatcttgtactgaatgaatgcactatatttttagcaccattaaaggggaaggatgatagctcagaaaagtcaaagaaaggaaggaaagttaagtttgacacaggtatatatgcttttgtatgatccttctcaccccacttctccagttttctttttagccttcagcttatgagttaagaattagtgtagtttttttctttttctttgtttagaatgaagtagtgtacatgtgtggaggtgataatataatttttactgagctgcctgtaaatggtgatggatcgtatttataggtagtcctgaagtcaatttgaacttctcgtctgaatatggtgggaatcttaacactgacacaccaaccacatttcctaaaggttcaattctcttttcatttcttgcattttccatgctagacttctataataattgctactcaattgacagttgtgggccttgatttcctttcatttcccaacttatggttttttaggaagttttggcctaggaggtaaaggggacaagactggtaagggtggcaagagctttgtgccaaaaccttcacgaccacttgagctgagtgttgaagacggtatgtagaaatgtatacataagatatgatttttagatgccaatgtatttattctatgatttgttatttactaccaaaatctagctgctagatggtatgtctcttttgattcgaaaatcatctgatttggtcaaagccctgttataccttgctcttggtctatgtagaactaccaaagggtgcaaaatgtctaatggactgtgaggctgctgatatattagaaggaatccaagatcgcatggtcttgttgtccaaggatcctagtattaaaatcccaaagtaaggacatagttatgcattctcttgtaaaacaaatggatgtctgggttatggcttcacccaaatttattgtgtatatgacaatgacgctacaattgttgtttggttttagatcatttgacagtggactgcagtatgccaaaagagagaaccattacacaagttctcagtctgtgaaagacattcttgagtatcctttgctctttcttggagttttacaacatatatatacatcttataatctattgtttataaataggaatctatgtctttgttatgctacctgcaatgctctttatatttttcttatactgttacacacttaactcaagtttcagcatgctgtcaatatatgggctgaaggaggccgaggttactttctgaacctcaattgattagtacttggttcttactataaatgatgtgatcttaactcaaaatatgttggctgcagatatgcgtaatcgccaacatctgtccagaaacagctgatgaagtttttgctctacttccatctttgcaggtactcttacatgttgattttgctcatttccactattgaaagtagagatagtgtatattatttcttgatgtctatcaattgcaatcttgtagttgttttttgcctcatctactggtatttccccattccctcttaaaatatagcaagttaacaattgtgctcttccaggctaagaaaaacatgcttcgcgaacccatcaaagatgttttgcttgaactggctaaggttaagcagtctactccaacctttagcatataaagatctgtggtaagatatatcacagttgcttcttccattcggaagagttatcttgctgttcccagcagtattgctttatagagtagttttccaatttgataaactgagtgcagactaatctttcatcgaaggcctggccctgggaggcggggatgacattacagcattgctatggagcgatcttgtttggatcaaactattaaacaagggagcgatcttgctatggatttgatgttttgatgtaaatgaaacctttctttctagttagaaagaatgtcttatctttgttcttattccactgcttcttttttgtgaattaaaagctgtggacatggtaaataagaaatgggtaagctgtgttgtgaaaatttttttctagtataaaattgaaaggatttaacttgtttggtgcaatatgaactattgtttttttacttaaaaaagttggatttgaaaccaggacctttccaaaatgtggtagtgttggaagtatggttatgttgagcatgcttatatattacaattgtttgaattttgatttcaccactaaattaatatttatttctttatttatttttttttttttaaaaaaaaagttatagaacatatttataacaacagtgccacaatgtttgtttatatttatattataaaataaaggggggaaattttgttttgtttttctttaaagattttttttataatctttaaataattatattaagttgaacaatataaatgtattacgtgtaaatgatggtacacgtaagcagtttatgtcaagagtcaattgagataaatggatgacactttaaatttattaatactttagcagtttagagagttctgctaccaaaatttaagattagagtgttagagcaagtaaattgataattgggagggttcagccacaaattactccttttaaattattagactttttaatgtgttgttctttcaagttaatttatttgtactcatatatagtgtattagtgtttattatgacgtatcgtacttaagtttatattttttttttgtaccttattgtatctacgcatatatttttttgtgttgaatcgtacctctaggacttgtgccagtttcgctcacgtcccccagcccataagcactacacacatatgatgagcattacccaatagaaatgataaagaaaatagccaagaatatgaacattttaaaaaaaaaaaaaaaaaaaaagtgaagaatatgagaatggagtccttgcttgcttgagcttgactccttaatatattatttgatatgtagaaatacgagttcgtacattgtaattaattgagttgacgtcccttgacttcttttgcttatttccaataaagataaagaaataaaagacaagtattttcaaaggacacccaattttggtctctctctctcacacacacactcactcactcactcattcaatggaattgatcaagaacaaggtagaagaagaagttgatgattatgatcatgaagatgatgacacagacgaagaagaagacgtaataatagcacaagtaaaatggaggaagcactattcatctatccaaaaaatcctcttggttggagatggtgacttttccttttccttaagcttagctagagcctttggttcagcaaggaacatggtggccacctcccttgattctcttggtacgtcgtctccttctttctccatcatctctccaaaacaaaaacccttttagatcactttcccctttgactttttgtattctgtaaatgggttttgattctcatttaacagagaagataaagaagaattatagcgatggaataaggaacattatggagctagaagaaaggggttgtgttgtacttcatggagttgatggaaagcacatgagtgatcacttcttccttaaaacccagagatttgacaggatcatctacaattttcctcatgttggattccacttcccggaagaaaattgctgccagatccagttaagcccttcaatttttctccctcttatttgtttttctacaaaggaatagtaaagtagactttgcttttttgtttcaccttaaatttttaaaactaatatacattattgattatgctttactaatggtggatgagaaattgtgtagtcttttttgtaaatttggtacattgtgctgtctcatcattgttatacattagtaacccttaacttgtatgtatatatattttgttttctataccaagaatgaccataattttgtacttgaatgtctttgtcttcttgtaagtaaaggatttttagttacaatacttgagtataaatgaatgggatcaagtttgtcttcttgtaagtaaaggatttttagttacaatacttgagtataaatgaatgggatcaagtgaataatggggtagtgaaacaggatgaacaagactctggtgaaggaatttatgaagaatgcgaaggctctgttgaggaaagagaatggtgagattcatatatcacacaaggagggtgacccctatgagaaatggaatctagtgaagaaagcagagaagatagggctgcatttacatgacactgtgcccttttataagaacgactaccctggttatcaaaacaaaagagcccatggtagctcggccgatgctccttttcaactcggtcaggctaatacttacaaattcaggctaatcactcaccctatctagtttgctaattatctatatgtttaataaatggatcacagaagatgacattattagaacttgtttgtttcatgctatgacttgtttcttttctttatcttgtgtaaaagctgcagtgtatgcagactaatgaaacatcaagagggtgaatttcttgtattgagatatcagattgttgttgtgaacttggagcatactcttggattctaagctaattaagctgcataaacatttcccccatctttattgatttatttgtttttcttgcagtctggtttgccattccatccataccttggtaatactaataagtaagaatttagatttaatattgaagtgttattttgaccaagattattttgttgtttcagttgaatgaatctctgtactacttatactatatccatttcattttgtttaagcatatatgctttttccaaacttttttaattgagcatttgttgctcgtcctcggaatctcggatagtaacacaggatattcattcaatgtttttaaacttattgagatccgatctaattatatattaaatgttagattttaatatccgatacaatccaattaatttcagtcatccaatcgatctaacaactattggatgttagattggatcggctctatacattgaatgtatttcatatgtatttattagtttaatttaggattatctgatatttcagtcctaatattttt

SEQ ID NO: 184393 - DNA, 2127 bp, Cannabis indica
tcaatgaggttattgtattacttcaaaagtacctcttttacatcaacctatgtataatctgctatgcaaataaatttatacattgctttaaatttctcaaaccaattaatgtctacctgtttcactttctttggaaaaatttgtgaaattctccccttaatatccatcttcactcgatacaatgtgtgaggtaagagtttaagactttgagatcaatacagtacttcattatttcgatatctatatggtttactacgacagccaaggaagttgagtaaacttgcttcctaaatttacaaagcttggcccgagataaccacctcaaaagagagggaagttaaagcttgtatatttccaatccaataattttttttagtatctacaattctacaaagcatcatctactgtagttacaatagaaaaaaaaaaataactccaagagttgcaatctatctaaaacaaataaccactatgaatatttttttaggattaataacaagcctacccaacacttagccaaacaagatgatcgacttgttcctgtgctgggactaaagtcttgtataatccttactaaaaaatatacggtcataaaaaattgttgaaaatttatcacctatttacatttctttttactttgattattttcttccaataccaaatcgattgagtagtggagttataatcctaccactattcaataatttaacaattttttacatcacaaagtatattataattataacatgtattccacacattaatgaaaagtttacttatttaaaataagatttctataatcagttgacacgcgcaagtttcttaaaatttttttatgctagctcgtgcaactaaatttatttttgatactataaattaatcaaagttttaaaactagtaggatcgtggtataattataatgtacattattatcatataagaagatgaattataagaccatctccaatagataacgtcaattttgtgctacatttagttgaaaatgagtgaatgttatatttgacacaaatttacaattgtgctttgatatactaggagtaacataaactttattttaataaaaatatgtaaaaaagttaacaaaaatattaaaataactttaaagaacgtatttgaatcatattaattattaattattattggaattgaattttatgaaaaagggctaaaaaaaaatacagatgccataataatagaaacaaaaataatatttttacaataaatttcccagatatgacatttgattcattttagttgaagcaaaattggctagcatatatacaatatgatataatatattgtattaattaagaaaatgtcatcctcaaattttctgacatatgatctccatttataaaatatagctagatggagagagaaagatagacaagataaacgttccaaagtagtataatatatataaaccatataatattctaattaaaatcattttgacattgatcataaatatataaatggagtctcgacctaacatatttgtatatcttcgaagtctaatccatcatatcatataataatatctaactgctactacaaacaaatcattccagctcatcatcaaatatatataatatatatgtgaaatgttctccactaataagaaacaattattaaaacaagggtgaagagatacaattaaaactacagattattagaaagtatccaaaatgaaattatttagtatataattatcatcaaaagatgatgatcatcatctcttttcttattcaattcaaattaagaaaacatatataacaataagatcatcttctctgtaatttacataaaactgctatttatatagagctaaaggaaagcttccaacaacactaacgataattaataacacttgctacctcgtttcatcatcaccataaatatataaatatatatattactccctcgatctctctctctttctttctctcccctctagaaattctttaaaaaaaaacatcaaatatatatataaagtactaataaaacatggaattttttattaatatttttgtttttgtttttcacacccctaaatagctagcgatcaataattgaaattacctattttttacggtaaagttttca

SEQ ID NO: 184394 - DNA, 3003 bp, Cannabis indica
tggaattggctctcaatcatctttatctttcaatttttgtgtagtgttatggagaatatgtaggtggatccataagtgatgagcagaggaagagcataatcatgaattcatgtcctggggcaggggcttgcggtggcatgtatacagctaatacaatggcttctgctattgaagctatgggaatgtcccttccttacaggtagagaatattcgttctcgggatatcttagcaaacttagtgtgatgatggttgctagttacgttttctaatctttttcaactttgttgtttcccgaaagctcgtctactcctgctgaagactcattgaagttggatgaatgccgtttagctggaaaatatcttctagaattattgaaaatggacttaaaacctcgagacatcatcacggaaaaatcattacgaaatgccatggtaattgtcatggcactaggtggctctacaaatgctgtgttacacttaattgcaattgcaaggtgagcaaccagatattccatgtgtagtactgataattgcgttgtgatgaaatagctgataacaagaattttggcaggtctgttggactggaattatctctcgatgattttcagaaggttagcgataaggttccattcctcgcagatcttaagcctagtggaaagtatgtcatggaggatatccacaaggtcttcttaacttccctttggatgtttttgtgaatgtggtataattaaacatcgattgtaccctattttttcgtttttttctaaacttgtggacaatgattactactatgatagattggaggaacaccagcagttattcggtaccttttggagcttggatttttagacggggattgtatgactggtaagttagattcggattgcttgcatttgttgctaataagctatactgctgcattggttaacataataaacttcttttctccagttacggggaagtcgctggctgaaaatgcaaaaagtttccttcctttatccgaaggacaggtataacatcttttttatctttcgaaatcaattcactctaatattgtgtgtttatgttaactcagtggtcatatgttatgtcttgtgaaggaaatcatgtgatgaaattctctctttttttcgactttttcaggatattataagaccagtggcaaatcccatcaagaaaacaggacatctccaaatattatatggaaatcttgcaccagagggttctgtagccaaaatcactggaaaagagggaatttatttctcaggtctctttcatgttttagatgtctttgccgattaaattgtccttgagattctttattgaagttcaatttactttcctcaaaggatttattgattgaaagaatgttttccaggtcccgcacttgtcttcgaaggcgaggaatcaatgcttgcagctatctctgaggatccagcaaggtttaaggtacattttctatttgtaggattgactaattaattatttcaggtgaaatttgccaaactaacaatgtgaaatactaaaatttgcaaaataatctcacttaatttattctatgcgaccatgatagtcgcacactgcaatttatattcgtttctacgaccatatgaggttattttgctaataaatttttttgtaaagctattttgctaataaaaaatttcataaaggctatttttacaaaacactcgtttttctttgatcctataaccaagtttgaatgcagtgttaacttttgtcgaaattttcttgtttagggaaaagtcgtagttattagaggagaggggcctaagggaggaccaggcatgcccgaaatgttgacgcctactagtgccatcatgggagcaggtctagggaaggtaaaatttggttgttatgatttgttgtttgtccttgctttttccgaattcacacaagctattttcgattgtcaattacaagtcttctagtagattttgtattggttcattgtttctcgaatagatgtgaattgggtacaacttttctttggcgttgcaggaggtcgcgttattgacagacggtagattttcaggaggctcacatggatttgttgttggccacatatgccccgaagcacaggttctttatagtttattctcatgtcgaaatccatgatcatagttggtaaatactgcccttcttactacatgtttttgcaaaatctttaccaggaaggcggtcctattggattactcgaagacggtgacatcatcaacgttgatgtccaaaataggagaatagatgttgagctaacagataaagaattggaaaggcgaagaaagaattggattcaaccaccatacaaggctacctccggagttctcttcaaggtaataaccgaagaaaaaaccctttgtttcccattttcgaaaaacatcgtcgtcgtctttgatatcaaaaatctcctaatgttcatgttcttttcttctttatttccatagtacatcaagaatgtggagaaagcttcaaggggttgcgtgaccgacgagtagttgagcgaaggtaaggtcacttttttcctcctctttgccatgtctacttaggtttgaaattttgtttttgtatgtatttaaatggttgagaatagtagaaacttttttgagaggattttcaatttgaccattcttgagttctaagtagcatcacttggatggagttttctttcttagtcattccactagaaaggaaaagaaaagaatgatctccaagttatgcataacatgatgttgaacaaaattgctgagaattttttaaataaatcgatatttagacggtgcaaatattgtgctatatttgatacaaaaagttgatatgcaatatatttgacacaatatttagtattatgctttaatacaaaattgtaaaagttggtccaaaaattaattttttattaatatgcaaaatttaattgagtggcgataattatagatgataataaagtaaaaaagtaatatttaatgagatgataatgaaataata

SEQ ID NO: 184395 - DNA, 1488 bp, Cannabis indica
tttagtatctagtgtaaaaaatgttaatgcttaaaaacataaagtggactatgcacgttgggcttactccatacgaaatttgggcctaagaaattgggctccactcgagttcactcgtttcggtttaattgagcgatagagataaagctatctataatgtgattggtggacacaatttgtttgagcctcagattagagatttctacattttcagacaataccaaaaacatgacaacaactctctccctctcactcactgctttcgtaccattccacgtggcactgaaagaacaccccagacctcctctgccatggctatcaacgcaagctcctcttctgcttatcttctccaaaatatcgaccatcacaccaacaaaaacttattcctctcttccaaaactcgccatggttatggctacgctacctattcctcaagaacatctacaatcgtcgctatggcacccaaacagaaggtaagaagaatacatattaattacactacggattctgtttggtagctacaagaaaatccgagaaaattaattttatttatttatttatttaattcaggtgaacaagtacgatgataactggaagaagcagtggttcggagctggaatcttctacgaaggatcggagcaggtggacgtagatgtgtttaagaagctggagaagaggaaggttctgagcaacgtggaaaaggctgggttactttccaaggcagaagatcttggtttaacgctttcttccattgaaaaattgggggttttctctaaggcggaggagctaggactgctcagcttgttggaaaaagttgccagctcctcgccctctgctttggcctcggcggctctgccgattctggtggcggcaatagtgacgattgttttgattcccgatgactccgccggattagttgcgcttcaggcagtggtagccggctcgcttggtgttggcgccgctggtttatttgtcggttcggttgtcttgggtggcttgcaggaagccgattgatttttatttttattttttgtaaaaaaataaataaaattagagagagggaccataattgtgtatgaaattgaaattcgcttacattagatttttcacggagaattaaattttataatttaacaatgcatgcacaataaatgtataataactattgatacattttataatctattattattagtgttattttgtttttttgagctatatttgactccatccaatttggctagtaatgaatttttaagttttctcatcaaagattattacttgttaacacattgaagtgtcactttatgaatgcaacttaattcgctggagagaaccaattcagtgatagataactttcaagaaagagaggaaggcaagagaaaaaaatttcgtttcagaaactcaatagctccttttcttcgtagtggctgtgggggtgagcatcctggtgtcctgctggttctgttgctctcttcatggatgctg

SEQ ID NO: 184396 - DNA, 8560 bp, Cannabis indica
atttcctttcttggtatcagagcattcaattggcaatgtcgactggtgaaaacccaaacccagaaatggccacaaaccgttcagctcctacaggaaataatggtactaaccattcgaccaccacagcagcaaatacaagccagggagttatcgttccacagtttggaagcaccctaaatcaaccttttgcactcaagctggacagaaacaatttttcattatggaaaacaatggtttcggccattgtcaggggacatcgtctcgatggatacctcaaaggcaccaagcccaaaccagctgagtttattgctactgctgcagaagaagatggacagcaaagtggagatctggaaatcaatccagaatttgaacaatggatcgtgcacgatcaacttctcatggggtggctctacgggtcaatgacagaaggcatagctactgaggttatgggatgcgattcctcagcagctctctggcaagctcttgaagctttgtatggagcacactccaaagcaaaaatggatgaatacaggaccaaaatccagacagcaaggaaaggttcgcttagcatggtcgattacttgaaacaaaagaggcaatgggctgatgttctagccctggcaggtgacccgtaccctgaatctctccttatttctaatgttttatctggtttggatctggactatcttcccattgtgttgcaagttgaagctagagcttcaacaacctggccaatattgcaggatattttactcagttttgatagtaagattgaaaggttgagtgcaatttctggcaccaacaaacaaccaaacagttctgcaggtcccaatgccaactatgccaataagactccacacacaggaggaaaccaaggatactcaggaaacaacaatgactcgggtcacaatggtggtcgaagagggggccataacaacaacaacaggggaagatttggcactagaggaagaggaggaaggtcaggaggaccgagaccaacttgccaagtttgtggcaagtatggacactcggccgctcactgctacaacaggttcgatgagagctacatggggtctgttcctgctggtgcaacaggtgcaaacaaacccaacaatcagcaacacgcttctgccttcgttgccacaccagaaatggtggaaaatgattcctggtacgctgatacgggtgcgagcaatcacactacagcagatatcaacaacctgaatcaaaaagctaagtacactggtaaggaaactttgacagtaggtgatggtacaaagttgaaaataaaccatgttggaactggatgtttatatgctattgatagaggacctttgatcttgaaagaaatgttgcatgtacctgacataacaaaaaatttgattagcatttcaaaactaaccagagataataatgttgatgttgagtttacatctgatttttgttatgtgaaggacaaggaaacaaagaaggtggttcttcaggggaagcttaaagatggtctctatcatttcagttcaccaaacacaacatccaatctcagccgtagtagttcatttagctgtcagtttactccctttactggtgtctcgagtctgtccaagtccaatgtaactcagcatgttgctgaaaagtcttttaattcaatcaaggacaaatggcataggagattaggccatccgtccactcgtgttctaaattctgtgttatctcaagttaatgaaaagtgtcttaaaaaagatcttgagcatttttgtgaagcctgtcaacttggaaaatctcacctgctgccatttaaaactaaccatgaaaaagctaagtctcctcttgaattggtgcacacagacatttggggccctgccccagtaatgtccaacactaactttagattctacatacacttcattgacgattatagcaggtacacatggatttaccctttaaaggccaaatccgatgctctctctgccttcactcacttccaaacacttgctgaaaatctccttgacagaaaaataaaatctcttaaatctgatggtggtggcgaatatcaagctttcagcaatcatgttgctgaaagaggcattaattttcaacaatcatgccctcatacctcagcccaaaatgggagagcggagaggaaacatagacacattgtggaaatgggtctaactctccttgctcaggctggcattcctcaaaaatattggtgggatgccttccaaactgctgtgtacttgatcaataggctacctactcccgtacttaaagataaatcacccttagaggtcctctttgacaaaaagccagattacaaattcttgaagactttcggctgctcgtgttatccatgtcttaggccataccaatcccacaaattccaatatcactcaaccaagtgtgttaatcttggctatagtgataggcataaagggtacaagtgccttagtagcacaggaagactttacatttcaaggaatgtcatcttcaatgaagatgaattcccttttaagttaggattcctcaatactcatcaaaatgaacaaccagttcatgtgtctgttccctcttggactgctatgctaaatatacctcttaggtcgagtcaaactcactctgagcagtcgaattctcaaacagccacacaaccagctgctgaccctgaagaaacatcatctgcacataacaacaatcaggtacctaactcaccttcttcactaatctctggtgaacctgaaatagttttcgaagagaatcaaaattcaggtactgattccacatccgagaacatgccagctgatgatcatgaagaagtaatacaacctcctgcagcaaccactgttcccactcatcctatgataactagagggaaggccggaatattcaagcccaaaatgtacctggcagcagctaaattgaaaacaattccatatcttgatgttccaactaatgtgcaagaagctttggcacatccagattggaatcgggccatgaatgaagaaaaaaacgccctggtgagaaaccgcacttggatccttgttccttacatggatggtatgaatattgtaggaaacaagtgggtttataaaattaaactcaactccgatggatccgttgaaagacttaaagcgcgcttggtggcaaaaggattcaatcaaagggccggtattgattatagcgaaacgtttagccctgtggtcaaagcttcaaccatcagaattatcttaaccattgctgtctcaaaaggttgggccattcgacaactcgacataaataatgctttccttaatgggaagcttgaggaaaaggtctatatgcagcagcctgaaggattcatagatcctaacaaaccaaaccatgtctgtcttctcaacaagtccctctacggtctcaagcaagcgcctcgcgcttggttcgataaacttaagtccaccttaataaactggaagttcatgaactctcgagccgattcctcactgttctggtttgctaattcaacagatattataatagtgcttatctacgtggacgacatcatcatcacgggaaatgatgctcttaaacttcaacaattcgcagacaagctgaatcaagtttttgccctcaaagaccttggagatttacactacttcttaggcattgaagtggtgcgtgatgaaacaggaatttacatgagccagtcaaaatacatccatgaactgttgatgaaaactaacatgatgcatgtgaagccttgcccaactccaatgacagttggaaaaatgctttcaatctctgatggagaacctttggagaatccaacagagtataggagtataattggtgccttgcaatacttgacacacaccagacccgacttaagcttctctgtaaataagctaagtcaattccttaaggcaccaacaacagctcattggtctgcagcaaaaagaattctgaggtatttaaaaggaactttgttccacgggttacacatcaaggtgtgtgatagacttaatttgattggtttttcggatgccgattgggcaagttgtccagatgatagaagatcaacagctgggtattgtgtgtaccttggagattctctggtgtcctggtcttcaaagaaacaagcagtcgtttcccgttcaagtacagaatcagagtacagagcattggctcaagtctcagcagaattgacttggattcaatcactgctgcaggaactgaaatttcccttgccaacaacaccagtgacttggtgtgacaacttaggagcaagtgctctggcctcaaatcccgtctatcacgcgcgaactaaacatatcgaactggatatccattttgtacgagataaagtcctgaacaagcagctggatatacgatacgttccttcacacgaccaaactgcagattgcctcaccaaaagcctcactggttctcgctttcattttttgattgacaaactaggtgtggttgaatccccacttagtttgagaggaggtgttgagaaaaatgaagaaaccagtgactagtaacttgtcaccagtaaccactttgctattttctccatttgtagccgttgtggtcctactctgccttttgctcttggtctgacaactcatcattgaggcaatcattgccttattaattttagcacgtttctgttattcccttgttatggaatattccttttattgttaagatttgctgaggtgtaatgatctagaatgatcctgtaattatctatataaggaatgaatgaaatcatgctcattgagctgaatattattcaaaccatatcctctgtatttcctttctgtttttcaatttttttgttataaaatagctgatttgacaaagttagaaaatttttgattagaaatcataaaaaaatttgtggtaacctaaaaccatttttatgttagtccatgtactaaaggtgatcaatatgcccatttaaataattaggtcactattacagaaatgaattttagtgacccacgctaagcaacactaaagatttgtagtgacttttattgtgggtcactaatgtgagttactaaaaaaaatagtatatagtgatccttcaaaatgagtcactataatatttgagtctctatcactatagcctattagagttgcattttgtcaatctctaaagatgacagcaatccgcaataagcgtatctattatttttttttaaaaaaaaattattttcctacatagtgaccttcacatagggtcattaatgcattttatttttttaatatcaaatttctcagtatagccccatctctggggacaaacggtctccctacagacttgtcactgcaactcaaaaggacattgagatcccccataaaggcccatggttcaaaaaatcggtcgacatccttcttaatgttctcccaaaactcgaatttttcttcctcatacggagtaccataggtagcaaaaagagtccaagaaatagacttatcaagatcccagattctacatacaaagccaaaaatactcttagaaatagaaataatacctgcctatttgttccaaagtaagcaaaaccacccgcacgcccaatcaaaagaatgaattcaccattatcaaaattcagagcacgactgatcgttatcatttgttctatccccagttttgtttccatcagaaaaacgcgtaccttaaatctcttcacccaagccactagagcttggattgtcgagggtcttccaaaaccctgacaattccaagaaagggctctcattggggaggaggggacttgacaagggccgcctcctcgcccacttgaaaattttaatccacttgaatctcaataaccatacttgtctgtgatgtactaggattatccccaacttgaacaacatcacagctacccaggacaccagagttgcattgaagaagatatcctatcctagccagtcgttattgacttgatttggagagggagttggacttcttagatcctcttcttcccctcacccccttagaagaccaagagatcttatcatttttgcctttagagaaggaaatttgcccaacatctggactcagaaaaaactggtcgaaggactatcagtagatgtgaaaataacaggtgtcacacttccacaagccttttttttttgaaagcttgactttcctcgtctgattgttaagggatgaaaggccccctttaaccactgaaggggagatgagtccagtcaaaatagaggagcccaataatttcttagccaacagggccaccttatcagtattgggcgtcggtaaaaaaaattggttcggggtgatggtgaggtgttctagatttatagatggcttcgtggggtaattacaccatttgctcagcagtagagcccgcattggacatgatactaaggatgatatgactatcattagggttcttatctaattgagtaatatggtgatttgaaattagctcaaggggattgaaatacaccttagagagaattttggcaatggaatctccgtaataattgccaggtgtcgcttttttattcctccctgtacgaaaatcatgtgacgagccactactcgtacttgggatcgtattcgtactacgagtggcaccacaactcacgtcctctagtactgcatacctttcctgcccatcgtacctttttctttcatcaattttgacggtctctcctcaatcgcaagtttcttgccatggtccttgagaagcggcgggggagggaatgcatatgccctttgcttcgtgcatctactcctttcgtggcccaggtagccacagttgaagcaaaaggtgggaagtttcctatacttaaattgaatccattcccatctgcctctggtaattatactgagaaaaaaaccagctggaagttgttggtcaataagaatatcgaccttgagtttcaaataacctcttaaagcaataactccattcgctgcaccatctgatttaataaaagtgcccaccttatctccgatggcaaaggaattctgggcagccagatatgaagtcggaagaccatgtatctccacccaaaaggctactctagacatattaacacttttccaatgaccatcctcttgccagtctcaaacgttcagtaactgcttagaaattatccacgacgttttcttcaaaacttccaatttatattcattaaactcaaagaaaatctgcaaagaccattccatagttttcatacgtcattttccttccaaagaccagatacctcccaaaatctatttgactcttcctttaggaatctgaggcacccaaagcttttagcgagaaccccacttctggcaacttcatcgttgatctcaaaatcagcttccagctcgagggtgacttcatccaaaaactgttgtcataatagttctatgttttcttctaaaacaaggtttccatctccattaaccagcccctgatttaggtccatgatctccaacctcacaaacacaaaagaaaggccgagaaaggaaaataggggagaaatagagaaaaagcacccgacgacaaacgcaaccagtaacacaccggaagaaagaataaaaccaacaactcacacacgggagcacaaaaagaagatattacttgaattgatggcatatccagaatttaagtcgagggatagtacttaatcatgcaaaaaaaaaatattattataatttaaaatatttacaatattaataaattaaaataactatataaatattttagttcttattttaataattttttcattctaaaaatttatagttgcaaaaataaagtttaaatagttttgcttatcacgtgtataaaaaaaatacagtactcatgtgtgtaattaaatatttgaacctttttttaggcactataaattatttgaaaattttgcaggtaatctaaaataagtacaacgtacacatttatgaaaaaaaattggaacaaaaacttttttgaatacaaaaacaaataaaagtctaccgaaacaagattttagagagtgtactactatagacttaattatacccaaaagtttcttaaaagttttgcaacaaaaagaaaaacgaacaataattaatatcacaaacatactatcctttgccttttatctaaacgttgtttcttaacatgtcgttttgatttggttgaagtgtggaatagagagcttctccttaatttcgcaatcaaataaaaaatgattagagatgcataagaggaaaatgaaaatgcaagtcaaataataatttttttctaatttattttgtctacaaatgaagttaagttgtacacttccttagatatatataattgaatttactgttaattacaacttaaatttagaaatggaaatgagaatcttgaattaagctattacgtacaatcccattaaaagtataagtgtagacatttttttgatgaattaagtgtagatattgttaattattacgtacattcccattaaacctataagtgtagatatataatgtcacttttatcagcacggttgttactgagctggtaacttttatcaacgcattttgcaaactgtgctgacaaaaagatcaaagttttaccag

SEQ ID NO: 184397 - DNA, 743 bp, Cannabis indica
actatctttgtttatctgctacttcagggagaaaggggggcgatgatctttttgacttgctggataccagtaaactgaatgctcatcttaaagagctcatgcctggacttacagcaaaagttttccgtacttttaatgcctcgattaccttggatgatatggttagatagttattttcttctttattttttattttctttcaatgtgctcctagatttggttcaagtctttgttttccccttactttttacatctgcgttctctgataaatctcatgtagtttctctattgaatttgtctagtgatagtttatctcttgctagtcttattatcaaattttacttctagttttaatcctgacgttttcatcatttttatttatttattattttggtagttgagtcaagaaaccaaagatggagaccttgaagagaaaaagactgtttataatactgcaaacaagcaggtgaaaataatttctcctcttacgaagtttcactgtttctccattattttaagcaattctcacaggattttgggttctgtttcaggttgctatcatttgtaaccatcaacgtaccatatccaaatcgcatgaggcacaaatgacaaaactaatggagaaagttcgtgaacttgaggtaatggtcatatatctctctagtagaatgggagttacaccaaagatgttttcttttgttgcattgcatgaatatttatggaggcatgtgatgttcctttgc

SEQ ID NO: 184398 - DNA, 3652 bp, Cannabis indica
tttgaattgtgaatttcgcttgctaataaaatttatccacttccattaaaaaaaaaatggacataatatatctgtttgcttcaccacaaattatggctcttaatttccttgaaacaaaaggagatactcttttgcacgtgggattcagagtcagggtgccatccaacattattattatattttcaaataaataaataaataaataaagtttgtattttactataggaaataataataataataatgcatcggtcatcaccatctccaccacatatatatggacagagttggcgttttccataagagagagagagagagagagatagaaggcgagcgagagagagagagagagcagttgccagctatcacgaagaggaagacgaagttaccgctggctgctcctgcttttccctcatcagacccttgctctttctcttctcttcgtccctgatcaatctcatcaatggctttttcaatcatcattttcatttcctttttctctgttctcctttccgccacctctacaaatatcatatcattaggtttttattttctttcaaatttattatttatattttctcatttgcatactttttctttttgtttttcacttgaatatatattcatgaagcttatatgtagatcatgtatctattaagctttccttgtaagcatgtgtgtagatacatatgaatgtataaaagagagaatatatatgtgtgtgtgtgtgtgtgtgtataaccgagtgaataatggtataggagagggagctgaagattcagaaaccagattgaaggatttgtatcaagaaatcctcagggatgaggctgtgttaaggcttcaacagcttggtcaggtattcttaattcttagttttctctattactaactgaatattgtttagccaaaaaaaagaaacctctcctttattaattgtccgaacttatcttctttttcttttttcacttcttgcataataacatcagctaaatattttacaaaaaattggttacaattagatttttatccaaataatacaatatccgatgcccaaacatcaaactttatttcaaattgcagattttaaataattttgcaacttgttcttttggttttatatttatttattatatatataaatattcttaaacatatatgcatgctttgattatgaaagttttagacatgtggaatacttatgtgactgccatagataacaggtaagtgattctgatggctatttagagaggacattcttaagcccagcttctgtgacagcagggaatcttattcgccaatggatggaggatgctggtttgagaacgttagctttctatctatttacattttgaacttttgtttcagaattccttttggctaatttatttctaatgattttcaggtggattgattgcatggggaatgtgcatggtcgggttgagggaagaaatgcaagtgctgaggccctgttaattggttctcattttgtaatactttttaacttttctcttatcagcttctgtcagggttaaattttagagacaagtgtacttgtatgtgcacacatacaaagaaacacattgtttatgagattgaaaaagggtatatagagcacaaaaaatcggtggtgacatttgtctctgcattttccaactaggatactgttattgatgccgggatgtttgatgggccattgggaatcatctctgcaatagctgctgtgaaagttatgaatatctgtggaaagttgggaatgcttaggcggccagttgaggtcagtggatgtattgtattcatgtagaattttagatgagtcgtattgaaagttatttagctatgtccttgtttttggcatgataaagttgaatcccaaataaaggacacatattatttgtcattttgttttcaaagctactagttgaacaaaataaatcctagtcttttagtcaattttggtgggtatgttttattctgttttttttatcatagatctctatgttaaaattataaaccccacttttttccaacctatgggttctaagtagcttaactttcttaatatgccaaagcatggtaatttttcattttgcatgttgctttcaattgttttccaacctcaaaatatgtgaaaagactgttgtcctaatcgtgttgttaatgaaatgtatgaagtatccaacaaatgtatatttctttctattatatatttattttgtttgttcttctttccaaggggatgctgtagaattatcaattcctcctagatataccgtgattgatatattctccaaatagctttgcaactattctacctatcaaatgcattgtttctattgttgaatcttgcaggtgattgcattcagtgatgaggagggagtaaggtttcaatctacatttctaggtagtgctgctgttgccggagttttgccagtttcaacgttgcagatatctgataaaaggtttcattgacactactaatatatcattctatagtcgtttctattgtttattatcaataaatttataatgttgtttttcactcagtggtttaacggttcaagatgttcttaagaagaattcaattgatattacagaggaaaacttgttgcagctcaagtacgacccaaagactgtttggggttatgttgaggtatgatctcttagactagctagttttcccattgattagcttactaaaggtagcatttttttgtagtgtagtgtagttttccctttgtaaaaagtttatttattataagttagcaagtgttctgaagtttcacttctactgttctaactgtcaatgttgcaggttcacattgagcaaggtccagtgttagaatgggctggctttcctctaggagtagttgaaggcatagctggtcagacaagactgaaggtaaatgaattttagtgtgctagaaagatgtactctccaattggctctccatgatatgaatacatcatagttcaagatattttatgtagctgcaacatgacctgatcatattttccttggatcacttcatgaaacatgtgacctgatattctcaatggacagtgatgcaaatagagatagtgagacgaaatcttgagtattttagatggggctatatgcaatctagaattcttgagattagtaaataaacatttagtgatgtgcagtttgtcctatgcaattgcaaccctcgcaaataatttgtccacttataaccatgaataaggacaagtctaggaggagatagaagaaaaggaaattgaagtgggtggaaatatttacaaagtgaaaaaagacaaaaacctctaggaaacatacattcagaatgacttttctcataaagatgaatagcatgctgactattgatttgataggccttaggatactaaataaaaaagtataaaatggtaattgcaatgaggcattagtattatatatatgagtgaatagaaaaggaaagagggagaatgaattagttaatgagcagtagcacttgggagagcactgggtctctcgaatacccagcaacactgtactctttacattttgctatcaatatatcagcttattattttgatataattgctactgtttatattaattgataggaaattcctatcaagttgtctctcccaagagctactgctcattaac

SEQ ID NO: 184399 - DNA, 1838 bp, Cannabis indica
agatctttttcgatccccttgctccctgcaacaaaacagattatcaaattagaatttcacagaaaaataaaaaaggtttctctttctatttgcttagtcatttgtcatgtcactcaatcttaccggaaaaactcaacagcttcacatgtaacaatcaatctagccaatgcaagacttttcactcggtcagcaggtaggtgaattatcttctcagggttaaggaaagagtaatctgctaatatgacagcatcatacaaaacttgtcttaacaaaacttcatctttagaattctgcatacaaaattcaaaaaaaatatgctagtagctcagttttaagatcataatacaaaatataaaaataaaatatgcacttcttgtgactattaaaaagagcacattacatgtacaaacccaataaagcattttcctagtgaattatcaatggtcgaagaattttaacaattttaaaaagtcagacttctgacataaattatacagcaacaattacttaagtattccaagagagggatactgaccgataggattgcaagaggcaaagtcttctccagcagcattctcacaagggtttctacaatattaagaaaaggtcagtcaattaaattgaactaagatgcatttacttctttatgaattcaatacccagcaaatacacatgttaagttactgttaccctttcgtacatatctacaaaacatataagaaaataactaaaattatactaaccaaaaaagtaaaagttgctaaacccagttatggaaccaacagcccaggtcttcaattctttctccaagtcctcctttgatttcccaaatttaacattcaagcacaacttcagcaaaaacgcctcggcaataacaattccagccaggtaaccaacctcacttcctccatcaccaagcttcacaaggggtaagaaagactctaatccttcgtttgaattcatccaaatgcgaatcaaatcagcaaaaggcctaaccaaattagaaccattcaaatcaccttcttcaaccaaagccccgttacaacacacattaatatacccaagaatcgcttccaccaaagacttaacctctttcaacattttcttctcagctttagaagtcaagtccttctcaaacaactcagcaaccagtttgtacacctcgtacaccacaggagcgagtaaaacgacgcttttggacgaaccacatgaagaagagcacgctgttatcaacctaaacaagcctttagcggcttcaactctatcaaaaagctcgtcttttttactaaaacgtttgcgaaatgcgacagcagcgtagacccagatcgattccagtggtgggtcgactccagtttgcattaattcgtagaaatcctgaacacgtttacatgattgggtgctttcttctccaagttcagctaaaagcgtctgtattaattgggagatcttgacattgccactttcttcaataagggggctcagattttttgggtttgaagaacctccaggttggagtagatttaacgccatggattatttgagaagaatgaatgaaaatttgataaaagttaagtatcaagaaagggcgaagaagattgcaaaaaccctaatttcaatgtgttgacaaacaaacaaacatacaaaacctcggagtcggagggtttaagccacactgaggtgccgtttatacgtgcaattgattggcttgcatactatctcaacgacatgtcgtttaactgctcaacaaattgttttttaatgggcaaatatcattatagaccctatgttttgcaaaagttataaattggaccctctgttttgttaaatgataaaataaa

SEQ ID NO: 184400 - DNA, 1921 bp, Cannabis indica
aacgtcaatatctcgcgagaatttgttatctataacaataatatacttaaaagatagctgtcgtcatgctctagtttaacaaattaactaccctttttttttttttgctcaaaacgtattaacatgtgatcatactttatacattattagataaataattctgtatcataagaaaacgacatgcactgattactaataactaaaaaaacatgtaattttataataattactattatttttattgtgatgagaataattaaattacgaaactacattctaaatttgaaaatgtgtttacaagcctcatagaacacaagcaaaataacttcacaaagggctgaggacacgaattaactgaaaattagcataaattataagaacatttgaatacaattaggataatctaaccaccaaatagagttaactatgtcaaaataaaacatacttagctaagctgaacaataatatatttaccttttatttaattattttgttcaatctttgttcaaatttattttaatttaaatttggatttattaatgtatgtttaatgcttttttgcttttaatgaatcttacatctataaagtgatatacatatattcatattcattgcttgaggatttagtctatatagaaaattaagtaaactaattatgaaaacaatattctcacaagaaatgaaagataataatggtacctgtgtgataaattctacttccctttttgattctattaatattaaataataacatttccccttaaaaaaaacatttcccctatatagatttagttttaaactaagattttggccatttaaaaaaaaataagattttggaagaatagaagctaggtcacctcatatattagacaaataaaataataatttaatttaattaaactgattgtggattatcatttgctaatccgattttgaattggatcaatgaacaaagtgcaggtgctaatcaatgtatgttgacaattcctttgtttatcaaagtggtaggcatgcttgttactgttactgcaataaataaacaaagcaatgaatttaaccaatggcaaaagacaagacagccgcactccttaaactctcgacttgctttcttattcactattcaaaaactagtgactctgaatctgtgctcaaagaacatataacttagactaagaaacgtctgcgtcacgttccctagatagccctccagccactccttgtatatagtttcccagcaaacgctgatccaatatcatattcggcagctgcagtgcacaccagttaaagcttgctcaaagttcatgaacaaaagacactaatatagattggttagcgttaaaaatgaaaacccgcaaaccttctctccaaagaaaattttggtgttgttggcaatggcttcgataaatctaagctcgagaaattgtggggtcagcttcaacttgtttgcttcagcttctttaattactctgcaatcaggatgagtaattccatcagtgattttttatatcataccactaaatttcatgtattgttgaaaatatacctgtaaaagtcggcatctgcaagacccttttcccgagccaaatacatttggttctcaatttcatcctgctttttagcactttccttttccattaacttctggtccatgagaatcttactaacaccagcattcttctcggcttcgctgatagccaacttcttcttagtctctgactctttctcaaccaccttttgtctctctacagcaatcaatacctatatgatcaaatccaacttggatcaaaatgtaggccttcactattaagaattgatgagtagaatagctcatttattcttataaatgcataaatatttctaaacctttttaatgtggaaatcttaacatggattattaattcttttttttttcaaaaaaaaa

SEQ ID NO: 184401 - DNA, 6737 bp, Cannabis indica
ttttttttctttaattttttttactgggttttcgtttcctgatgattattagggcttttctttatctcccatcaacttctttgataaatcttcaagttagatttcttttttaatataatatttctatatatgaatgataaaagaatgagtcaatacatgtttttggtttgtcttgatgcgttcaaacgttcacaattttcatgtttatgggattaggtgtgtttgctttttatattattcacttgactatcaatcaccgtatttggacaaccctttattagaaaaattgggaatttttacttgtttgtggttttggtaatagtatgttttttaattttaaaattttctattgagatttgtttgtttgtttactgatctatctaattggatagaaacgtgaaaataaataccagaagttgagcgccgagcggagctggactcaagagctggctcctccccattccaaatctcctctcccttctcgcaaggtttctattcagtactatgctttttgggtttgagttaatttattgtaaaaatgaatatggaaggttaaattttgtgaatttttgaaaaataaaataaagggtaatctttagtaggagagacttccataataagaagggaaaattttgattaaaaagaagagaagggtattcgtatttataactacccttcttttgtaataatgcgaacaaatcatgcatttttttcccattttcactcctttagacgtgacagttggatgaagcgagtggaattttggaaatggaaaagctatggaaacctccatccaatcgagatttcgtgccatgtgcaaacccaagtcttaattatacacgtaaggaacataatggtattatttttctattcagatatgtgaattgtattaattatctttgatgttgtatcagcccctgccgggtctcgaggttaccttctagttcataccaatggtgggctcaatcagatgcgtgctggggtatgtaaaaccactagttttcttttgtatgttatgcatggaattccgagttattatttactttttatcccctttcaaagcaaccaactggagcattatatggggggaaattttagtcaactgaagtgatttttcattcattacttattaaatgaatgcatttttttctagtgactgtcattaatgaatatgatgacgcgtgaggaatatattgataaaatattctccccacaggaaggggttatgtaaatagggtgttccttagaattgattagatcagctttgcgaatgattcatatgtaggtctagtcacataaagtgatttcattgcggcaatttgacaattttatacaagtgcatcttttcatgtatgcccaattattaagagtatgatgttgctgtatgtttcttaatatgtcaattcgtggcatttgttgtattgagatgaaaagcttgcgattcttgcattgcagatatgtgacatggttgctgtagcccggattataaacgccactcttgtaattccagaacttgataaaagatcattttggcaagattctaggtaatattgtatttaaatgattcctcctcgtttatacttctcttctatctcacaaactgatgttgagctcctccgttgatcatttgatctgcagcaatttttcagatgtttttgatgaagatcattttattgaagctcttgctattgatgtaaaagtcataaaaaagcttcccaaagatctggcaaatgctacaagagcagtaaagcactttagaagctggtctggaatggagtactatgaggaggagatagctagcatgtgggaagaatacgaagtatgccctttgaagtgcttctggttgatgcatgcctttaaacaccttagtttagttcaattatgctgatgaatacttttttcctccaaaggttatccgtgctgccaagtctgattcccgcttagcaaataaccatctgccctcagatatacagaagctgcgatgccgtgcctgttatgaagctctgcgcttcgcacctcaaattgaagccatgggaaaagtaaatatttcaactcgctgcttattcaattttagagtattttcagcattcttgttaacagagcagtacatttaaaacttcgttcttttctcaatattacagttgttagtggatcggatgcgatcatatggtccttacattgcacttcacttacgatatgagaaagatatgcttgcctttagtggatgtactcatgatttgtctcaagatgaagctgatgaacttagggtgatcaggtatcttatgcttatgtgtgatgtgtggatatatttcaggaaatagtcagcacaaattatgcctgacatttgtcttttatatatttagagagaacactccatattggaaagttaaggaaattgattccagagaacagagatccaaaggcttctgccccttaacaccaaaggaggttgggatacttcttacagctcttggatacccttcgaccactcctatatacattgcagctggagagatttatggaggtgattcccgcatggctgatctgcagtctcgctatcccttgataatgagcaaggtagagacatataaatctgtttgtgcttgtctttgctttttaattctagaaacattgctaagctgctatgggattatcacattttgggaattgaattgagtttaacatgattactatttcttcaagcctatatgaaatttgtttattttatgctaccaaatatgctaattgattagatagaaccacagcagagtgctggcttgcaaccgtcatactactaaatctttctgtaaatgtaataatgcatacgcatattttacatggagagaaggcaacataagatgaagaatgttcaaaactaacttcagagaaagaacgttcaagaccagctttggatcccattactttgtagacacatcaataacttcacttgctccctttatttcacaccaaaacgtaaaataagtgtgctgatgattcatctcctttgatcatattgtaggaaaaattggcatctgttgaagagcttgagcctttcataaatcacgcatctcagatggctgctcttgattacatagtctcagttgaaagtgatgtatttattccttcatactcgggaaacatggctagggctgttgaaggtcatcgacgttatcttggacacaggaaaacaatatcccctgacaggcaagatatatatttatatatacacacatttggatgcgtggatttaagttggttttcgtattttagttataaattaacaagtagatatcatgttgttgtttatcaggaaatctcttgttcgcctgttcgacaagcttgagcagggaacgatgagagaaggtaaaaacttatcaagtcgcatcattgaaatccatagaagacggtatgttattaagtatttcgcatacaagaacagattgctactactatttatactgtgaaagaacattatccatctcatagtgccaattttcacgatttttcacttctgttggcttcacaggcaaggctccccgcggaaaaggaaaggccccatctcaggaacaaagggcatggacaggtttcgttcagaagaagctttctatgtaaaccctttgccggattgcttgtgtcgaaaagaactccccattgtgaacaactctttgacaatgaggtagtaataaggggggtatctaatagtgcaaaacgattctcgtcgtaaagatcataccccaagggcaagcaggggtggcagcacatttctatttctcggttgccatcacaggacgcgtattgtgtgtatattttctgagctttttttagttaggtggggtgggggagtgggtgcagtacagaaaattacattatagtactagaaatggagtatgcatttaagggtgcaagataggaagagagatgggtaaccaaatacagcctttccttatgaccaaggcatatttatgtgctttgcgaagttggcctgatttctggagtgggataaccattcactaggggaatggaacgggattacttatacttttatctttcatttgcttgaaaatgacttgcactctttgtaatcttcttactcattaaattccaatgaagaaacaaaggaacattcaatcccttttgttgttataatttctttttttcttcacaattttgtagtatctgctcttagcctcttacgtatgttggcttataatttatttgattgatatatgacactatagattaatgggcaaaaaggagtagtaaagtctgtaaataagaaaatgctaattaggatgtctgtctcttattttgatatgtaccaaattatatattttgaacttttttaattgttaaaatttttttctgaactattaagattattagatttaagaagttttatctaatttcacttaattttactaatttggtaattgtctatgaattaaatcatgttttttaaattttaatatctattaaatcatgtctttcgaacttttaatatgtgtcaaatcatgtctcttgaactttcatttatgttagatttttcttagtaaaattagacaaaagtctttaaatctaacaatctcaatagtttagagagaatttttaacggtcttgaaaattcaagagcataatttagtacatgtggaaatttgcaggacaaaaattctaattaatcctacgaaaattggcaagtaatcctattaggggtgttcacgaattggtttggtccggatttttataagtttttgaaccaaactagtataacagttttttcaatattagaaaccaaaccagaccaaaaaatttctcaaaccaaaccattaagaacggtttggtttggttcgaaaccacggtttacgttgaattaataattatatatatttttttagtaattgtactattattattaagattttaattttattttttcaaaatatatatttaacacgataagtaatagatctataagatataaataatgatataaaaatattctcaaaagtcaaacataacttaaaaatctaaaatttatgcaataaaaaactttcacacaaaaaagtattaaattatacatatagtcatatataaaaaaaaatatatatatacattaattatttattataaacggtccagtccggtttaactgttaattatatattacgaaccgcaactgaaccattacgacgcaaacggtccggattgaccaaaccaccaaaaacggtttccccggttacggtttataatggttcggattgtagttgtccggatttaaaccgcgatttcccggtttatatgaacaatcctaaatcctataatagggttttagtaaaaaaaaaaaaaagaaaatgggttggctaaaaatgctaaggagataaaaattaaaaagaatattttgaactagtcacaaatttctcccactatatatgatagggcatcaacgatacatcacacccccaaattgttgcaattataggtgttttcttttaagaaattttgaatatattttagttttgaaaacagaattcaaacaacttgttgaacatttttttttacattgggaagggtattcgaatttgagacctccgaaaaaaagtgtggaactattaaactagtttatgaccacttttttattttattttctttaagcgcttgaaagaaattattttaaattttataaatttgtttcccatatttttctacaaacacaatttattagtcttaattaattttatttttttttttaattttgccataaaaatttggaagaagtattttgtccatatatttacataaagtactatttttagtaaagtttgtacacttttaccttcaaatatatatttttctattatatttttacaatgtcttataaaaacaacacaaaaacaacatgaaaaatattaaaaaaaataacataaaaataatacacaaataacaaaaaaaaaaaaaactaacatgaatacaatataaaaataatatgaaaacatcaaaatctcgtatttttggtaaataaaatcttaaaaactgtaaaaatatttaaaatttcatacaaccgtatttttataattttttttattatttttgtgtattttttaaataatctattttttacaaatgatgagtggaaacacataataatgattgggcttctacttccaatttggtggtcactttagtgttgaaaaggccatgtataatatatgtttcttttgaaaaatgtgatgttaatgtatcttatcataccaaccctaataaaaaattgagtattgctataaggtactagtggtgtctagtactatttaaagatgatacttaagattagttaacggtattatataaaagttattatattaagggtgacttaatataacttaattattattattgtcaaaaattaaacttaagtatttatttgcaaacgagagttaatttttgacggtaataataattaggttatatttctaaaaatttccgtaggtacctagccattaaatatcaaatcattacccacatgatattttcttattggtatatttaaattaatttttaaataaaaaataaaatttaatgacctgaaccattcagatattgctacatggtaatttacttgacacttaccagtcaggtgcatatagaagttctaaaattataatttagatattattatcgcaaaaaaaataaagcttaagtatttatttactaccgggagttaacttaagtattatgccgcaaat

SEQ ID NO: 184402 - DNA, 4225 bp, Cannabis indica
tcattttgacaatttcagtatctacgtgtcagttataatttataggtatcttatatctcatcatattttaattaaatcatcagtaactacctcaagaattctcatcacacaaatatcaccatttacgacaagctaatcttcaaaaaggtcaagccttatatcatttcgagaagtattatacgagacactcttagaaatccttttattatggatagtctaaaaatctggcatcatctttattattaatttatttaatttgacagagcattaaagtgtctatctttatggtctcaatgtgacgcattattctctattcttaaatttattactttgatggatggagtttgagggggtttataggtatagttttcactttcctaaaagataaaaccctcttatctaagcaaatttcaacaagtacatccaaactcagtttttataataataaataaaaactgatgctttaaactgtaagtaacgtgacccatactattctcccctatcacaacactttcggtttctcttttttattttatttatataattcagtaataatagtctatttttatgtctaaaataaatatttgataattgttaaaaaagacaccaatatataattttaaccatgttttagttaattaataggtgagtaaatatatatgaaaagagtttatatagcttaatctgtataaatatagtaaaacatattaagttataacaacacaaaacaacttataaaaataatgagtaatgttagatacatattcaaattgttcacactaactaaacatataatgatgttaattgttagttatttatattttaaaaaaaatgctaaacagcattagaaactgtccaacaccatgatagattgcatattattttagtgtattcagtattgagtttcacacgtgatttaataaataatataaaaaattgataaccactcacaatgtgtagtgtaatattctatttttaagtgagactatatcatatttagttgtgtagttaaggtagattccacatctttattcaaaaataatactctacttaataaaactcccaatatatcaaaaggaatagtgtttagacgacttataccaatgtaaatacgttttgtcagcataaatttacgttggtaaaagcaattgatattagtacagtaataatttgtgtgtcggtaaaaataacgtctattagacaaaagtaatgtctaacactattacgagatgatattttacaaatagttaacgatagaactaccttaaagtagcaaacaccaagatgtagcatatcaatattagtgtattttgaaaatggatcctatacaatttgatatttaataaataattttaaaaacatatggccttaaagtatctaataatattggtcatccttttctcaaaatacgtttcaagttctcttccttccataaaaaaacgtttcaaagttccaagttcaacccttgaaaccgataaccaacaacgaccccaccatggtccactcaacccatctctttctctctctacatgcctatataaacaccacaacactcaccatattcaaacacaacacaacacaatctcacttcttcttcttcttcttattattcttcttattatctcttttttccccaaaatatggtttcttattcttatcatcattactactaccttctcactttgacgacactccttttagtgtcgttttctcttgtagccacatcctcaaacgacatgtcgtccagctcccgaactgactcagagctaaaagagatttatacgaaatgggtagttgagaaccacaaaacctataacggtctcggcgaggaagacaggagatttcaaatcttcaaagacaatcttcgcttcgtggatcaacacaacgcccaggaaaaccgatcttacaaactcgggttgaaccggtttgctgacctcactaatgaggaataccgggtcgggtttttgggtactcgctcagatgttaaacgacgtgttatgaaggctcaaaacgcaagtcgtagatacgcttctgatgctaatgatgatcataagctgcctcagtctgttgattggaggcaaaacggcgccgttaatgccgttaagaatcaaggaagttgtggttagttttctcttttttccttatatatcttatttttttttgaaaaaaaatatataattgaattgatttttttcttcatttaattagatacacaatatagctattttcctttaactatctttttttatatgtaaaaagaataataatatatgtatcctctcaaaaaaaattaatatttatatatattttgataaaatataaaaaattttttatttgaaaaaaatatatattgcatggaaaagattgccacctttccttcaacctaaggaaaagtagttggacttaccagcttgggctgtttgttggtggatcatatatgggcctatcttactaattctaataggcccataatcaaaagcccatggggttcgtaggctacttaaaactattacttgagctttttgttgaagactatatatgggcttgggcccacgggctcaaagactggactcaattagtgaaagcccagaaagaattagttaattcagttttctaagtaatgaaatggttagatttgaaagttagttaattcagttattttggtatgaacaggaagttgctgggcattttcaacagtggctgcagttgaaggcataaacaagatagttacaggagaacttgtgtctttatcagaacaagaattggttgattgtgacagagcttataactctggctgcaatggtggtttaatggactatgcctttgagttcatcatcaaaaatggtggaattacctctgaaaatgactacccttatgccggtgtcaatggccaatgcaacgcttctcgggttagtcttttaattgttatatcactgtctgtaatattttggtgcatatatcattactagttaaattaaaaacacaaaagggtatttacaaatgggattttttcaggctaacaagaaagttgtttcgattagcgggtatgaggatgttcctacattagatgagaaggctttgaaaaaagctgtggctcatcaacctattagtgttgccattgaagctagtggcagagctttgcagctataccaatctgtaagatccaataaactttctttttattggacttctgtactgaatgggccttaagcgcagacctagcctgtcttggcccaaatctagctctactttttcttagtttctatttttgcatgaaagagacatgagtaactaatttttgcatttattgtattttgaaacattgcagggtgttttcactggtgaatgtggtacaaagttggatcatggtgtggctgtcgtcgggtatggcacagagaacggtgtggattattggcttgttaggaattcttggggaaccaactggggagaggaaggatatttcaagttagaacgtaacttggttggtacaaagaatggtaaatgtggaattgcaatcgaagcttcttaccccgttaagaatgaaggcgatgatcatacaccgaacaagccttacttggttcgcgaaattgctgctgctgttgctgagatggtagcttctgcttaaatgaaaaccatattgggggtggaatggagaaagaagaaaactaagtatggtggcaaagatgcataaaaaagttgccccttttagttgaaacagtaactagtaactagtaactaataactagtaactggtaactagtaacaagttccaccctttgttcccttataggtctaagagtttacaccagaagaatggctgatctttttggtgccttatttggaatcactatgtttttgtatatagattttaatattccaaaactgcaacacataagaagaagaagaaaaagatgtatagtgttgcagttcattgtcattattatcattgaaattttaacctgattttttacatcagggaaaatctatgcagttaatttaatctatctttcttacctttgttttggagttaatttttcactctaagaaattacaacattttgaatacattgaatattgatttttagaattttcaaattttagaaaaataccatctttttcatattaattggaagaaaatatattttcccatctttactcaaaaggcaaaaagttatgtacttttgtggctttgtgtgatctcatcagtggaccttgtgtgtttgtg

SEQ ID NO: 184403 - DNA, 3846 bp, Cannabis indica
ttttttcaccaagaagaattgactctacacgaagcaattgtatatcaatggatttgatgggaactgcagatgcttccactgttagttcaccagtaatggcatctgacagagaacactgagtagacattcttccagtcacccgaaatccacctgttaagtgcgaccacttgtcagcggtgcggtaggattatctacttacaattttccatacaaatatgaactacctattcttacaagacaaaacataatatgatggaggtaagaaacaaaccagattttaattcgggaagaagcgggtgtctctgagtgtcttgagtaacataaaagattaccatctcaggagcaactggtcctgctagaagatcatctaacaaagtttccaaaaaaaaaaagaagaaagatctttcagttatttcggtgaaatacaaatgaaaacaaattatcaagatgaaagaataaatcatcagtgcctccaaaatctacctttgtcactttcaataatgaactctgttgttgtagataatgatttatgaaggtatcctctcatcaaatctgcagttaataaatactttaaaagattttttagttgtcattaattagtgaggtaaagcagtgaagaattgcacttttctatattcacctgaatgctaatatcggcaccatggaaggtctcgtagaatttttctaagttcttttctcctgccttcttgaggtacagagaaaatggtatctgtacaggcaacaaacagaaataacatgaggtgaatttacaatcaactcgaaacagcatcaagattatggaaggaatggggagtttgcagccatcatgattttagtatctattaaagaaaggtgagaataaatgacaacgacatcaagatcaagtatattggtttaaaacaagatgcgacgaaccaaatatcatacaaagaaatgttatttcttgctaactacaagagaccaattaagaattagcatactgtaattataagagattaacattatcataaaataagaactacaccattagaaacatttaaatgtaacaacaaaccgttctttaactgaattcataaggccctaatagtttcgtaagtgataatggaacatcaccaaatagattagaacttaaaagcgataatcaaattcaaataattcaccacaatatactacctctgtggttccggaactaatctttccagaaggtttgatctcaatgttcttattcctgctcgcaagttagacaagaaattgacgttaacacaaaccaaactagatatgaaaagtatcaataaacaagcataacatataacataagttgttgaacagagctaaatttaatatctcaagctagtactgccttaatcctagaattaactcatcttaagtaaacatacaaacaacacaaacttgagaaaagatctgtcaacattactctgagattgaaaccaaactaactctattatcacctttcaaaagtcatgaatgtaataaagccatcgatcattaaaagccaaagccaggacatcgatatcgaattagataagttttcaagggctttttaattcagataaggtatagtcggactagtcaagtcatccaaatttatgtacaagaaccatttaacatgagcactcactaacagctacttaaaaatgaagcaattgaaattcctaattccatggtttcgagtttcaagttttgggttctaaatatggaatagtgcagtagctgtaactgtctcaacacccagaaagactcaacaaagattgaagtatcaacaaaaataatcgtaacaataaaaacataaaactaaaaaaaatggaacacgaaacaatttctactcattcagatcaaaagatgatcatacatccactttcaggttgagaagatgatcaaagaaaaaactttagctagtacacgaaagtgaataacatgatgaaaatccttccacgagcagaagagcccatcacgcctcaatctttacttcaaattgagattaaccctaactacaggagtaaacaaatcaaagactagcctcctcagatgcattgagaattgcctctttgaaacaatcacccttcatctcttccttttccaaaccccaactacaacccaaactctcaattttcaacaactcacagtaatgaggaacttctctctctaacatttgactctctttctaaatagtaacaactatgaaaaattaacttccacaaaaaatttccactatgcaatagaaaatgagttaaaaagttcttacacaatgagtataggcttaataacaccatagaaagactcaataacacctgctgatcctccacgaaccttaaacacaataaaaattactataaatatcttatctagaattcaaactcttaaaccgatattttcttgcatgccgataaacaatcagagatagtttaaactcacctgtagattgacggatccattgacagtgatacgaataccatagtgagaaatcgaagaaggagagttgacgattgattttttccttcaagaggttcctgcaactcaaaatttgacatttacagtcattgttaagtatgataatcgttaggattgagattgagaatataataaagagaacttactgaaggtcggtagattcgattggcatgggaaagtttgagctcaatcgccattgatttcagtctccagaagaagaagaagaaaactggaaattgtatttcttatttaaacttttgttttatttattttttttttaaatttgtaaaacaattttaataactttgttattatcactcatttttaaattgctaattagccaataatataagtatcaaaattttaagtaggtaagaagtataaatttaaatatttatttttaacgtaaataactacttaatatttgtttgtcctcaccatattattttttactttttttaactatttatcatggagtgaattgaattgtctatattggagaatattcttgtcctatgaacaaaagcaaatgacactacttagtccatcttcaaccgaactctaaaatactaaatatagtatagtttcacactatatttactccaataaaacactaaagctatcctcataaatgactttgtctacagtgtctcactatttagccgtagaccacactatttttttaaaaaaacatttttaataattaaataatacttttaagaagaaaaagtaaataattatataaatttagtattaaaatattcttattatattaataaaataataaaataataaagaatatgaaatttggtgtaatttttagtattgtggttggaattgaaaaaaaaaaaaaattagtgttgaaatagtaattttttagtgttgatttaacatcaaatttgggtttcctcattggagatgccctaatgataaggtgattcaagattggtaaaaatagtcactatcttgcgggatatattagataacattgttccacgtggattaaaggtaaaagtattgagtcatatataaaaacatggactgctccacttatcaccaattggttttaaaatggaactccatgattctcaacagtttacaagttgttcaataaatcataaaaaaaggaagacagttgtcgtgatattgataggttgctagatcaaattaaaattgttacataaaaatgtatgctttgattcacaaagtaagtgctctttagattgggattgtacctccttgtgctcgtcaagcctttatgctagacgtctcgaatcctgcataacattgttgtttaataaaaaatttctctttaaaaaaaaacacttatcatgaggctaaaaaaaaaattcttcattaacttaaagcaaactgttc

SEQ ID NO: 184404 - DNA, 2846 bp, Cannabis indica
tcaaacaaaatctgcagattctttgtttttgaacttcgccatgcattcagtaagagttgaggcttgtgattgtccaccagctcatcacgtgccatcacaggagcagtcaaattcttctgttcttccaggagtaagtgcccagtttgtggggcgaccggatgttgttcaacatgaaggatcaaatcattcttcaggctatgcacaatttaagcatgatgacttgttttggggtaataagaagaataaaaggaataagggtcctgatcctatgaaaaaagtttcacaagttagtgagaagaccaggacaacagtgcaagactctgataaacataaaagagttagtgatgatggatttctaagggttttgttttggcaatttcacaatttccggatgctccttggtagtgacttgcttttgttcagtaatgaaaaatatgttgctgttagcttgcatttgtgggatgttacaagagaggtactaaaaactatttgacatgcctttacattgatatcatgattttgaattgtctttgtttctcacgttttaatttattcatagattactccattaacatggcttgaagcctggcttgacaatgttatggcaagtgtaccagagttggcgatttgttatcatcaaaatggtgttgtccagggttatgaacttctgaaaactgatgatatatttttattaaaaggaatctctgaggatggtacccctgcttttcatccatatgttgtccaacaaaacggcctttctgttttgaggttccttcaagaaaattgcaaacaagaacctggagcatattgggtactgttgtgatacaattttttcgtgagcttcgatatatgttttcctttcagtaaggtttaatcctttcaattgttcattgaccgtctctccaaaaatttgcagctgtataaaagtgctggtgaagatgttattcaactttttgatctttctgctattcccaaaaaccattcatccagtgattgtgatgattgctcaagttccctgccttcaatagtgcataaaggaagaagcgactccttgtattcgttggggactctcttatatcgaattgctcacagactctcactttcaatggtgtggaggagatataaatcatgtcttgtgatgcatatgaccatatttgttgcttgaattacaagtttctgtggttttttttttttgcaggcacctgatagtagggcaaaatgtgcaaaattcatcaagaaatgtctagagtttctggaagaacctgatcatttggtaactttagcttcaggaacagttgataattatcattcacgtgtcatttctaggtacaccattacaagtgagctttgtaatcatctttacaggttgtacgagcatttgcacatgagcaatttgcaaggcttattttgaatcatcatgaagatctggaaatgatgtctaaagcttttcctgtagaatgtgaaattactgtatctgatgctgaggaagagtcctcatactttctgaacaacgtttctgatttggatatcagtgaacatgtttcctctgtggtagctgaagagcggtctttatgtgaaggtagagaatgttttgaagaattagtaacagacacttcaataaagatgacattggaggcgaatgcatcttctccaattgaacctataacatcaagtacaacagatattggagattgtcaagatgttgtaccaacatcttgtgatgatgaaagctgtgcattgtacgatttgtctgcatcaaccacacatgttgtccaaactgttgctgatccaatctcttctaagttagctgcaatacatcatgtttctcaggctattaaatctcttaggtggatgcgccaattgcagaacactgaatcagagctgaaggaccaggatagtgaaactccagatacaccacctccatccatggatctttcaatttgtgcatgtggtgatgctgattgtattgaagtttgtgacattaaggaatggcttccaagatcaaagttggatcataagctgtggaaacttgttcttttgctgggagaatcctatttggcacttgggcatgcatacaaggaagatggccagttgcatcaagcattgaaggttgtagagttggcatgttctgtttatggatcaatgcctcagcatcttaaggactcgagattcatctcatcaatgataggttgctcattgttgcaaacaaaattcaactatgaaaatgacaggatgagatcatacaatggtgatgggaaagatgtgctatctagctcaaatggaagtcttactgctgagcagttgtcttcatcatacttattctgggccaaagcatggacactagttggagatatatatgttgaaaactatatggttaagggtgatgagatctcgatagaaacagagagaaaatcttctactgcagtgttgaaagtatcatctgaggtcgttaaggaagttaaaaggctcaagaagaagctcgggcagtatatgaagaactgcagttcatgttctctggtaaactgcagctgccagagtgatagggcaaaacagtgaaagcagcgcaaagtagtaaggaatggagatgtgcactcaacagcttatggcaggaagcataacaaaaatcttatgcaaagataacatctattcacttttggcagatcatgaagatggaaatactagtggcaaaaggaaacattcaaactgctgatgtggcaattgcacacaatagagattttggacttttagcagatgtttctaatgcaaatgaatttgtgtaaagaagtggcaactccaattctgaaaaaactgcgcgaacttcgaaatagcactgacatggagtcatc

SEQ ID NO: 184405 - DNA, 2729 bp, Cannabis indica
gggaaggaagagacacagtttgggaagagttggacaaagatactgtgttagggaaagaaacagatgatgagttgatgtttgatgaggaggtgagaggaggaagtgagggtggttcaggggagtgatgattttctgtggaaaatgacacagtaggaggagtagcagtaggtagatgagagaagtgagatgatgaggactgagatgtgctaggagattgtttaaagggaaaaacttgttcattgaacaagacatctcttgacatgtagatttttccttcaggagagaggcatttatagcctttttgagttaggctgtaccctagaaaagtgcaaggtatggatctgtagctcattttatgtttattatatggtctaaggttgggaaaacataggcagccaaaggtctttaaggctgagtaatcgggttttgtttgaaaaagtctttcatgtggtgtgagattatgtagcactctagtaggtagtctattaataaggtagacagcagctctataagcctcatcccaaaactttagaggtaaactagagtgagctaataatgtcaacccggtttctacaatgtgcctatgttttcgttcaaccacaccattttgttcatgagaatgaggacaagacactctatgaatgattccactttgttctaggagatttgtgaaagacctaaactccccaccccagtcagattgtatttcttttattttgaggtttaattgaagttcaatttgagttttgaacttggtgaaagtgggaagagcctcatccttagttctaaggagatatatccaagtgtacctagtgtaggcatctacaaagcttatataatacctatagccattggaagattcaacaggggcaggaccccataaatcagtgtgcaaaacctgtaatggagtcgtgtagacagtttgtgagtgaggataaggaagtttgtgatgtttgccaaggcaacaagcattgcaaagatcaaaaacatttttattgctattagaaatgttacatgattccattacagattgcacagtggctttggcaggatgaccaagccgattgtgccacaaattgaaactagaaataggtacattggattgggaattaaagcaatgaaaattgatgtcattagaagcagtggaagcttgctggtgtgaatcagcagtggtagtgaggctcgactgagatgaggtggtgggttgatcaaatttgtacagaccattttcaacattcccaaccaacaaagtcttcatattgacctggtctttgacacaacaatgattagggtgaaactcaaagaagacatgattatctttagcaaatttgttaacactgatgagatttttggtaattgcaggaacatgaagaagattatgtaaataaagttgttgggaagtgaaaggagatgtaagagtggaaaaaccagtatgttggatatgcaaacctgagccatttcccatgtaaatttgatctgagccttggaattcctgagtattttgcagatttgaaacatctgaagtgagatgatgagttgcacccgagtctgggtaccaactcgagtcattgacagtctctggtgtagctaacatggcttgcatttcagcaatatttgctgttccaccattgaaaccttgaaaagattcaggtccagtgaaagttttatcaaatctgtagaagcacttgctgacagtatgtccttgcttatgacagagttgacattgaactttagtgttggatgttcctcgaccagctggagaagaaccacgaaatcctcctcgagaagatcgatattgaggggaaaaaggaggatatgtggggaaaggaagcaatccatagttattatacagaggagtgggataagatccaaataaaggataaccagaacgaggaaaggatgacatacctctaccagtatttggatatggagttgcttgtagaggatgagagttgtagttaggtcgaggtgcagagttcttggtttgagcagcaagattaacttctggtttggcaacatcaagctcggaatcagccatttcgttgcgaacttcttgcgccatgagaagagactcaacttcagcaacagagtaagcatcttttcgagtggatagagaggtaatgaatacagagtattcacgaggcaatccattaaagattgcttcgatatgatcttgagtgggtaaaacgtgacctatcgaagcaagagaatctacgagatgcttaatcttgagtaaatagtcgtttagcgaaccggtgagcttggttttgcgaagttgagtacgaaattgactgatttttgctctattttgagcagagtagtattcttgaagattggaccagatctccgccgccgtattgcatccgaccattctggtgaggatcttttcagacattgaagataaaagccatgaaaccagtagactgtcttgaatatcatactcagtgaattcgtcagagactcgattttcaagttcatcttcagcggtggtgaattttcgtggaacagactttggatcaagaaatttaagaagacgatggcctttaatggcagcaaaaacttgatgtcgccatggcaggaagttgttttcgtcaagtttaaccgataacgaatgattgaaggtgatagtgtttgattttggtaacgaagaagatggacttctggaaattgagctagaatcggccatggacgagggacgaaggaccgttcaggcatctgataccatgttg

SEQ ID NO: 184406 - DNA, 2206 bp, Cannabis indica
ttttcagagggtacttggtaagtggtcttagctgaaagttaaaaactttcaaacaatatgtataatttctttcttttttttatgtttggattgaaagaaatgatactaattaattttgtttgggtatttgaatattcaggctagaaaagctctgagagctttgaaaggactagtgaaactacaggcactagtaagagggtatttagtaaggaagcaagcgactgcaactctccatggtatgcaagctttaataagagctcaagccacggttcgatcccaaaaaactcgtggcttcatattcaacaatgaaaccattagtaggtttgataacagagcacgaaaatccatggtaagtttctttcttaatggaattctctcaatacagttttcttattttgggtcttttgcatttacattatcttttgttttcggtttaagtccaatttgcaggagagatttgatgatagtaaaagtgatcacatagctcccattcatagccggaggctctctgcttctttagacacaagtttcaccaccattgatgagagtcccaagattgtggaagttgatacaggaaggcctaaatccaggtctcgtagaacaaacacctcagtctccgatttcggagatgacccttcttgccaagcgctctcttctccactcccatgtagaattcccactcgaatttcaatacccgattgtcggaattgccaggagtccgagtggggattcacaggcgacgaatgccggttctccaccgctcaatccacgcctcggtttctcaactcagcagcatctaatgctccaacaactccggccaagagtgtatgcgctgataactacttcaggggatatgggaattatccaaactacatggctaacacaaagtcttttaaggccaaactgaggtcctatagtgccccgaaacaaagaccagaaccagggccgaagaagaggctttcccttaatgaattgatggagtcaaggaatagcctaagtggggttagaatgcaaaggtcatgttctcaagttcaagacgccattagtttcaaaaatactgtaatggggaaacttgataggtgctctgatgttgggagagagacagagaggacctatttgcagagaagatagtgatctagttgtttttggttaataaatatagataaggaaatttatggtaacaaaagctagctttgcaagcttaaatcctatagttgagttggttaagtgtttgaaatcacaagaatattgaagaatgtgtgtagattcaaagttagagagtaatgtataattaaattgccctttgtatctgattattgtgtcttttttttcaaagtttttaatgatggaatttacacatttttacactgcatattccaaaccccaaaaagaaaaaaagggaaaaaaaaaaatcattttttggtgtcaagacattgcaattgtataataatattgaaatttgaatcttttggcttttacagtgtctactctagacacatgcttacaagattcacaagcatctttttatttttttaatgtgttgtagaatttctttggtaattaatgaagggatataattggatatgatgcattgatcattggagaaagatgacaagacaattgtataaagtatttaatgttacacaaacaaatatttctttcccccacatgtgttgcacaatttcaatagcttgatgtaatgtttttcactctcttttctttggagagacatttcaaaaatttataaaagattttggtgtagttttcaaactttgtatgaagggaacaaagacaaaagttaaaaaaatataatagaaagaagacaaagttgaattatttgattttgaaatcgcccacttctacatattcttcttgtaacacttggtcatttaagctgaagttgtgaccccacttttatgttttaaactacatattcttctcctatctttgtctataccctctactctctggctactctattttggagccacttgatcagtaacttcataattaatccaacctgttatataaaattgaggataaaattttacctggaaaaaaaaaaaaaaaaaaacaagatgggttacataaatattacagcacaaccctatagattttaattatttttactgaaaaaatatatatatttctaggtcaatcatatgagaaatcattggtgttattaatggtgggagacaaaaacaat

SEQ ID NO: 184407 - DNA, 4408 bp, Cannabis indica
atatatatatatatatatgagagctagctgagaaggacctccactctcatcaacctaaaatccatttatatctcatctcttctctctttttccatcccaataaatatatatatatatatatataaataaatatcagaatcagatacctctgatttttttttgttggcttacagttacaccacttctcttcttccggatttttctctctgctaaatctcccaggtaatgttaatattcatcactttcatatcattatatatatattttggtttactttctctgaatttgtaatgtattaagtcatcagattaacttggttttgattaaaatagatccgtctcactcgattatagcttttatttttcttcatcttctctgtatttaatttcttctttttaattttagatcatggttggattaattttattactgtaatatgattaatagttaggtacagatgaacttggatcatgttttaggggttcggagaatcccaagggatcacaaataatattccataacttttactctatttttttattaatttcgtcatgaattatgataatggtacagttcatcattattaacctatttgatttaatcaacctctgataatatttgtttaacaacaggttgagataatatacaaaaaaattaatattatcattattatttaagattattttgctttgttgtgatctccctttcaacactttccattttttaatactcaaacaatagcgatgaaaagaagctttggtgtgattatttattataaaacaatgcattcaaaattgaaccaaaacgacatcaaaagttgcgtttcagtctttgatattttcgctgtaaaaagattactgaaagtaaagtaaacgctttgaacttttgaatagatttttttttttggtaatggagagacttgacttttcttccagcattggctggtcaagaggggtggctgggacccagcctgccttatctcaaccgttagattttttttttggttgtgaaaaactgaaaatattttattttgttaaatgaataatttcatttaaatgtatgtactgtagtctgtactctgtacatttttttatataattatttggaccacggttacatatgattacgaacaaagggaatatagtatatagactcatagagtcaatgggaatgggacaccccattgtttagaaattgtatttgatattatcaaataagatacaggaaaaaagaacaataatgtaatagcatataatatatgtataagtttatgcatttgtctaacttaggcttaattaattcatattcattcaggttaagctgtagttcttgtgaacatgtttcttataaaaagaaataatcagaatcatcatgtggatgaggttgcagaaaaggaggaaaaggtaatgcatcttcagtacttattattacttattttttagtatgttatggctcaatttattctcatcgatttcaatttctactttcaggtcaagcaactcagggaggctcttggctcattaagtggacgaagtttaaagtactgtacagatggatgccttagaagatatttggatgctaggaactggaatgttgacaagtcaaagaaaatgttggaagagtcacttaagtggagggctacttataaacctgaggaaattcgttgggtaagaaatttttactactttgatagtttatatcattatagagaagagaatatgtgtttgttaacttttgtgttcttatgttgtattccatttagagtgaagtagctcatgaaggtgagactggcaaagtgtccaaggcaaactttcatgatcgacttgggagacctgtgcttataatgagaccaggaatgcaggtttgtattagtactttttacaacacccttttcggaaaaaatagtgtagacacataaaaaattggtcttttgaatattttgtaatctatttttattactacagaacacaaattcaccagaaggcaatattcgccacttagtctatctcattgaaaatggtatcctcaacttgccagaggatcaagagcaaatgtcatggttggttgatttcactggttttacaatgaacacaagcatttctgttaagacaactcgtgatattatcaacattcttcaaaatcactaccctgagaggctagctgttgtttttctttataacccaccaaggattttccaagctttttataaggtttgatttgatgaaagatcattcatacttaacaaaatgtatttatgtgtttttactaatgaccccttttgttaatctgtgtaggctgtgaaatacttccttgatcaaaagacagctcagaaggtgaaattcgcttacccaaaaagcaaagacagtgtagagctaatgaagtcatattttgacattgataatcttcctattgagtttggtggtaaagccacagccactttaaaatacgaccatgaagaattttcaagaatgatggccctggacgatatcaaaactgccaaattctggggttttgatgacaagccatctctaaagacaaatggtcagtttgggccagaggtggtggcaccgaatcccattcccttggctccacctgctagctgagactcaagagaaatgactcttcccaaaaatcttaacccagttgataaatctctttagctttatattttggtgatgggaacatgaacatttgtcttgtttagttcttttactgttgaggctattcacatttatagaggttgataaaacatttgtcttctattctcattactaaataatatgagctaagagacttgactaaatctcacaactttactctttcatttactgtaatgctttgtgcttcttattaatgctattagtgtttattttggcttcaaatttgttcgagttaacagaatcatttattgtaaaaagataaagacacttcaccaagtattcacttggggaattctaatacattcaataaaatacataaacatagagattactaagtcataccttactatttaattaaagaacctttcagcaaattgttgtgtatgtattgagaaaatttatgtggagcaatattcagtaaggctactcataaaaaaaggaaaaaaaaaagtcaaatatatctaaggaacaaaaagccaaaattatataattataagataacaaaggtggtttcttattgatggccactaatgttctcatgtacaggagtaacagatggttacttgatcagagttcattggaataaaggcactcatccacaagttggcaaatattaggattctccagagctgcagctactctttctttatcatttaactgcttatttactacaaaatatcaatttgtaataatatatcaacattagtttccaagacattcaaaagttaatcttatgaagaaatcaatgttagttttctacatgacttgaaaaaaatttcttacctgagtcttcatttgcatgagatcctggagacaccttaatgtcaacctgttgaattcattaataagcaatttatccaggtttcaatggcaataatgaagttggtgattatgaagattatttgttactattactataattaatttttcaggtctaacaaattcatcatcactaacaaatatttatgctgcaattcccataatcacaaattcttattgataaggttgttttaagctaagctaacattggtgatgacagaattagccttattcctaacccaaattcactttcaatattaagggttaagattataatgcccaattcatgtaaactgaaagattaggccttcactgaaccaaaggctcaaaagggtactgaattatcaactcagcagttacatacaaaaactttcatcactaataaatacttgtattgaagcaacgattttttgagtctttctaagatatcataaaaataaatttaattatgatttttttccccaaactttcatagatattaaatcgtacttcctaaacttttcaggatgttaaaaattcttctgaatcattgagatcgttagattaaggattttcgttcaatttcgtttaattttaaacgtctattgtgacaattgtccatatacctatcatgcgccaaacatttacttgtaccaaattgagccctcgaacttccgttcatgctagctgctcattagtaatattaaacggaatagaatgaaagtcctttgctcaaacaatctcaatagtttagaataaagttttaacaacatcaaaggtttagaaaacacgatttaatactgtgaaaaactaggaaaaaaatctaaattagcctaaaaataaaaaggagtatgaaactacatcttaaagcaaaatttaagtgtaccttataatgtggtggaaaataatgctttagtttaactcgaaggcacaaaccaatcactgttgcc

SEQ ID NO: 184408 - DNA, 994 bp, Cannabis indica
tgctgatgctgtgactgagttggcttatagaaagtactgaaaaatcacccaccaaacaaaccaataagcttcttttctttgatgtaacttgatttgagtttagttgtgtgttttgtatgtaacctagtgtttttttaaactactactatttcatgaatagaatttaaataaatgactaattgagtattggctttattacgatatatatgtcatataaatgacaaccagtattggatttggctccacttcactcactaattggcaagagttagaaataggaaaaagaatattgctattgactcaaaaaaatgacttaatgttatatttttctcaaaatacaattagggataaatcgaaatcacttcatgaatcctttgagaaatttccttttaactataatgggataggcatcaaaatattctcatgaaatttcttattcctaaccttccaattccaaatagactcacaaacagtggcagcgaaagagagttaaccaatcaactaagtcacacacagaactaatcgaaatcaaacaagtctaaaatgctccatttgcttgcaaaccaaaaagcttttgttgtggtgcacttctagacaatatttgtaaatctttcagagaacataccaattttgtcaccagtgggaaagcagttagctgcaattttccaaaggaattattagctgccatttttcaaaggaattaccttagtcttttgggtaaagggacacaccaaatatttctctataaagtagtagtggatgtgaatctatgtttatttttacaatagtaaaaattgatgtaaaaatgtaacaaaactatcttttatactagctataattcaacttttatattttctattgaagatgatcttactacgtatatagaccaaataatataagcgaaatttctaattatgactttctacggatttgaacaaataacttttacaaaaactaaaaaattgttctaatatataaaaaaaattaagagtaa

SEQ ID NO: 184409 - DNA, 2795 bp, Cannabis indica
tagacctcaatacatgaatgttgcataagcagtgcagatttctttcaccctttaaatgataaggggttctctgtgatttacctttttgtggaccagtgcatacgggttcatatatgtttatatatatgtatatatactaactctcagttattcatgcatttaggattggttggacattgattttgggattgcagaaggtgttgagtttattgccatatcatttgtcaagtccgctgatgtgatcactcatcttaagagctaccttgccgcaaggtctcgtgataggtaattttctctcttagccaaaaagaatggaaatggaacatccatccctcccctttcccccttcttattcctgttaggcaaatttcactatgaggctgttttgaagtatgggagttttgaggtgggaatgagaatgtaggaactttctcatgttcttaccaaatttgaattttaaaataatctaaaaaatgacaaataaagatttttatttaagaaagatttgtaaagccttttgtaccaatattttagtttgaaatttgttcaaaaaaaaatattttagtttgaaatgagaaatgtaataatattaaaaataaaataaaagataactctcttttttaaaacttaaatttgattttagaatttaataattgtattttttattttattttgctgagtattcgtttcatgagtaagttcatttatgaataaaaatctgaaaaaaaaaaaatatttgtaatctcttaaaatcacatttgctctttctgtctttcagtatactatatccataaaatatattgttataatttatattaattttatgaaaatattaaaaattaacaaattcatactcatgctattcgtaactaaaaacataaagtgacattcttaggaatcagatataagattccaatggacaacaaaactttcgctaaacacagttaatactagtttccaaactatcatatttgcctcctcaactttctcattattatgaaatatttaattgcttctacgaaacgacgcctatatgtctcttgtatctaagtttctttagttgacaacttctcttatgcttctttctacacgtatatgtgcagttcttctctatgttccttcattgtttccatcatgatacaaactttgaaagtaatggacttatgcttttttgatgcagtgatattggtgtcattgcaaaaatagagagtatcgactcattgaagaacttggaagaaattattctagcatcggatggagctatggtagcaaggggagatcttggtgctcagataccattggaacaggttccctcagtccagcaaaatattgtgcaactttgcaggcagctaaataagcctgtcattgtggcctctcagttacttgaatctatgattgaataccctacacccactagggctgaagtcgctgatgtttctgaagcagtaagacagcgagcagatgctctgatgctctccggtgagtcagccatgggccagtacccaatgaaggcattggctgttctcagaagtgttagcgtgagaattgagaagtggtggagggatgagaaacagtacgatcctatggaactcccagacattggttcttcacattcggacaacatctcagaggagatttgcagttctgctgctaagatgggtaagtacttgttagtcatatcttcttatcgctaattctagttcagtggccatctattatttgcttattattatgctctatgcttggatatatttcttgtatttcttgaaaacagggcaaggcttgcatgaaattaaccctcggacaattttcatgtgaaatttattaaaattaatctaaaatggaatttatagaatacacctatttgaatgttttaatgttactaatagaaaaatcatctaaatgtttattttctggttgtgtaagttgtctacttgtcatttttgcatctctttacttggaactgtatacagtgtggagatgcttattttaagtgtaaatggccaagcttattgcgtattcacaaagttattatgctattatggggttgtgaatgttctttgttctatggttgatcttatattgatttgaattgtatgatttgtatgatttggcagctaataatttaggggtggatgcccttttcgtctacacaaagacagggcacatggcatcactcctgtcacgttgccgacctgattgcccaatatttgctttcacttccacaacatctttacgcaggcgtctgaatttgcaatggggtctcataccctttcgcctgagcttctccgacgacatggaaagtaatctgaacaagaccttctctttgctcaaagcccggaatttgatcaaatctggcgatcttgtaattgctgtttctgacatgttgcagtccattcaggtcatgtatgtaccttaagagctatcaaaactgctttaatccaaaatattggtttgaacagtttggtagatggtggaaagatatggagaattttaacctattagagtagtcatttttccttatcggtccaccgttggatttctgcttccattatctagattacatgtcaactacatcgatggtggattttttctgatttgtcatgaaattgttcagtgtgaatgccccattagatgttttgacatctggcttggcaaatgatgcattagtgtcttctattttgatgttagttaaaacagtttagttttgtgtattctattgtaatatgatttgaactaaaactttctttatatgaaaactaggaaacaaacgcgcggttttaaaaaaatcataa

SEQ ID NO: 184410 - DNA, 855 bp, Cannabis indica
tttttttttttttatatagaagaaaaaaacttgagttaggggtccaatccaatgtttatatgatttatgtacaaatacgacatgtcgtacaattgatgatatgaacgaaggtatgtcgtttcacagaaacgctgatgctttcaacttctccttcttcaccagtttgcggccccaaactctctcccactctctcggtaaacagccattgcagttctcagaatcttgaatcgttaccttacctggatttacattgtcacattcaagcttcgaatttataaatcttttttctcaaatttcttatttcaaactccaaattattttagatcggtatcttcatctttgtctttgttcgttgtgaattgaaaatcaaagaaagtgttgatgaggattcgatgcggggttttatgctctctacgccataacgccaatacccagttcagaaatctcgctatagaagccaaagacccggactttacccaagttgcaatggaagtttctaagattactcgaatgagacccaggtgggagcagactattctctccgactatccttcctttgatttctccgaccctaggttcttccacgagcttttgaagcaccaaaacaacgcttttctttcgcttcgttttttcacatgggtaagctctaattctgggttttcacctgattcaatttcttgtaatgtgcttttcgattcattggtagaagctaaggcatgtaaatctgcgaaaatgtttcttaagcttactggtttcactcccgaaccggcttcattgggatgttattttaggtgtctttttgaaaatgggttggttgaggaagccatggacgtttttgctaagttgaaaagtgat

SEQ ID NO: 184411 - DNA, 2834 bp, Cannabis indica
  modified_base (191)..(191): a, c, t, g, unknown or other
ctagattggatgaggatgatgatgatgaagatgagaaattcgtaccttgagaagctcagggcctctaaaaaactctggtaggcaatgaaaatgggaaggattacagaagccacaaagaacacgtggttttgaagcttccaaaaagtcgtttgatggtagatgggttgtataatgatgctgttggagattangttttgccaaagctgggaagtagaaagaagtcaagaccggagaaagaattcgaggatatagactacatggccgaagaagaagtgatatccgatgaggaacctggatctgctgcgaagagttaaaaaaggagtctcctagtccttatgtgcaagaatggaaggaatcaatcccaactacacgaactagggccatgcagcaaggccaagagaatttaaatgggttgtcagcgagttctattgacgtttcaaattacttagtttcctccaaatctagaagtaagtgttttcttttcctctttaatgatttttcttgtgtgtgtatagccccctggtacatatgcatgtgtagtatctaattatctctttatcaccctattttttggctgattacaggaaaaaaggataagccctctgaactggaacaacaattaaagaaggctgaggctgcacagaaacgtagaatgcagtcagagaaagcggctcgggaggctgaggtttgcataccatgctgcattattatggttaacatctcttttcatgaggtttcttgtcttatgaaggattttatacttttaggctgaggcaataaaaaagatacttggccaagattctggaagaaggaaaagggaagagaaaatgaagaaacatagagacgagtggttacaggtgattgcaaatataaggaacattcttcttttgtgaaaccttgttatgatacattgttgactatgagtctgtgtctgttgcttcctgcagggaaaagctgccaatgcccttatacttccatcaaatactgttagatgggtcagtaatccgagtggatccatcgttacattctccaatgatattggcttaccaagtttatttaatccagttcagtgcaggtaaacaaggttttacttttcaactgacaacaagtagttctagctttatgttagaactagtttaaataaaacctgttatgcttatgtgatgatttatttactggacataattttcagttatcctcctccaagggaaagatgtgcagggccaaattgtacaaatacatacaagtaccgagattcgaaatctaatcttcctctctgcagtctccaatgttacagggcattgcataagaaattgcaggctcttgttacctgctgatgatcatttggttctctaattgttcccatattaactctgctaagcattttttttgtacaatgctcatctcaccccttgaaaatttgtaaatcctgacacaactctaacatgattagtaggatttggtttgtatcgtactgccatattttactgatttttttttagatctattatctggaaataatgtagatataaattgcaaaatttgatttcttactctgcaaggcaatttcatcctctcaagtgaagttagagcaagattgtttggtgggggaaaagaaaaataaagctagaaaaagaaactattagaacaagaatctttttgctagatgtcatgtataaatcaatatataatttaattaaagagtattttgatgatttcataacaatctgtgaacaaatttgagtaaaattgtggagaagaaaatactattttaatacctaatattcctttgcttttttcattactcaaaccaaaacagaggtaacatcgcccatgtcatatgaacagttgaataatatattattattattacaatgtgtattttaagataataattataatatgttacaaattatataaaaaaaggttataatagatgtctttcttttaactatatagtatcagttcagaatttaagctttccacgcttgtaacaaaaatcatccctatgatcttaagaatcgttcatgaaaaaggcaccatgtccactagctttcatgaacttcttcaacaaaagagccacaattgcaatggtaagtccaacagcagcccatgtgaacattcgatcatcggctggtttcgggaccctggttgtttctcgcctatgcatcacctgattacttgtgtcattgggtggagccacaaatgatgttctcatctctgcaggtacaggtacaggtccggcattggcatctgcatgtacttcctggcgttcttcaatggccgtctcctcttctgatgcatcgggtagcccctctgcaacaggcacgctactcacaacattctgagaactcgcctgagcatcatcctctttagaaggttgttcttcaggtgcctgcgatgggctgggttgaggaacaggaggtgccttactttgcatatattcatgaatctgataaacattgtgttagttatagcactattaagagtcagagaatatgaatgaaaactagaaattttgagctaaatcatgcaagtgtaacagtctaacttgcctcatcaattaatttttgacgttcaggggtaccgaatttgggtggtgtatcccgagatttaacagccagagcacgcctctcttccttcttgtagtctagtgagcccaatgcaccatttgggcttgtgggcataaatgcaatcagtgcaactaaggcagtccgcactgccaacaggaacagcataattaataagcaatgaacacttaactgtatatgccttagaagtataaaatgactttaattaaaatcacacacaaaaaatattttgcaaattgactt

SEQ ID NO: 184412 - DNA, 3350 bp, Cannabis indica
caaaaaagaaaatatacacttagtcttaagttcataacatctataacatgaagttaaaatacaaacaaaaaaaaaaaaaaagaaaattaacaacattgcttattgctaaatcatttaaaaaaaaaaaaattaaaatagtgcttttaaataaagaaaaaaaaaactatattcatataaagtgggccccaccaggccattattgggcttgggcccaacatttagttcctattatatattatttgaaattttttatactgataaaccggccgagaaagccactccggtcgaaggtagccaagaagacccgaaaatgaactgtgcaacggtgaacttactggcttcgacagtggatgttatgacccgataacccgaccatttgacccgttgacccacggccccacccggcccggaattcatatactctccgtaataacacgtgttaagtgcaaaattactcgtgttccattctagccatccacgtggatggatgtgatcacccatgtacgtcatcatgtacacggttctagcgtacattttccacggacggcccagatacgtcgggaagctacccttcgaggcttcaagatctgacgtggcaaggatccgtgaagcgtggatcgatatacccgtattttggttcgggtcttttcggttttgggccgtgatcgtgtttttctgttgggccatgggctttcgtgcgtagattgaacagttttggaaaaccacagcggcgtttccgaatatgaagtcgactgttccgtaaacttcgcactcgcggaagaactggcgattggaatgcacgtacagagtgtcttggtatccgaggatttgacaacggtaaacaaccgcgtggtctgcacctacccggagtgcgacggcttggtgtctagctgggccggcccagttcacaaatgtgatgtcccgagctatgaaaccagccccagttgcagctgttttgaaaggacaaattagtaaatttacataaaggattgattattaattaaaatgagatttgagtgtgacccacccacgtacaaataattatgttattatttttcattcattaattataacaatttagaatttgagagagtaacgttgaaataatgtcattttctttctaaataatactatttgattttgacgagagacaagaactggatatattttgtgcttggattttgtgtccaatatcagaaacattctagtttgttcagattaatactaattaaattccaccattttttttactggaattgtgtgtaaataataataataatttttcaacttaaaataattaaaaataaaacaattggatgaggtgaggtaaacgtcatatatatggacaggaatcttagttgaggataagccacgtggacctgagcattaaacattatatagtagtgcgttgtagagagactatgactatgactatgactatgtgtgtgtaattttacgtagttattttctaattataacaaagtacacagaaatataaaacaatgatttcttaaattattgaaaattttctggacaaaaataaaaacacgaaattgatatatttaccgaaagatgctgtgtggaaagttgtcatgttctcccacacgctctttcctcctgaaatgactgttttgccctttccatctccaataaacatcaaattctttttcttccttcctaccttcaaattattctcttcgtacctgacatttttttttctttatttattagtatttcaaagtttaaaataattatttcaacattttataatgtacaaaaatacaaagacaggaaagtaactcaaaaaaggtcttgcagaactatctcaaaaagtttagtttttttttcctcaaaaagttagttttttttccaatgtaaaaaagaaaaaactaaaatcaacaaaagaaaagggtataatagtaatttaaaatacaactacttaactaaatgtagtcacatggtttatagttaggtcttatgattacgcagacgaattcaacgaaccaatcacttcaataaaaccaaatttatcaaaaaagcaaaagtttgaaaactcaatttcatgcaactaccacgcacgagagatagttatcatatttactttttactgtctatttttaccgtaaatcagtcaatttaagttgtcaagtgaaattaccttcctgccctcacgtatataatagtccgacgatcactgtactccggtgctttctttattgcttcagtaatagtcttgtaagtcccatttccgtcttttgacacaacgatatcggcttgtatcgccgagacaggtaaacccaatagcctcctatcatttcgtttcaaccatctcgggaaatctcccgagatattgtcctcctcttcattctcagccgccaataacctcctcttgttctgaatcggaactcccgagaaatcgtcattaacacttccagaaaatagcgccagacaattactcacgagttcagataagtccttcaatttctcggccacttgagtcttcacgttcccgttcaccttgggcccaccttcttcgaacccttctccacaggtctcctggttcgtcaacgccgcactcagccacgtcaccacgtcatggttggttgatcctccgccgttaccgatcgagacggaactgagcgcacgcgccaccgcgtctacagaatcgtcaagaagctcgaggcaaacgtcgtaggctgagcgcgtgagcgagtccatctggatagaggtcaactctgaggttgaatagagggctttgctaaggtgctgcagcgtcatattgaagctaatgtggaccagatcctcctccgacgcgctcatcgcgcccggaaaatcaagtaacgagttcacgcaaagattcgggtaccgtgttttgctgcaagccttggaaatcgcctgggtcggttttcggggcatggtagttccgggttgacccgaagctcgggttcggaccccgattaatagcacggctgagacagccgaagcagctattaacacaatggagagagcggctaggaaaatgagcttcttgtttttttttctcccgtgggttgcgctaggcggttggtgtgacgtggcaatttctgattcgttagattgtgccgatgcacctccacgatccgacggttctagtttgccgtaccccatttctttattaaattattcttttaagtggaaggaagtaaaaatttaagagaaagagaaaatggggctttaaatgttgaagaggttggggtatctatatatatagattttgtagtagtagtagtattagtagtagtgtttatatattataatacaattttcttgctctttgtatagatatggtgagagagaggagagagagagag

SEQ ID NO: 184413 - DNA, 2138 bp, Cannabis indica
agaagaagaagaagaaaaatgagtgtcagctgaccacaatgaacttattctctaacaatgtcacaatggcaacaaaaaaatttgacaagtgaataaaaaagggatgcatcatgaattaaaattaaatttattcattcctacatatcttgactctatttttattttttgctcaaataaagatcgaacttgcccctttccccactaattgttcttcttctaaccaaaacttttttaaataaatatttcaattttatgtttttgtttacagaaaaaaaaaattagcatcgttaaaattctaatgacaaactcagtgaaaaaatctcaattgaaaaagagttctaaacaaatatatcatcgataaaaaagaacgattaattatggttaaactacttacctttatggtttgttagactagatttccaaacttatttttaactgaaagctacacaaattacaacatttgttacatttaaatatcctttttctaacggttaaactctacttgtatcatttgttacacttaaatactcatataataataataacaataataataaatattgatatgaattatgtttgcctagaatctgattctggtgacgtggatatcaatattttacatgtaggaagaaagaaaatatctcagagttgagtagttccgagtcatagcagtcgacttgggaggggtccctagccctgcgcccagattgattctggacctccaggacgggtgtttagatcccgccaagtagcttccaactcaccatcttttagtatttcacctagtgcccaggttgacattccaactagggtttcaatttttgagtttgtctcagtgcaagtctcaaacttcatactttcacatgaataagacttgccactaacatgttagaggcatcacaataagaatctgaacactttccgtttggagtacctgggggcccggtgctcgggcaacctagcgatgcacccaagctctcaggttgacatattgtcaacttggggaacttccaacaacattattaaaagagtatcccaaacattttctttgtctccatccaaaacgaggaatcaagtgctatcgagaaagaaacagatcgacttggaggccaaaattaggacccagcgcccaagttgacttggtgcttagtcccagcgcccaagttaacatattttcaccttggtccattttcaacagtagttcagaagaagtcttacaggcatattctctagttttgtcagcaattaagattttggtgctttcgagaaataaacggagtcatctgggagccaaaattgggacccaacacctaggttgacactggcgttgggcccagcgccttagttgacatttagtcaacctgagccatttccaatcagtcctttcaagaagtttgtcaggcatattctctgttttcacaaataactgagatatgagtaattctgggaatcaaatagaaccatttggtagaaaaaatctagacccggcgctcaagttgacactgtcacaaggctcagtgcccacgctaacattttttcaacttaggatatttccaaccagttttcccaaaaagtgttctaggcatcttttccattttaagtgttgacgcgaaaaagtggccaacatcagctcgctagaatggtgagatgaataataagtttaagtaaataatttaaaaagacacataaaatttatagtagttcactctccatgtcgtgatggtaatggagccaccacgtttacatatgtacgataatcttttttcttttataaggtttatcaagaaaatgatgattgaagaaagaagagaaatctttacttttggatagtaaagtaacggttcatgtgaattgagttgagacttgatagagctacatgtacatcactactctacctactatctatctatcttatatatcatataatgccttttagttttacgtgtatatatagaaactatacaaacatagaatattcttgggtatattatcaattccatataaccctttatttacgtacgacgcctaaggataataattttataccaatagggtcaagttccaagggggtacagtacaccctacctttattcacagtgccctccaatacaccaaaaactttatttatttttttttaa

SEQ ID NO: 184414 - DNA, 1725 bp, Cannabis indica
atcaaatttacttattaaaaatacaaagggatagaatttacaattgctgtatatttggatgtaattataccgatgtgtactaaatgtgattgatttatcaactttttgcagttcccaatcctaatttgttaatgtatgctgtccttttccctatattatttcattttggatcttaactctaacccaaacattgcctgaagtagcaaaaacacgtgtatatgcagaaactcgaatgtaaacattattctttcattgttttatttttatatgagaaaagaaaaatacaatattaaagtcgattttacctgttgtcatataccaaagggtcatcatcaagttgattgtttgtgtagtatagactatattattattatataaacaagttggcatatacatcattgtatatgtagttttctgtttttttatgcttttttctttaatttgtatttgtatctgaactgccaacatttacaacatatctgttacatgttacaagttgcaccgctacatatattattcaactctatctttgaatcttcttcattttatatatcatattatatcatatctatctattaatattatcttcttttgttctatttaaagatgaaatttatgtatatcacggtaccatataatatttagtgatgatagtaacattaatatatataaaactacaacaacaaagggcaatggccttgtttcattaatattatcgtgtgaattggtttccgtatgggttttatttgaccgatacagatagagaaaacaatttaagatgagtggtataccaccaaatttttattataattttttagtcaaattttgtctgaaaatatatatcaaaatatattttttatcaatttttttaaggcggtgtttgttatagttataatatcatctttataaatttttgaatagtttataatactgaaaaataggtttgaagttttttgaacatgcatgatcgtaaattggaatattaggaactctattttcggtacaataaattatttagaaatgttcaaaaatttacaaggtggatattataactataatgaacatcactatgaaaaaaaaattaaaaaaaatattttaacatgtgattttaagtttaaaaattgactaagaggttgtaactctcaggttttattattactaataaggtttctataattaaggaaaaagtgtagaaaaaaagattatgaggttaattttgtttttaatatatttataattgttttaagttttatagactatatgacatttagaaaatatttttataaggattcaccattgtttttatctgaattcaaacatgaggaatataaaatatttaagaaaattatcttttcaattccgaaataaattttttatattatactcaagttttattttatttttctaaactataacttttcaaaaaaaaaaaaaattaagaaaataggttttcttaacattctctttttccctaagttacggggttttattttattatatttttttattatatatatattttgatccaatgacttatggtcattaggccatatagttacctagtttgtaatttactgctatttgatgtccttttcatatatatttaggtgatgactgtttttaatgtaatgtaatgagaacaataatatattataaataataatgacataataaataaaaactgtaataaaaatgatatgtattataacatttagtttaactttc

SEQ ID NO: 184415 - DNA, 6149 bp, Cannabis indica
aataaattataaattattttaaaagctatataacaattaacaaacatgtccataaaaaaaaatctagatttgttttataaggcggttgagacagagagatttacaatagcacacctcaactcaacttgtccgtaccacttaaacaacctccttcctcaagttgtctctcttttgcaatggtaccgtcaaaattcgattttagcaatcatgcatttgaatgatctcatcaaccacaatttcaaatgaacggaaacaaactaaagtgataacattttgtatatttcttctgtacgtaaaattactgttgttgaaattacaaattgagagaggaagaaacccatgatgtactgtcacaagatatctaaaagaatatgctgcaattttgaatggccatataaaacaacaatataatactgatctaaaacacttgtgacaaactaaagtacaatactactctctcaactctattattttaatcatcgatttctggcaatgctactctccaaaaattccatgagtttaagtcttcctgcacatacatacataccttcaatcaaacttgggattgttaccaacaaacaaaaaacaaatagaataatggctttgcttacctgctctatcaatgaagttggaggaaacatgttattcagagtgtgtacagaagtgtatggcttcacatcaatcctatgactaatggctatgtcaccctgccaagttcatagttcataccccaataaggaaccatattctattatcaccatccatatcaaaacaaaagtataatactcttctaaatacaaactgaattacaaattactctttaaactcaactctatgagactgactttagtcatcaatttctggcagtggtactctccaaaaattccatgagttgaagtcttcctgcatacacatacattcaaatcaaacttgagattgttaccactgtctttctcttcttaaataatggcattgcttacctgctcgcttacctgttctatcaatgaagttggaggaaacatgtcattcacaagagtgtgtaaagaagtgtatgacttcacatcaattctatgactaatggctacttcaccctgccaagttcacagttcataaaccaattaggaatcattccattaacacaaccattaccaactcttttatgcaagaatacaatacagtagaataataccttaggattgataataaatattttcccttttggaatcccaatcttcctgtaactcagctcatcagtgtctctgtttccaaaacccgcataaaatggattgtaatcattagggaacagcttcttaatatcctaaacatagaaaaagaatattgtgtcagaagaagcctgtcgaaatgcgtttaaatttgaaattagttacaggctttttgttaactttaacctctagacatgcaatcttgaattcatgaggtgctcttcttattactgcaatgaagaaaacaatatgagaaataaactaatcaatccaagcatactcaacaatgaacatctacaatggctgtcctaataattatcagcaagaccatctcaccttcgcggtacaacgaaggaaataatccatctggtgagatcacaacaggtccatttggtagagtgcttccatcctatatgcaaagaaattaagaagataactttaacttagctcattcagttctagaattaactgcaatcacaagactccaaaccaatattagaaagtgcaaaaccacctattatactaagagaactttaagaatctgatactaaaaacatatgccaaaacagtgccacattatgcaagcaatgcctgaccaagtaaagaacaatcataccagaaaaaaaaaatcaaacatggtacctgtttaaggttaagtaaaaagcttctagttagatacgcctgaacaatagctcgtgcactgagaaatagtagctggtatccattttcctgttgtaaaagtcagaataatattaaatcaagttcagtagggacaacagaggttcaataacttttcttgcgtaagtacccaaggaaatcaattcctacacaaaaataaattacaaatctacaaatgatcaacaaaaatatatactttttaaaaaggcagtaattcttttattacaataaaaaggttgcaaagctatgagaaacagaatgtactgaagtatttgaactgtgaaaaaattgttcttgttgaccagcactaaaactacatctataataccaagaacttcattgcattttagttacatattcaaaaacatttataaaacaatcacggcatttatagttcattatactgaaatttgagatcttggatgatcttaaagagctaaggagaataccttaattgcagagaaaagcttagccaccccagattgtgtccaatctttcccaaccaaaggcatgaattgacctaaaacatctgacctggagaaaaaagtcaccagtgaagtgaatgagagactaagactaaatttattacaacattgcctacatgttacacaatctgcattaatactatgttgtgacttaagtagttttcataagcatgtccgactgtaaaattagaaagagaaacgaaagttgtaaacagaaattgatgatttctggtatctatttacttgtaagcatgtcttactttgttattgtaccatcaacatcagaaattacaattcgtgcattccacttccataaataaatgtgtgcgtcaacctataacacatgaacagaaaatcttaacagctaaatactagaaactgaattaagatggagcaacataaagataaataaaactcaaacctgttgtcttccaagaacccgagtagagaaactaaatgtcacaatattttgaccttctttcaggttcaaagatgctatctgctcattagtgggaatatttgtcctcacaaattgtttgcgaggagattcatggaaggtttgggatgtcggagtacttggggtcgtttctgcttgtgagctgtgtaaaacagattcagaatcaacaaattcttcctcgtttgacgaagtactgttggtgtgctcaagtgttttgacccttctaaatggaataggccataggcgccacctgcgtccagagggagtggatgtcaatccagaaccattctcagcctttcgtgtgttgtcctgttccacaggaattgcgtccttgagatcaataggcaagtccataccaaatgcagctactccaagagctaaatgagcagctttttcccatggaaaatactgccctctaaatctaatgatcagatttccatccttaataattgatgagccagaacttttaaaatcctctgccaaaatgcgatgtgcatcaaaagcttcagcagccgcatccaagcccatgcctgcattaagtttgttcccacagagcgagatctcgaaccctgcaaataatgacatggataaacaaaatgattggtttagaaattttatattttccttaaaaagagacaggaaattctttgagaagcttacttgtactggactgaatttgtatctctgtagaagttgtttgaggttcctctttgtctgtaggtctctctggtgtaatgtcaatagagtctatcccaataattgactgttcatccttcaactctgaatttttagtaacagaatgaggagataaactctcttcatcttcagaatcatcagctggttcatcttctagctttatattcatacttgtatcgttgttaagtggaaaagaagtacatgaaggagatgacccatcatcatttctgaattcagcagtaacctcttcggcgtcattagcaactataatagtatggttagactgtgaaatataagcatctgatgatgaacttaaatctttaatatgtgcagaaacatctgatgattccgaatcatttacttgcaatgcatcttctagatcactacgcgccaaaataattttttcttccattttaaaattttgagtttcagtagatagaaaggcatgttcttcctcaccttcacgtacttccagctgctgctgacaaaaaacactttcctcattgttaactatagagagattatcagatgtatcatttggtttaggtgcattcagcttactaatataatccagccaagaattttcgtctgtactgaactcatcgttgacatcacaaaactcagaactttcacctgggccaagatgaaactgaggggtgcttaattgaacattttcagtatcctgttccaatgccgtgatgggggctgttaatatatgaccatccacacttaccaatacaacttctgaatttaaattctgggatttaacaattttgtcaccatctaaactctcaaaacggctagaaccatactctgaatcatcaagagaagattcatcatcttgaaattcataaaacctcccatcttcccccaaagaatcacgctcctcttgcaattgaactacagcagaatcagacacactatgctcgagtctacgaatattattaacatgttcattttccttgttgttcttatcaccatttatgctactactcccctcattaaattcttgatcattcttggcgaccccatttagctcactccctttaccaacatcaatctccttgataaaataggcctcaccagagttatcaagatacatatgaaaattggcatcaaccccattgactgctataccaacaaccttctcagtacctttaagaacaccctgaaatttaccaaatctaacataccatggtgtacttcgaaatgttccatcttgctgtcgaacaacaatgacatcaacagcaccaccaaaaggatgaaacggtgttgcaacagagtaaacaccaccagcaattaagctcccaacttttcctacgacattcatttggtttagctaagaaatccctttttttcagaatctccccaaagaacaatccaagattaaacaaaactcaaaatctgatcacaactaatgttctcccccttgatcatcaccgtcattctccagtgccacctatgtaacataaaacaaaaacctcaacttaacaatcgccggaatctgattaaaaaaattctaatcatcaaaaaatagaacagaagaatcaaagaagtcacgaaatttcctaaacccagtttgaaaacaatccaagatagtcataaagactcgtacattcaacaccaaattcaaaaaaacaaacttcgacaatatcaaaatacccattatcacagcttctcagcaaccaaacaaagcaccaaacaattttctttcccaaaaaagacaactttaaaagagacgaagaaaacacgcaagagtgaaaaattatcttggagtaaaaaaaacgactaattaaagataaatggagtaatcggagtccaaacccactctataaattttccatttcaccttctgttctgttccgaaaagacatccaagatcaaacagaaacgacccaactcaaaaaataaataaacaattgacctgtgcaagagatacgaaataaaggaataatttttaaacgaaggtcccatttttcttatatattcaaaggggatagagagataaataagagatacctggagctgggtatggcagagggagaaaacagaacgagaatggtaatgaagatgatgatgatgatgatgataggaattgagattgtgaggaaacaagaggaagaaaatacagattgagggttatttatagtgagacaataaaataaaatgcaggcccaggcttcgatctcttgtccaacttgtatttccaaggtcgaacacacatatgaatctaactcaattttatttgcctgttttttttattaatattaaaaaaaaaaaaaagaaacatttcatgtttgggtggatggtttttttattatttttttaaaattttataattcaagctgaaaaatgttttccagctaatttgttacgatagtctcaaagttttaaggttaatcaatgcagaagggagttatatatagtgagatatatcttatcgtttagattactggtggaactgtatttgtttgggcagataaaattttaatcctatttttttaataataatatataatatattatagtaattgttttattaatatttataatatttctaatgatttataatttcatattaccgaaaattattttgataaattttccctg

SEQ ID NO: 184416 - DNA, 989 bp, Cannabis indica
cttcttgtcaactaactttctatagtggttgcttagtctttttcagctgattctcatgtatataaagccttgtattttcttaaattaatagagaaaaacagagcattctttcatattgttcatcatttacaaacattaacagagacacccagagagtatatgaagaacttctcacaattgatgttggacataaaggatatactataagagctattctcttttgtagaagggctcattccatttgggttgataatatttgactatataaaaatcctaatacgctttattttttttagataataattcatagttcacctttcgatcaggtccaatatttcattgttgtcaaaataagtttgcggttgaactatagatataagacccactcatatgggctgaaactgtttgtacccatcaagtttcacagcacgtggctcttcaatacaagtttttaattgaataaaattttctgtcactgcatgtagacaaaacaaaaccaactaagcttttctttgtaataaatacacttgtgcaacaacaggctgttcgacttgtcatcactacataaacactccactaaatgttggacatatcacataattacgtagtactcggtcaggacactcttacaaatgttcttacggtacattttctatttattttagtaggaatttttttttttttatttaaacgttttatatattataatcatattttacatggactccaagacacacacaccacttgaactagcctcaagtaatttagtaggaaacatttttagttaaatagaaattttgtttttgttttttattttttgaatttcttttaaatagcttgaaaatatatcgaacatataatttaaagtaattaaaaaattgtaacaggtggttgatctttctttgcatataccacctatatttttgagttgtttctcaattttgacgagtgtttatcttgggaataagcacacagaaaagacaaaacat

SEQ ID NO: 184417 - DNA, 4019 bp, Cannabis indica
ttttctgatgaaaactaagagaagtgcgttggacaaggaggttatttggctaaggttgggttttaataatggagtggaagtctcggcagagggttcttctagagggctggctcttttctggagacagagatgggatgttcaagttactaatatggatactaataaaattgtggctaagtttggtggagatagattcttgtcggattgggtgagatgctttacttacgctccacctacgagagaagacagattgaatttctggaatgaccttgggggatttatgggagtcttgtcgaccccttggttggttatgtgtgatcttaattcagttcttagtgctaatgagaaggttggagggagagtggttactagatcggaatgggaaggccttcgaaatttcatcttcaaccatggggccattgatttggttggcgttggggctctttttacttggactaatggccaagaagctgaaagattaatttgggagcgtttggactgtgttatagtatctcctgattggttaactcaattcaagaaggctggggtaagaaacttggcgattcgccactctaatcatgctcctattattttggaacacgaatggaaagagagaattttactgctccatttcgttatcgggatgcttggagtagggatagtgactgtcgcaggatcattgaaaatacttggaaaagtggtgtggaaggctatcatagcttcattctctgctataaacttaaagctactgcaaaggctttatgcgagtggaaccgcttggtttttggccactgccaaacgaagatgaaggagcttgaaaagcttctaagtgaggtgcaaaatcacccttctttgaaggaaaatttggagcttgaggggactataatgctagagttggatgaagaggagaatcggttggagtccatatggaaacagaaatcgagggagaatcggctgaaggaaggtgacaagaacttccagttttttcatgcatctattgtggttaggcgtaaacgtaaccatatctgggcagtaagacaagatgatggtactactattgaagagagaccaaacattgtagaatattttcggtcaaagttccgaatgctgtttaactcttctaatccttctgtggatgaggagatatcggaatacatcttgaatagcatttcagaggcagaaaatgaaagattaagtgcgtgtcctactgaggaagagattaaaagggtggtgtggtctttgcctcctttgaagtcgccaggcccggacagcttcccggtaaaattcttcaagcaatactgggatgtggttggtatgcaagtggttaattttgttcaggaatttttccacaatgagattttctgcaaagaggtgaataggaccttcattgtccttatccccaaaaagccccaagcagaaaggtttgatgattacagaccgattagtttatgcaattctacatacaagatagtctccgaaattctggcgaatcgattgagtacggtattggataagttaatatcccctcaacaggctgcttttgtcaaggggagaaacattgctaaaaactcgattattgcaaacgaaatcgttcatgatatgaagagaaggtgtggagggagtgcctttgtgagcatcaaatgcgacatgtctaaggcatatgaccgattggaatgaagttttctctataaggttcttaatgcttttggattcaataattatttttgtaatttggttaggcattgtatctcttcagtgagttttcaagtacttatcaatggaggtattactaagaaattctttccgaggagaggaattagacaaggcgatcctctttcacctttgtttttcatcctttgtggggaggttctttcaagaatgttcttagccaaggagattgagggggctctgattggttatcctataggtgttgacggccaggcgattacacacttaatgtatgctgatgatttagttgttttccttaaggcggactgcaacaacgttgcatctttcaagggggtgatggataagtattgtaggtggtctggccaggtgatcaatgatcaaaaatcgaaactttacttctctaagaattgttctgatgcccgtcgtggggagatcatggattactttgggtatgatgaaatggctagaggtgagaaattcctgggaaatccatttaccactggtggcaggggttgttcagactttgagttcattgttgagaagatatgctcttggttagaagggtggtgggccaaattgctatcccaggtggctagaactactgattaatagtgtcctggctttgattccgatatacactatgtcagtttttatgttacctcgcaagatcactaataaaattgatggaattctacgaagattctggtggaaatgagacactaaaaatggcagattcatggctctcaaagcttgggaaacattgtgcacaccaaaatcttgtggaggtcttggtatgaggagagcggctgacattaatttctgcctgattgctaaattaggttgggttatggcgggtgagtcatggactttatggaaggcagtcttgatggagaaatattgtagaagctcagaatttctttcctctacaattcttcgttctgcatccccggtggctagggggatttgggcaacaaaaactttcatcggtgagaaaagtgtttgggctattggcagagattcgcaagtcaatgtttggggaggcaattggtaaagtatggacggattgatctgtggccctggtgacatcaatccgaggtgcattgaagtaaatactgttggagatcttatgcactaatctggggaaggatgggacttgcattttttagctgaatggatcataccagagacggttcaacagctggcaagaacgaattttcgatccctttcgaatgaagataagctgctttggaggtcgtctgctgatggagaatttagtatcaaaagggcgtagtaggatctcaatgagactcgttttcacagaagagattccacgtgcagccggatatggaaagctaagctccaagaaagagttaaactcttcctctggaaactttatcatgatgccttgccttttgggtgcaaactgagctccatttcaagttccattccgggtcagtgtgtgttgtgtggtgaagattatggagatactgtcaaacactttgttgctaagtgtaatgtcaccagttgtttgtggttttctagcacttggaacattcgcatagacaacttccacctgaatagtgggaaggacatggtagaatggctacttaatcccctttctctcatgatttgtcgcattctgaattggaggattttattctttatggtgctgttgtgtactataaattgtggagcttaaggaatgttatctttcataataacactccgatggcttttgaaggaatacgtgaaatgattgagaggggttttaaggaacattcttcactgctggttcagaatgtggagtccatagaggcaggtggtggaattgaggttgttcgttggggtcttctgagaccagggagaatgaaatgttttgtggattttgcttatgctgaggatcaaggtgatgtggcggcggttatctttgatgcataaggtgttgttaagtggttcggggcgaagaaggtgtcgtttgtttctgtgatgcaaggtgagttggaggctttgagttttggtgttagtttggttaggcaccttgctgaggtgggggccgatttttactctgataatttgcctctcgtgagtggtttatcggagggtcgcagtcctcattggggtattcgttttactttcaataaattttgtaatgattttgacattactaggcactttgtagtttggatttctcgtgtttttaatgaggcgactcacacccttgcaaggtgaggcttgactcatagctgtaatggttatcttccgttctgagaggtgagtccccatgtgctcaccaagtttctctgtttagcttaatgaatttgaatctttca

SEQ ID NO: 184418 - DNA, 4833 bp, Cannabis indica
tctctctctctctctctccttgatttttggccctagaagaaccaagaggaccagccagttttctcctctgattcctgtgattttcagcaaataattgaaggggattggaagtttgattcaacggtaaaggaaaggctaaggttgagcagtagtgagtccaaagcttggggatgattgtacatgtctagatggttcgacttgaagagttcaatcgtgggatgccttgggcttcattttgtagtcgctgtgtgatatttttgtaaattgtattttgaatatgtttagcagtattaaaaagtgggatcctgactttttatttggatatttatatatagttataaaagtttagagtataaataaaagttttaatttgacacttttttttgagaaaccctttgattagcaaaggtgagcaataatcaaaaattcactatagcgtgcctaaacagtagggcgttacaacaatccacttaatattgcaccaaaagtcaattcatcagtcattactccaacaataaattcatcaaccattccttcaatagccaattcgccagccattgctttagcagtcagcttaaccaacatgattgctcccgaaggctttctaaacaaccaatcccttactagagcaaacaatgtgcctactgatttaacaccctctattgtaaatacaggagtgaatgttgcacctacccaagaggagttgattgaacaaaaaattgcatgaaaattggaaagcatggatgccatgatccaaataatcctaggagtgaaaactcccatagaaaagagcctacctagcagctttgcatattaaccctttgtggatgccattttcttggtcaaaatgtcaaagaagtttgcgttcctactggtgaaaatgtatgatggaatgactaatctcaatgaccacttagctagctataagtagaggatgtttattactgctatacctcgcgagttaagcaaggcattttttgctcaataggcagatattttgttgaaaaatttgctagtaccaggaaactaaagaagctaaaatgacatctagataattagacactaaaggtatgaatcactaagagactatgtagcaaggttcaatgcgaagaaggtatcaatcacggtctgcaacgttgacacaactatcacagcctttcgaaaaagccttatggtggaatttgacctttgtcaagaactaactaaatctccttgttagactatggaggatgttcttgccaaagaatgggcttaaatcaaatgggagaaagacaaatataacaaacaattgatctccaactactcaagttctcatgagtgtcggggtccaaaacgagtagagcgcaagccatcttatcatcccaccaaaaattccaaaccatttcaaggcagtagaagagctcttccccaacggtctcgtgattaccaagagagagggcaatcatcctagaagtttagaagctatcaagataaaataccaattccagagtatactctaacaatagaccctgttgaaataattgttgtaataaaaggcatgggaaataaagtcaagtattctgagaagattcaaaagccaaaagctctgaaggatatgaccaaatggtctgaatttcataacgatcacaaacacaccacaactgaatgtatatcactcaagtttgaagttacaagactacttttaccgatgaaaactacgagacttcctttctgataaaggcaaatcaacagtagcagaatgggataaaagacaagagaatccacttgaatactctcaaaatgcgaggaccgtgaatgtgatcttaggaggatcaaaagttagtgacgttatgtattcagtaactaaatgccattcacgtgaaccaataaacagtcaggaaagctcgcactagaacttcgagccaaattgattgaatttcttagtaagcaccatgacagcttttcttggtctcacaaagatatgactatatagaccctaacatttttatgcacaagttttaagtaaactcgaactttcctccagtcaagctgaaaatatgaaagttcgctccagaacgtaacaaagtgataaatgaagaaattcaaaagctcatcaatattggctcagttagagaggtctactatccaaaatggttagcgaatgtagttgtcgttcgaaaaatgaatgtgaaatggaggatttgcattaatttcacagacctcaacaaggcgtggcctaaagatttattcccgctccctcacatcaacatgcttattgatgccatagctggacatgagctccttaatttgatggatgttttttttttttctgatacaaccagattcgtatgcacccaaatgaccaagagaagacaacattcatcacagagcaatgaaccttttgttacaaggtcatgtcattcggatgaagaatgtcagtgcaacatatcagagattggtaaattggatgttcgcaaacattctaaggaagtcaatggatgtatatattgatgacatgctcatcaagtctctagcatcgaaagatcaccttgatcatcttgaatagtcattctaggtacttgaaaaatataatatgtaactcaaccctgccaagtgctgttttggtgtttcctcaactaaatttgtagggtacttggtgacaaagcgtggagtcaaagtaaacccagatcaaataagctccatacaaaacattcaatcaccaaaactaatcaaggacgtccaatgccttaccgagaggatagcaacactcaattgttttattttaaaatcttcggaatagtgtcactttttcttctcaacacttagaaaagtaaaggacattgagtggatagaggaatgtgaagatgcagttagacaacttaaagaatatcttgcctcacctccactcttagcaaaaccaaaagatggagaatcactctagatatacctagaagtgtctaagacaacaaatagcgctgtgctaattagagaagagaaaggatggcaacaacccatctactatgtctcgaagaaaattctagatgcaaaaacaagatacaatcaacttgagaaaataacagtagaactcgtcacagcaaggcaaaaactcccactaaattatactacaaagttcgcaattagaagtatgggctattatgtagggtaagttattaacaaacaaatcaaagaactcatgtagcataatcaaattgaagcataatcatctcaagattcaaattgaattgacctatggtaaatttttgtgatgtgacttgacaaccaaccatatactgttatctaatatgaagtctagatcagtccaatccaatgtaacaaatacatctgatcttattcactttaccaatattctagaaaaaacaaaacacttgccaagtctaagtagatgatatcatagataagctggtgtgacagtcagtagtcttgtgatcggcaaggggaaataccgcgtaagttgtgtaattgcacatcactcggggaatatcaaatgtgatgattctgagacattgtaggtatgagactacacatttgaagagggctttcatggattgatgggtactgcctgtatcaacaatgtgcatcttgttttacggtgttccgtcacttaagaactctaaagttaagtgtgcttgacctagactaatcttggaatgggtgacctcttgggaagctttcccaagaagcgtgcaagtgagcacaaagcatacttgaaacattcatgttagtttgtatggccagtcgtcattctaggaagcaacgaaaagtgatgtacccgtgtataagagccatacgcccatggagaaaggcctaatggagggttaaagtgggggtgttatagctactaagtgtaaatctagtgcactaactaatcttagaccttttttatcatataatcataattattttctaccgtgatttacgtcacaaaaattatgattgtctaaatgcttgagattaaataaatgtatatattaagtaaataatcatgaaaagaaatatgtaaacaatgcctttaattaaataatttaatttttatttatcttcttgataaattataatatataaaaaatatgaatttttatatgggcataaactcctaaaattatggtgctccaatcgattttcatgaggcatgagaaaagtctacactttttcaagagttaaggattcacttctagaggttatacccgaaacaattgaatcaaatttatgaccaaggccatggagaagctaaagcataatatcttaatcattcattgttgaactagcgactgtaagcgtattacctagtgattgaaccttgtcgacatagtcatataaggagagatttcctttttgaacatgagagagctgccctttgagttggagtaatcgcccacgcgattggcttgaaaacctttgttcaagagctctccttacgacgaaggaggtgttatgattagcaattgagttaagaactccttcgaatattgacaatggaagccaaaaaagaagctgatcgcatttcttccattgagagtaggcgaggttgatctcaatagtgaccatgatttgtatgggagggacaactagtaaaaaggatttcatccaattcatgaacaataacaatcaaaaccacctgtgacttccatgctgagaattttacgcgatcaagttttcgcataagatatgagaaaagcaagctagagaacaggttccagatggaagaagaagtggtggtcatcgaaagttcaggcaataggtcttttgcaatggcttttcttgtttgtgctgcatgattggaagatgtggaagcatgaatcgacgattctataagaagtaattgataccatgtag

SEQ ID NO: 184419 - DNA, 4303 bp, Cannabis indica
gtcttaatttttgtcatttggttttggtgtaccaggttttgcgaagcgagcaattgtttatgaaaattcaaggctctttacttcttatctgctgcgcgttgcacagattgctacaatcatccgattcaccgagttcaaatgtgtctgcaattaaggtaagtactaaatttaaactgttcaagaaggaaaactgtgtgctagacagacaatcgttcggttgattcttgtttttattgtttgatattttcatatcgggaaatttgctgcattaatacttatgtagtttgatttattgcgaataatgcctaactttacacatttaatgcagacgtttggtccctagccgttatttctggctagggacctacgtggcagcatctcattagtccaattattttttttaatataattggcgaatcaaatgctgccacgtggctgccatgtaggtcttacatcagtattaatgccgcaaatttcccttttcatattcttgttagaagcatttagcgcacttatagtttttcatgcaagactaatctgtttttcggggattttcagcaatgtatgcaggaggttcaatccatgaaacaggaaagaatagcaaaagacatagaagatgcgatgagagctcgaaatgcttacgaggataatcttatgagaatcatcgaattgcttgatttgacatcaagccaagagttgttgaaagagattattgctgtagagaaggagagaatcaatgccgaatgcagtaaagtgagaagagatttgaatcaaattagacagattatggatcttgtctaccgaatccgtgattgcatggttaaacttcagcgaattgaagacgtcacagtcccttcgtacttttgctgtcctttatcatcggaactcatgttggatcccgtgattatggcttcgggtcaaacgtacgagagatcttcaatcgtgaaatggctcaatgatggactgaccatttgcccgaaaactcatcagaagttgtctcacacaaatgtcattactaattatactgtcaaagctatgatagcaacatggtctgaggagaacaatgtaaaacttcctgtttactcagaccgaacaagaactgtcgttgtagcctcgtcacaaccagaccatgtagatgtcggtaatgggattgagaagggagagaaagccaacggtcatccatcccccgaacactcgtactctcacagcaggagtgaatcaacatccagtgctgtttcgagtattgattatgtgttgtctggtgaaattacttccgagcctccaaacaaagaaccgagaaattctctttggaggtcgggtaagcagttgtatatggccaataaagagtccaaatcatcagtatctgaggatttaacaacaacttcccatgtaacgaaactgattgaagatctcgagagtctttccatcgaagagcaaactacagcggctgaagagcttcggcttctggcaaagcacaatgtggagaatcgaagtattattggccagtgcggtgctatcaaaccgttactttcgttgctgattcagagacgaaacaaacacaggaacacgctgtaactgctcttttgaatttatcgattaatgaagataacaaagctatgattgctgaagcgggagctatagaaccgttgatccatgtattgagaactgggaataatggagcaaaagagaattcggctgcagctttattcagcctctctgtactcgaagaatacaaggagaaaatcggtcgttctggtgcggtgaaagctttagtggatcttttaggatcaggtactcttagaggaaagaaagatgctgctaccgctttgtttaacctatcgatttttcatgaaaacaaggctcgaatagttcaagccggggccataaggcatcttgttgagttacttgacccaggtaccgggatggttgacaaggccgttgcccttctctcgaatttgtccacagtaggagagggccgtttaacaatggttcgggaaggtggaattccattactagttgagatcgtcgaatcgggttcccagagagggaaggaaaatgctgcctccatactacttcaactctgccttcatagtaataaattttgtacccttgttctacaggaaggagccgtccctcccctcgtggcgttatctcaatctggaacaccgagagcgagagaaaaggtacgcagcgttttgaaattccattgctcgataatgcttatttgataccctgaactcaaattcgtcaatcaaattttatcaatttgatcaaactgttctcacttataagtattattaaaaacacacggtatgaattctatcttttgataaaacacagagtactaaatgattacactctaatttccaacgctcttgcgttggtatcaccgctcatgctcatcctgttatttgtatataatttagaacacaataataatagataactatcaggcatatataacaattacctcgatttgatattacaatactatcaattaagtcttcctgattatcaaataacatacaattgtaatgagagattaaacaaaaaatgcaggcacaacagcttctgagtcattttcgtagccagcgggaagggtcgaccgggaaaggaaaatcatgaaaaggcggcgacaacaacaacatttcttgatctgtgttcttcatccaggcaaaccccattgagagaggactacatttcatatattctttgattttaaccataatttatttgcaacatattttagataacatttgtttctttcttttcctccattagtagggattttttttcttgtgctattctcagttactttgcttcattagttttttttttcttcttagtgttattgttgagtggtggagttagattcagtccagggtttttttttatttattattatttaatggtactcaatcagtggtgtatatatatacatatatactgatctgtacatatacaaatacagtctttggtttcttattatgtatgctagttggtatacaagttttgaggatttagtgaacttttttttaacaaaaatatttttacatgaaaaaaagagaaaaaaatgaagcttgtgaaatcaaatttcacaccacaacgatgcgatattttataaatggttagcggttcttcatatgagactagatattgaaatgcactgatggcagtatggtgtttggtaccttaaggtgttcatttaccatttttattgaataaataggttggaaagtttttttattttatttttttaacatctagcttcttatttgttgttgctacacattgaattacaagtatttttttttcagatgtgctatttttgaaattattggcatatattctttgacaaaatgatactaaaatagtaggagttggtattcaatacaattcaaactatttgccccaaaccaatcctgaaaattatcaaccgatctaatctaattcagttttaaaattggattttaaatataaaacttaatttttaacattagatttgttgcctatatttttcatcaactagagaaaatgagaaggaaagaatagaaaatctattttacattaatgttgttgtaaattactatattacccttaaattattaacatatttgttttttttttgttgcaaaaaataaattagtaattttacattaatgtttttgtaaaacttttctctccaaattggagtggaaattttttggtgggttcaacctcaaatttttctatccacttttctcttcacctcatttttctttccaaccaaacaaatatatatatttttttcacttctctccacttttccttccaatcttttcttatttccactccattttcttctcaaccaaacatagggttacaagtgatgaaattctaagcggattttggcaacgtttttacttcataaccaaaatttatgatacatttacatgtgaagactaatcctacttgttgataacaattggcttattcccttaacctaaaggcctaatgggtgaaattgtacaaagtgtgtagctcatgcttgggcaatcttgtcttttcggggtgtgacatacattgattatctcatcacgtaggcgtctaaaaaaagtgtacgtttttatgctagagtaggtgtacgaatcttcatgtttatcttattttatgagaaatttattttgtcggatgtacagaagcctttgtatcgaaaatagtatagaccatgcagatatatccaaagatgtttaggagtattctacattggagtgaaattatgaaaaattgttgagttgggaatgtttttagggattatttcaca

SEQ ID NO: 184420 - DNA, 6545 bp, Cannabis indica
cattgttgctatcttgctgacggtgtgtgtgtgtttttccttcttttaatcagggtttggagatcaaaaagctggcggatcgggtatgtgcattactttttcttgttcaaattcaagtagttgattgcactttttgacttatgattagagaaagattaactttcaattttattatggtcattaatactgtaaaatacaaagtttagatattccatggcagttagctgaataaaagagaaaaatagaagaataattatgattacaataattatggtttcattattagcgaagacacctcttaacaagagtgttgtcctgcatgctgaatatcatcatcattattgttttgacaaccaattatagttgaacctagtactagtttggtccaaatattaggagagatggaattttcttgaccagggaaatgaatctgcattgaaacttgaatggtgtatttactgtgcatttggataactatggtggaattaaatgtgggtgtaattggaggtaattacatgatttggcacgttttgtttaaccatgcaattattgtgtgattggatgttattgaggggttctaattacactattcatttctcatggtctccaatgagaagtgtaattatgttgtgtaaatgtaattactaaaaactttccatttgaaatatttatcactaaaaattattatgttcttgtgtaattactaattaagtacgtaattatgtaattatcacttcatatccaaacacacattccttttattataaaatagtgtaatttctatgttgtttacactacctagtaattatacagttactttcaaacgcacccttagtatttacaagctcttttatccacgaaatgattattttgtattatttttgagtgaaatgaggttgtaatgtcttcgttttagttctagcgaaagatgaaagattactaaagaaatgacagaaataatgaaaaagagaaagtgaattgtgatatatatggaattatggatggaggtcatgtagaattcataaatgtttattatttattatattgttaattgtattatcaatggagtgactttgtgtgtaatcgagaaccttcccatcaccacaacaaaacttagagtattctcatacctagcacatatataacaaaaaacttttagaccgaacaaaaacattcaaattgaaattatagaaaaagttgaaaagaatgagtttagtgagaaagaactgtaccaattcttcagtcagtttaatgattgcaaatctgtaacaacctctttttctagcactactcccacaaaaacgcaaacaaacttaaatcttgattttaagtccatgtctaataagtacattggcaatatttgggaaagaagaggacgaattatacgaaaggttgcaaaacttgtaataacaaatatctccataagacttcttaagaggagttgtcttttcggtcgttggaaaagtgaaaaggaaatcaacacttcctctgaagaagtctaatggagatatttgttattttaagtttggcaaccttttgttcaagtcttccacttctttccctgatattgttgatgtattaaacgtaggcttaaaatcaaaagtttaaatctgtgtgtgttttgtgagagtaatgctgggaagagagattattacacagatgcaaccattgaaccggttgaagagttggtaaaaattttctttcccattataccgactttttctatatttttgtttggtctaaaagttgtttgttatatatgtgctaggtatcaagatgctataagtttcatcgtggtggagggaatgttcttgagtaagtatgtgacagtgagtacataggctttctgttgaccttcaatgttttggttagagctacaaactttgaagctgtgacaatgtgcttcactacactacacccacaattttctctaatattaacaataaaaatcctgataagaatcttatagacctaataagaatcctgattttccaatctattgagttttgacttgatcaattagttcttaaaagttcaaatgaaatcagttattacgaatggatattgttactacattatcaatgtgatttggaccttgggtgagtgtattaaaggcaaaagaagctggtcatattgccgtgtttcatgctcaatgcaatgttaataagtagtgttttttatttacttgaagctccgaaggcagaaatagttgatgctagcagtaccaaattgtttgtatgcaagtttggacctactttgtctcttgaagatgggaatgtacaggcagaagaaaagcagattcattgatttttagtccatctattaggatttaggagttgtgtttgggatcagatgcagctgcttggtcatgttatggacgtttctagatttatgttagagtagtatttctctgtaatatgctttcaagatgcataaaggacttggttaagaagtcagtatgtgactgcaattttaaatgtttgctacatgaaaaaggttctgctgacttggttatgaatgaaaatttttaatgccttaaatgacttggctttcttgcttgcttacaagtattataggttggatcttcttggtttaaattgattactcctaccactctgatccaagttgtactctacaataactcataatgttatccaatttacctcaggtggggatgcaacaggaatttcagcagctgcggatgcgacaaagtaaagcttcttagtttttttttttttcttttttaatttgcttcatttatggcaatctgcatcatatattcaagtcttttttctatacatactgtttttcagtattatgatgtatcattgtatttcctttctaggtgttttccatgttatctgtgcttttcttttctgactctatctttcatgcaggagagagctattacgagctattgatgtacggcttactgcagttaggcaggacttaatcacagcttatactcgttcatctgctgctggtttcaatcctgatacaatttctgatctccaagtctttgcagatcgatttggtgcccaccgcttgaagtaagagctctgggatatcccaccttcacgtaaatcttattttttaaacccgtacactcacttctcttttctgcatgcacttttgcatttgttgactcacctcaatgtcaatgcacatctatacttgtatgtcatgaacctgaaaactcatactatggtcatattcttgtatattggtctttcttctagggagggattagctggtgagatttaatagaaatggctaggatagagtcactgcaactttgcattaatcatggcaacatgaattcccgtgttacctttttcagcttggttttctccctttaggaatgccaggttaatggctttgaaatgagattgtaacaatatcactatgtcaaagagggtgtacttaaccactttaattgagcacttaccacccaatgaccaatgagggtattacgcacttgggtacttttgttttagtgcagttatcggttgtttcattgtatattaatgtgaattaacaagcggaaattaagccggtttagctgtctcttgtattatgttttgtgtttttgcaaaaatgtttaataactcaaatgagttggtcacggaataacaaataaaatcacatgaacttgaattttatattttccctttcaatgaagcaaaatggataagtagattgatcttgtgttttttcttttgagccctttggctgttgattacttaaatgggtccattagttaaagtctaagggaatatgatacatagtctaacattgtagaaaaagctaaggttacctgtcaaaacactgcaggtacggcagttgaagaagtcttttccaaatttataaatctgaactgcattttacgcctgacccaaatacattccaacttaaatatttttattatatgtataatgtataaatatattttacaattaaattgttgtttattttaaaaaatttgtgcagcgaagcttgttccaaatttatatctctatgtcaaagaagacccgatgtaatcaaccaatgggtacaaggtggtgatgatgatagagccgtaagatcatcttatgggtctgacatgtccatcgaggaccccactgaagactcttctggcccccaaaacaagagccagcaacaactggattcatcccaagcccacctggaccaatcaagacttgccacttgtcagcaacccacctcctcttctcctacaataagcaacgtaaacggaaaaaacgaagtgaaagaagaaacccaccaaccgttagagaaggagaaaaaggaggaggctctgaccgagtcatcttcttctcccagtccagtgggtcatcatgtcaggcgactgagtgttcaggatcgtatcaacctttttgagaataagcagaaagagcaatctactagcagcagcggtagtgctggaaaacctgttgttggcaagtcagtggaactcaggagactctcctcggatgtgtcatcagcacctgttggggttgagaaggctgttctgcgaagatggagcggcacaagcgacatgagtattgatttgagcgagaagaaggatatagatagtcccttgtgtacaccctcttctgcttcctctattcctcaagctaagtctaatagtaataatataatattggttggttctgaaggtaaggatcagaagggattgaatagtggttcaacttcttcatctaaaagtgaaaacttgagcagttcggtcggagttggcgatgttgggttaaaagaacaagctgagggccacacccaggctgtggtttcttcaggtatagaggaggaatcaggatccaagggatggactaattctaaggaccaggttgtttctcagacccaactcaagtattctacttcaagagcagaaatggttgctaacgatcagaaggtttctttggagaagttaaagaattcatttaatagtgaagataggagcggtgtgtttaaagatcaagcgggtgttggagttaaaaatcaggccggtgttcgggtacagactgtaagtctagcaagcaaggtgggggatgcatcatctgctggtggatttgtgaataaagtgaatgatttggaaatagttgatcagcctgtaattcagtcacgtacaaggaatttccagagtcattctcgctcttcttctggacagtttgaatctggtagtggactaaaacttaaggaaccatcctcaatccagcccaaatggcttgagggagatcagcttccttttcagcctcaatggagatcatcacctgctcgagggcttgaggggggtgaagtggacttaatatcgtcaggtaagcaacaactaaaacctgaagactctggagttcagaaaatgaaattccagaaacaggtttcttccaatgatgaacagaaacagaaatcccagatccggaggaacgaaagcagtttggcaaacgaagagagcaaattagattttaaagttaaaaaggtctcagtaaatcaagagagttcgggtataatgtcaaaacagccagttgagcaggtgcagagagtaaggcagactaaaggaaatcaggagcgcaacgatgagcttaagatgaaggcaaatgaacttgaaaagctgtatgcagaacacaagcttcgagttcctggggatcagtctagttctgctaggagaagtaaacccactgacatgccagaagaagtggatttagattcgcagtacaaaaaactggcgccagaggatacttccttacaattacctgagaaaagcatggtgatggaatcaaccagcggatctagtaatgtggcaatgtttaatacaccaccaccaagcaagttggtaaataaccatgattccggggattctctgaggcagaatttctctgatcttagtttttctgatgattctaggggaaagttttatgacaaatacatgcagaaaaggaatgctaagttgaaagaagaatggggttctaaaagagtggagaaggaagccaagttaatggccatgcaggaaagccttgagcaaagtagagctgagttgatggccaagttttcagggtcagcagacagacaggatcctgtatctactgctcgtcggcgtgctgagaagctcagatcttttaatcttacttctagtttaaagagagagaaggtattaatcaagttatgctttaaggaatcttgagttaaatcttagaactggaagagttttaaattcattcctctctttctctatcgctctttgtttattaatatttgaaatactgtcaagtgatatttgggttcttcattcaatttttcctaatgatgatgaggttttcctgaataaacagtcaatggattcatttccaagcgaagaagatgaggaagacctttctgagtttccaggacaaaagttttatggtcaagagagatttcttcgtgaagcatctccgggagatggctcttccagatccactcaaagtaaaagacttttgccaaatagaaatttgtcttcatctactcggaccatggcagcaccagtaccagcaccagcacca

SEQ ID NO: 184421 - DNA, 3388 bp, Cannabis indica
taataggaaggaaaggaatcactgtggttttgctaaacctcaattgatttgtgtagtgtatttttagtcagttaattgttgattagagttgtaatgattgaatactgtgtttatagcttcaaaccataatttctggtactggttatggattcttggattggaattcactttgttgagcacttttattgtgtttaagctatggtaattgtgtatacaggagtgtttaaatggagagtttgttagagttggtcctaatcccaagttttcaccagtagctggatatcactggtaaaatctttttctttttctttttcttttgaatttatgatataatcaattcttgaatgaagccaaattttgattgattttgaggtttagtgttataatttgatcaaatgggttggttcagcttgcttaattcttgtgaaaactagttcagatattaatatattggggttcctgatcgattttttttcttgctctttgtgcaggtttgatggagatgggtgtgtgctcttctgctccattgtgaaaacttatttatctaattgagtttaacaatatgcatactatttactgaattatatacatttggtaactttgcagtatgattcatggtttgcgaattaaggatggaaaagcaacatatgtctcccgctatgttagaacctcacgtattaaacaagaagaatactttggaggttccaaattcatgaaggtagcaatacttaagaatatagttcattttcattcataatttagaatactttgtgtccaattgaagattattggattcaattttcataattgtttaaaaattgtacaaaatgaacacaaagtgaaaatatatatgtaccctttatgtttaatgtagttagatgtataaacaaatgtgatctcatattgtttggtaatgatttgtttgtttgtattctatctttattattataatatgcacaagtttctatttcagtaagtttgcttccttggtcattcatgcaattaatcataattttcttcaatattgctccctaataatagacttcacaaaaatcttaatgcaaaatttgttttcagttttaagattaaactttcttctatgaaactttcagattggagacctgaaagggttttttggattactcatggtcaacatgcaaatgctaagagcaaaactcaaagtattagatctttcgtatggaaacggaacaggtatataatgaatttcatgatccttaagaagtggaccaaatatgaaattatgtgtgaccctctactgagcttgcatattatttgagcacaactccacatctgatactaattattttctgaagtattgattgaaacttactgtttgtgaacctcttcctgcagctaatacagctcttatatatcaccatgggaaacttctagcactgtcagaggcagataaaccttgtaagtatataattctttctttaaccctgcttctgataagtgatgtttttcatggtccaagaccaactattaacttgtataaagaagctgttttttatccagggtcccaacccatatagtttgatccttcttatttgtttgtcatgcggaatgaaattatgcatgtttaaccatgcagatgtccttaaagtcttggaagatggagatctgcaaacactcggcctgctggattatgacaagcgattgacacattcattcacagctcatccaaaggttgatccatttacaggtgattgaggaaactctcataaaatacaatttttagttggcgagtcttcactttgctcattacaaggttcctaatgcaggagagatgtttacatttggttatgcacatactcctccatacataacttaccgagttatttcgaaggatggtttcatgcatgagccggttccaataacagtatcagatccaatcatgatgcatgactttgccattactgagaattatgcaattttcatggatcttcccctgattttcaaaccgaaggtatgttcattcttgatttctaactgttttagacaatttaattcatcattcttttagacataagtcctcacacaaattgccaggggtttgtagacatgagatgctcatgcttcgtggttttcttaaatgtgcaatgtgtgttgatatgttgtttgggatttacctcataatgttttaatttccaggaaatggtgaaggagaaaaaactgatattctcctttgatgccaccaaaaaggctcgctttggcgtgcttccacggtatgcaaaggatgagcttttgatcaaatggttcgagcttccaaattgcttcatattccataatggtgcagactctggccttcctaccttttatgtctgtgtgtgtgttttgggtcaagttttccagtggctgagctggtccatattatagattgcaagttacttttgtcaccttaagctattatctaataaggaggtttgaaacttttttcatgaccctgtttgtatttttgccaattcatagcaaatgcatgggaggaggaagacgaagttgttctgatcacttgtcgtcttgagaatcctgatttggacatggtcagtgggactgtcaaagaaaagcttgaaaatttctcaaacgagctgtaagagaatttcaacatgttaacataaaatcttctttgtgggggctattgtatctgattttattacacccttcttttttaggtacgagatgagattcaacatgaaaactggtctagctacccaaaaacaactttcagcatcagctgtagattttcctagggtgaatgagagctacaccggcaggtaatttacatgatggaaggacattgtgctattttttcatttgatttttatatttgctttcaagtttttgctctgttctcccatttcacatttcttcatttttgcgagtaaatgcaggaaacaacgttatgtgtatggaaccagactggacagcattgcaaaagtcacaggaattgtcaagtttgatctgcatgctgaaccagaaagtggtaaaaaatgtcttgaggttggtggaaatgttcaaggactctatgacctgggaccggggcgattcggttcagaggctatatttgtcccaaaggttcctggagtcgagtctgaagaagatgatggatacttaatattctttgttcatgatgagaataccaagtaataatttcatccctttcaatctgattattcatagcaatagaatgcattctgaagttggattttcatcatgcagaaaatcagctgtacatgttattgatgcgaaaacaatgtcgtcagatcctgttgcggttgttgatttgccccatagagttccatatggattccatgctttctttgtgactgaggtcagtacaatgcttatttttcgggtttggatatct

SEQ ID NO: 184422 - DNA, 21079 bp, Cannabis indica
ctattgtaaaaaagtaaaaattatacctgtttttgttttttttttttttttgaaaagaaaaattacacctgtgtttgaagtaaatatttttagtactttcacaaaagctaaaaagcacaaaacttttctttgagttgagttgagttttgctgagttgtaccattagaaagagggttatatttcttattttttaaatataaaatttcatgtgcttatgtacgtttatgcaacaaaactgaaaaggacattaaggcttattctggcatagattgctagttgtattattctaatgccccaaatatccggttttttcattaataaagtggaaaagattgaccccctctctctcttatctttacaccatttcagtacaaaaacagagctttattttgatttttttttttttattgagcttttttttggtttttggagaattattcaattccctagaacccttggaattgtatttgagttttgggtgttgggtttatgctgttccttttcggagactgaagagaatgaaagggaacagagaataataggttttttgatggtaagaacattattccgaatgaagatgatgatcagattgtgatgctgtttggttcgtgtgaatataggggaaagaaagattgtcgcaagtgtggaaatttgttgagtattgagattcgctctttcacattgtttttgattcttttaagtattcaaaagtttataacctgaatttctgggttttttctttttaaagcgaatatttttctttgacttttgcttatttgaacttgtttgaagaccctttactcacaattctcgaaatatttcggcgatgttttctagatattattatttattttaagaagatttccttgtaagttactttatctttacgtgttatccaaatccaagttttgagtgtttattataatattaagtttagacattctttcagtctaggatttttggattcgtgcaatggaagtgtatggatcagttactagtagcaccggtaccttttacattttcggtgacactttttgaagtcctgttgttttgtcacaatgaaatgaatcacgaaataatgacacgaaaatgaaaagtttgacaagaaactaatacagatggcatgagacatgccatccttgtgattctgctacctcttttctccttcctctctctaaccttgtttgtatcttttttctgttgtgtgcagaaattactagaaggtccaactgattagtcaaacgcctgacgaagaaggtgagtgattgaattttggaaaatccctttgctatctttatggaactctagctcagcagctgtaattatatcatatacgtattaattaattagtaattgacagtatcggaagagagttctcgtaagagtcattagattgtgtccgtgagccaccaactacttgtgctttgttggttggcattaaatttgtgtattgcattgattacttgtgctgctgttcaaccttccttgtgagtgctatctcaatcttcttgggttcatgtacatagaaatctattgcctgcctcttgttccaacatacattaatctatacacatgagtatacatattagtaacgttcaattctgttgatgctgattgactaatttctttttgagtcgacagtttctgtgatcacaggatatgggatgtgttttttcgacaccgaaggatactgcaggaaatagaaggaggccaggaaacattggggatgtttcggtttatgttcctggtttaagaattcctaaacctgttgatttctcacaagcactgggtgatcacttatctaagagcttagtggaaaaattatctgctttaagaactcgcatagtagtaatggctggccaagagggtcctacgattacaagaacgaggagaaaaacccaacatggttggttggttgtgttttcttccccctaaaaaaattcgattttttcactaacatcacatccaattttttataagccaaattaacatttttgcttcaggtggatcgactttagctgatcttcaacaggcactggaagattatttgcccgttcttctgggattagtgaaagatggtaaatcatgtgttgaatgttcttatcatcaaaatttttctgctgctatttcagataaactgacttaatgtttgtctgtactgtcaaggaagccagctacaatacagggtacaatttctatggataaatcaagaggatgaagcggaggtgcgaatgtttgaccaatcttatcaatccttgtgtctatatacaatttgttttttcttatcatttctcaaaggaacactgctttagttgaaataatacttttgcaggaaacagccttgtctaatgcttggtacgaggtgttgtcagttttacatttgatggcaacgctattattatcacaagccaacttgttacttcttccaagaacatccgctgatggttatcagcccaaagtatcggagggtacgtagtactgcatgacattacacctctttacatttcatctctctctgcctgtttctcttgctagtctttcatgttattgaagaagctcttctgcctatatttcaaaatttaaatttaggtttggaaaatagtgagcacatggtcctcttttggtatattttatttatatttcataagactttatcacagcattagattatctacagaaaatgtataattataaatttcataacgtttttgctaatgatataaatagcttaaatgtctttacagataaacataaccatatcttgatagctttagtatgtttgataattgctttctctgtactaaattttatttatataccctcaaaactattcctgttatgtataagtgcgtgagtagcataatgaatattgattggtagtctatagttaataaaaatggtatatgggacattgtaatagggtagtggtatagtatatatagcaactgtatagagaggaaaaagggtatgcaggaattaagagtttatttgctgcatcatggagagactaagcctctcgaatgcctatggtcttgcactgtaattctcttttctacaatattaatccagctaccattacttctacttctctaattgttcttgctactgttagtctctataattctgagttgtgttccagccggttcatatcaatattccatctacccgggtttaattcccatagtttgtttgtttatatctgctcttaagatacaatgtccattatctatatgttggatgtgttagtgagtgtaaccatatttctcagtagaggactttattgttactttggattctgcagaataaattagaacatgtctattttctctatcgtaaacggtagagacaacaacctaaactgagataaacacaaattccagtatttacctgaaaaaagatgaaagttaagactagataaaggctttagaattaaccaggttcttacaccacaaatacctgatgaaagtaaagttgaaagtttaagttttttggaaactcagcaatgcatgtaaaggaaagtacatgccaagtataacataaattacattttgctgacatgataatctagatgtgttgtctatatccaacacagtttacgtcttacagatattttagccttctcttttgatagacccctaatttgattcacatatgtacgatggaattagtaaagtgcttagttgggtgaaagtgttatgattgcctcattcttgggtgtggatttgcggtatttactctagtcaacgactggtacatcaattttagagaatttttttattttttccatatctggtttgttgtggggatgacagcgtgtaaggtaggttgttttcttatagaaattgagccctagtctaaggagacgacgagtctttcgaataccttggtatttattgtgttcttttcccagtttaaattcaatataacactctcaatttgtacttggggtgtattatcttctctataatcattacgtagttcttgtgctatcttacaaaattttctaccttgctgtagctatagtgtttgacatggtggccaagaattacatccatgtaagatgttaaattgtggggagactcttactgagcacaatttatgttcatccattagagaacttgttctgagttttttgtaggccagcagggttttgttggcagttggaggaggaaattagtatggattactgcctttaggctatgttttgggctgtttgggtagagaaatcagacaatgtaatatgctgttgtgttgttagaggaatagaaacagagaatagtggaattatgggccattcttaggtttaagagtgtcaagaagtttaaaatgtggaaaattatgaattaattaggagaacattttattttactgtcaaaattatatccattttctattaaaaggaaaaatattgtacatcctcaacatctctcttgcagataccgataaaatagataaaaatgatggaataatctcaaatgactctttttatctacattaaaactgttctgctagctgctaatgtagtctaggatttgaagattttttattcatgtctcaggcttatagaaagagtacgaaatttcaaatgttgggattgcttgaaattaccaaaaatgccacaaattttcgtttttggtcatattattttgttttagaaataattctattgatcaacccaccttttaaaacttaccctggtgcttaagcagtgcttaaacttattaagcacttcagcaatagtgccattactaagcttattgcttccttatgcttcacaggctttcttttgtttctcaattctatattgcatggtattgaactttattcttttgtaacagagaataggcgagcttctgttgatattttcctaaaggcagcaggatacctagattgcgctgtacgacatgtacttccacatttcccttctgaactcaggtttgttttgatggtagaacttcttggtgactgatttggcgctatggttgcactaagttcatcctttctccattttcctaaatttctggatgatactcaattgtaggagaaatctaccagtagacttggcagaaggagttcttcgagcactctgcttacaagcattaggacaggtagtaaccttctctggatgaactctgctgattaaaagctagtttcttctaagtctataatgtagaacttgatattagtgatttgcaagataagtgtgtaattttgtggcttttaattaattttaattttaatcaaagtaatcaaccccaccctaagagagcaaattgtccggattaatggtcagagaagattctagtataggtaaatgtttactttatctgctacgattggtgcattttcttggatacatatcttacatcaactaaaccgcagcaaactaagtccttgcggtgtttaaaagatcactgtaggtatcaatacacctaaaaacttagaggtaaactctcatagaatttactaaacaggccataatcatggagttttaagcatccctaaacagcatagttgggatcaggtttttctgtggctaaccgagattaagaaggttaaggaataggggttgactctcataccataaaaacttagaggtgaactttcatatattttatttgatagggttagagtaataggcattacaaaggatgacagatttacaaaacattctagactattgtaaccactaagaatcaggaaagaataaaactttacgaggaaacaaataattcagaataacctaattaacatcgtacagaaagtttccaaatatttactgattttgttcagattttaaacaaagcccaaaaccattcgcttactgctaaactcccatacttaacattgtggggaatttatctgggtatcatttgtgctagaaaagtaagtacctttttggttgtccctttttatagctgtttctatttagatatttagatttttattttcctgtatattctaatattatatggcaatgacatctcatatttgtcgcaatcgattctttacctttattttttgtttttcctttcttcaaaagttcataatgcccagcataaattggaggcacttatatatatgtgtgtgtgttttctttcaatgtggataagttttgttctcattgtctttcatagggtgttgatattcaacttggaatggcaattgatagcacgaaagccactctcgccgtgaagcgaaggcttgcttgtgagatggtcaagtattggcagcaggtatctatgccttttaatttatatacatgatatattatgcgatcagtgtttttgtggataaaaaggtatagaagaatctttatagtttatttatgctattagattatggattgtgtgaactttgaaaaagtgcacaagtgaaaagtttgaacttttcaattgatcttatccacataacattatgttaagacccaaataaatttacacacaacctagagaaactaccagcatcaagttcacaaaaaagaataatatactaaatgaacttctttagtgtattgcaaaaatagtatgacaatagtactaggggtttagttcaaggtgtttaagaccaagggtggtttaagacaaagggattagctatcacctttcattttaacgcttgtggtcgacatagtgggaaactagtggataaggcaacataagaatatttacttcaatgctttacactatgtttggtagggaagagagatggatagatatggagagcggtggagggagagagtagaaggtcgtcattgtaggaagacatggccgacattaaaatgctacaaattccaaccaaagttagttgctaaatacaaaatcactcaaacgtaacattttttagagcaaatgttctaagagaatttatgtcataggtatgagcgtagcctttagctaatcttgctttatacctctctattgtcattagacttgtaatttgttcctaacacagagtgtcacccaactgttttttttttctttcacttcaacaactttaccaaatcacacgtcctgttttttgtttcatatcttttgagagctacatctctactttcatgacattcctccaatttttcttccctaatgcttcaaatggtgttttttgattgttatactaataaaaccagtaaggaaggatcgattgctatgagatagcttttctatgacaagaaaagatacaaaaggtgttaagtacaagtcctagttccttccctaagtgctatgggtatgtcaaggtcaccttctttttgggcatctacatccttagagttgagtggagtacttaccttgttattcattgggagcatgcactggttgggagatttgcccattcttccatgaatggatggatgtgatgtatttctgcaatgagtgagggaagattgatttattttctaagtggtgggagaaattgagacaaggccaatgattggtaatgctggaacaacttaggtgacagtttaaatctcaaaagacttcttgcctttgaatttgaaataaacatctatgaaccctcaaatattttttggtaatttttatatctcatggaaagtatatagtagatcttctaaaggaaataggaatgattgggagcaagttgttgacactcctatgaatccaaacttgaaagtaatccaaagtgaggattcaactccagtagagagggtgtgttatcaaagattagttggaaaaataatgtatctctcatactagaccggatatcaccttccttgttagcgtggtgagtcaacatatgcacaacccttgtgaggagcactaggaagcagtgtatcatattctaaagtatctaaaaatgacaccaagtcttggtttgcacttcagaaaacacaacaactgagactttgaagtttacatagtttctagttgggcttaagagttgactgacaaacaatcaaccagtggttattgctctgatgtatgggataatttagttactaggcgcatcaagaagcaatctgtggtctcaaggagtggtgtagagtcagaatatcgtgctttggccttaaatatttgtaaagggatgtggatttgtagttttaaggaatataatttgcaatattcattgatatgccaattgacatatgtatataattacaccagtaacagatgtgggataaaaaccacaaaaaaaaatgaatatttaacaactaattcctaagactaaggaaacaacctatgacgtattttcctaattttatacggtaacttacactccccctcaagtcggtacataaacatcaaacattcccaacttgcatacaagaaaatcaaatgtgggtttaaataactcttttgttagaatgtttgcagtttgatcttcagactataccaatgttatacaaatcactcctaattcctagttctcctttataaagtgttggtcaacttctatatgcttagtgcggtcatgttgcacatgattatgtgcgatacttatagcagccttgttgtcacaaaacttcataggtagactaacttgcatcaactctttaagcacacaatttatcgacaaaagctcgcatacaccattagccataactctgtattctactttcgggcaacaccttgcaaccacactctgtttcttgcttctccaggtcactaaatttcccatgcaaatgtgcaatatcccaaagttgacttcctgttcattatagaacctgcccaatctacattagtaaatttttcaacacttctgttaccactcatcttgaaaagaagacctctgcctagactaccttttaaatcttagaatgcgattggcagcttcaagatgtttcttctaaggacgatgcatgaattgactcaccgcaaaagaaatatcaggccgagtatgaaattggtagataagtctcctaacaagtctcttttactattctacgtctacgaatctcccgtgttgaatatggccaagtttcttgtttgagtcgataggattgtatattggacaacactcactcatttctgaatccttcaacaagttaagaacatattttctttgagaaatcacagtcccttgtttggaccgtgccacctccatagccaaaaaattgtctccaagtcttatttaaaatgaagcaaatgagggaaaatgtttttattttttgatatctattttattatatacagaaggtataatacaatgtgaacatctagtaatactagagtaaatgaaaaaatgcattaaatgttaaattacaactaatttacaactagcttaattttttacactccccctcaagcatactaaatattcttaatttggaaatgagttccctaaagttaggacgatggagagctttggttaagatactagctgcctgttgtcttgagggattatggttcaaggtgatgatcttgttttcaatcttctctctgatgaagtgacatcaatttcaacatgtttggtccgatcacgatgaattggattttttgctattgcaatggttgattgattatcactagaacatctattgggccttcaagtttgattctgaattcatcgagaagacgttttagtcacatttcttcacaaattccatgtgctaaggcacgacattctgcttctacattgctgcgatctgctacttgttgcttcttgttgagagaaccaacccaatctgcatttgtgtatatattaagatctttgttgagagttttccaaaacatttaccatttttctgatgttcccttgaggtacctaagaattcggtagacaacatccatgtgttcctcaaaggaattattgagaaattatctaacaacactcacagtgaggtttatgtcaggctgagtgtgagttaggtagattaactttccaaaaagatgttgataccttcttcgatcaacttttgttttgaggaagactgggtgagattgttatggttccaattttgttaatccttgaacacgagccatctgctatgcgaacagtcctttcatgagagcacttgcttagaaaagaaaatagtgatctatcacctgtaatatggtcagaagcaccagaatctacgatccaagggtcatgagggatttgaataacctgaagtgtatgagcattgcattgttttgcgactaaagagatgacacttaatgagttttgttctgccatagagaaagacagcaagaaaagcaagtgtaaaatcccagaggagacgaatagagagaggacgctggaaaaacctcattggagacaaagaagaaccggagatgaagaaacttgagagagatgaagcgaaaaaatgtcgctactgctacgcgcaactctgatggacgctggatttctggtttttgtcagtcggaggtgggacaagctccctaggtcagaggtgagaatagaaaactccttttaattagttttctaggatagagccttcaaaccctaattttaagaaaggaagggatgagaaaaataatatgctttgagaaacttcaaatgctctgataccaaatgagggaaaatatttttattttgtgatatctattttagtatatacaaagggtatatataatacaatgtgaacacctagtaatacgagtaaatgaaaaaatactttacaactaatttacagctagcttgatttcttacatcaaatgccttggagagtttatttttcattgcttctaattcttctatgtcatccccagtgagacgtatgtcatcaacatagataattagagctgcaattttcccactgttcgagtgacaagtgaacaaggtatgattagattgtgctttagagtacccttgtttctttaccactttaataaacctttcaaaccatgctcttggtgactgttttagtccataaagagtttttcccaatttacaaacctttgtaccaaacttgttttcatatcctggcggtggaaacatatacacttcttcctttgtgaatggagtctgcctagagttgatgcttggttctgaagctgaatcagccacaattgcaatgcttccagtcaagttggcttttcactagtcggtttgccatgtattttccagtaggtatcccgtgtgtgccaataagttttgcaaatatcacacccatgacttcttcttatcattattgaattcaactccattagcaagtaaagctaaaacctcattacctgacacgaatgatgattctttgttggacatgacttttcagcggctctcctccacccttatttcagagaaaacctccttgattgatggcagtggtctgcaaccaagaatcctcctttttacctcatccatattctggttaattccagcaagtagcatgaagacacagtcattttcttcacgcttctagtgttggagcaaatcagcttgactttcccaaatgtcatcatagtattggtctagttcttgctaccaagcaaccatgtcattgtaatagcttgtgacactttgttgcctttgtttggattgctagacccaagtcatgagctcaaaaatttgagaaaaattctttaaattaggaattggctagagcaaagaatgtgtgcatcagtgatttggcaatagtaaaggaaggtgggtacatacatagggttattagctggaattttaatttcaagaggaatatgatggatagggaaaagtctaattgggatgatatggaacatgtgaatctaacctatatttcaattgatagtagaggttggaaaccagagcatggtgactcattctcatgtaagtctgctttcctttggtttacttcaaatcagggatccaatggattagaatggactaaaattccttggaaaagttgtgtacaagctaaagttaaggtatttggctggttggtggctttgaggaaagcaaatgtagatgaggttttgcaaaaaagaagaccctacatggtcttgctagggatggtcttgtcccctagcaagtgtgtttgttgcaagtctagtaatgaaaccattgagcattttttcctagagtgtccctatactcaaaaaatctggtcttttatctacaaagaatttaggttggcatgggtaatgcctcagttggtgtcccaagtcttgttgaataagcctttgggaggtaaaaagagtgtaaggtggtggaggactgcatctttggccgtattgtgggctgtttggaatgagagaaatagcagaatctttgaaggagttgagaattctgaggaggatgtctgggagagtcagaatttggatagggacttgggtatttagaacaaaacattctgagaatttgtccttcctagaatttttgaaggtttggaaaggtcagcggaggatgtttgggaaaaactaaacactttgaggatttctcatttctaggcttaaatagggattggagtgtgatgatgtaaatgtcctgggagatgttgtgcatgttacacatttgttttgattaattttatgtttccatgatctgtgtaccatggttttcctccgccataagtgaggctttcaatatatattggggggaggccagtctaagacaagtggtctctttctctttttcaaaataaataaataaataaaagacctgatgatttgttttgtaattttattttctgctattttatacttaaaccttgtttaccaaggttttcctttgtcacaagtgatgttgtgtaagacaagtgacctctttttctttctcaaaaaaataaaataaaataagaagaaaaatatgtaactactagattctagatttcttttgcacaatgcacaccaattagtagagagttgtaacaaggatttttctttttgtaaaattctcatgtatttacttgttaagagttaccaaccacttaaacgccttttccttaatctttggctacaagtctttggatgaaatggaacaccttttccatcccctgtaattaacctcttgaatatggtttactagagaaaaccttagactctatcttctatatccttctatcagctactgtttgatacatctaaaaggttctaatactgagatctatcatgtcacttgttgcaaatctcaatcagttccgttgaagaactaatggtcccatgagaatggtcaagtctccatccttcttccattttcccttctgcaagcaatttgttgtgagacaagacaattctatagagtaaagggagcctattagccaaaggtttttcttccatccaagcattctctcaaaatctatttgtatttcacgtaccttgtatgaaagttgcatgaaacaaagtgtaacctatggacataaagttccttaaggttttgaaagatactctagagaccatggatgtattacccatttgaacccagaccatacttactcttgatgactgtgtatctagcatattttattttattttatttctaacgtgaatcaaaataaccatttcgtaattagggttttgttattgtttacaatagtgcctacagccaatcccttatttaggctcatcttctcctaagaaaccaagtgattgcctccctccgtctcactgtggatatgtagtgagtctaattgttaacaaagttttcccaatcttaatccaaagattgattacgtacaactttctgtgagatataaaggtcagctagaggctaattaattctatatcattcttaattttcaatagctggaccttcacaatgttccaccaatttttatttctataaattggacttgtagctatacgttggaatagcgaactacaagtttctgcttgatttgtctgcataacatattagttctgatctcagtagtgtgacttactatatcacatatctctacattatctgcatatgaaccagtgcacttatgatttttcaagcataagttgcttaagcctctgtaatttgtcttttcaggctcaagataacattatgaaccttccgttatcaaatggttggggagaaaagcaccggctttatgtaaagtggaaatatgttgaagcaaaggtatgtaatgattccatttgatcgtttatttatttatttactttttttatttcataacaatgtattaatctttgcataaaagtccttatctcttaatgttgataatcttgtaatatagctgacatctatatagaccatagtaaacaattcttctgaaattgcacgtaagtatcagtatcaatccctttcaacaacttaacagaaaaaatactctaaaaaagcccacgaaatttagacaagaccactgattgattttaatgacgtgcacaacttcagttgtaaagtaattgcaaaaatcatgttgcagagatcttcaactgttattgagtagccaataaatcagtttggtttatcattattaggtgttgtcaagtcaagattgatgtcttggggcattctttataaacaaggaagccactcgatctgttatagttaggatatttatcttgaaagtagtttgaagatgaatttggtgaagtcaaatgtcattttaagtgtcttgttgtgaaagtaattttatttaattatgtttatatatattttatcaccttttgattatatataagagcattcctattaggcactagtggcgctttacgaatgattagcaatatttcataaaagtattaaattaaattatgtggaaactgatatttaattacaccaatagcaatatgacaccttacgtggtgcctaacactattggtattttttaacatttctatgtatataatttcaattccatgttctaaaaataaaataaaaaattttgaaatacgtaaaaatcggaaaattgttaatttactcattgaaaacgataatcaatttcatgtaagagtccatagtaggctctttaattattatctattatttacttttcaagatggaatgctagaaaaaaaaaagataaaaccaaacaacttgcattagaattaggaagtttgtttgtagacaataaagatgattacataattacattacgatgaaggaaatagtgttaggaagaaaataggtttttcaaggagtaaggactttagagactccactaacgtactttgagtatatgcactgcacccttcatgttcaagaatttaccaagttactcttccaaaaaaaaaaaaggggggattacacaatattcaaccaatatgaaagaacttttgaaatccataattatgagttggtctgaatttaatttgcccatgaagaattgtaaaggtaaccagttttaaaaggagatgattacaatgagtaggtaaagcattgatttcatttgaagatatgaatgatttggtgcaatgtttaaaattgtgtttctattgcgcgccttgaggcacgcctcacattgaggctggaaaaaatcacactaaggcgtgcgcaatggctgggaggacagaggcgtgcgtacacctcacactgccgaggcactgctaattgccgaggcgcgcaatagaaatgcactgctagttgcgtttctattgcgcgccttgaggcacgcctcacactgaggctggaaaaagtcacactgcggaatggctgggaggacagaggcgtacacctcacactatcgaggcactgctaattgcagtgaggcgtaaaaattggttgaggtgtacgcctcagaacccaaatgatattatattagcctactaacttaaaaaacaagccaaataaaactcaaattaattataaaaagcccaatagaactcaaaagagttaaggaaaacccaataaaaatcctcataggtatcatttagggttagaaaaaacggccagtcgctcctctcctccttcctcccttcaattgcactcttcacaaggagaaacaaaaaaaatcttgccaagctatgcggcctgcgcttgatgatatattttatgctattattgctcaagtttgttctaggatagtagaaacgaggatcctagttttagaaacaacaattatctatattttagtttgagtttaacgagacattttatgctctatttgagttttatgagaacattttatggtttatttgagttttataacacattattcatctttgttatatttaagtgctctaaaattttcttttaattaaatatttgaggcttacgcctcgcctcacataaaaaaaagcgccttaaggcttaaatcaacaattttaaacattgatttggtgagattagaagactccttgatggattggaaagatctgtgccaacatgtattaaaatatccatggagtctataattgataatagagtgagtctttcccaagtctttaccaagcacttgtgtggaatctagagtagcattgatgcatggaatctagagtagcaatgattgaaggtgcattatgtaccatacaggcgatgccactttgtcgaaggagaagattcttgttagaatattagttgtatattaattgtaaaaattaaagtaacttgttagaagtttctcatttagtcttctagctttgtatataaatatatactattttatagaatacaacacacaattctattcactattctctacatggtatcagagcattagagttagaattattattcgaaattcgaaattagggttcatagtaaaaaaaaggagattagggtttgagtttagggttgttttttggaaaccctatttggagtgaaagttgtttctcaccgcccacatagaaggactgccagccaccgaactgcaaaaccccaaattttggcgtccagattcactgcgggtgggccccacgcgccgccgttttccgcttcccagaatcccacgcgccggtgcatgagggcgcgtccgacatcttctccggtgacggtcgacaccctccacactcctggcccttctccgtcctccttccatcggtctccggcagttcttggcattttgtggtttgatacttttgccttcttcgtgtttgagtgttcattctttgatgtttgctttcttccttttctccttcaattgtttttgctttcgagattatgacagagataaaatcagattcgaaatcagtcgttgtttctgatgtggttcccgtgatgtctaaagtcacggaccataaattgattggttcgaattatttggaatggagtaagtcgattcgattgaatctgaggagtattgacaaagatgatcactagacgtacgatccacttcaggatattgtgtatttgttgagggcaatttgatctcttgtaacagtaagaaacaaaatattgtgtctagatccagtgttgaatcagaatatagagctatggtacaatctatgtgtgaggtaatatggatttattgacttttgactgaattcgggtttaagacttttattctaacaaaattgtggtgtgataatcaagctgctcttcataatgcaaatttcgtgttccacgaacgaactaagcacattgagattcattgtcattttattcgtgagaaaattcaacaaggtctgatctccacagaatatgtgaagaccggagaacagataggagatatttttataaaggttttgaatggggtgcgggttgattatcaagttgggtatgattaacatctatgctccagcttgaggggagtgttaggatattagctgttagttgtaaaaattagagtaactttaaaattaattttattctattgtatcctcatcttctaaaaatatcattttcttttctaaattattttatcatcattgatttctttccccctcttttttttctcaatctaatccactgctatcagaaacaatctaatccactaccatctcctaggttgtaaatatagcattcctcttaaagcaatgttctatatatatctccgctgtaaaagccatatattttatatatttttaatacatgtttggtatcagatacagaaaccattttttttaaatacattaaataaaatcagaactattagaggccaacaaaatgttatataaacataaaaattactctcactccatcttaattggacgtctttggaaaaatattctttaatatatcatcagttgttaagtagaggagttcgaactggatagccagaaccctaggataattttttttttattaatttaattttggaatgaactagtcagtaaaatttcccactttcagtatgtattatttgtttagtagttactttcactccatcttaattggacctctcatggtctcataaatggagctttaatgacacaactaatattggcttcttccgctgctaatttattcacctgtaggcataattgaagtctatacttgtaaaagtaattgatgcatcttttgattttgtaatctcttctggaactcaatcaggctgcagcatattattatcatggattgatccttgatgagggaaacacagaaaaatcgcatgggatggctgtagctgctttgcaagcagcagatgagtatttcaaggaaagtaaaaaggcatgcgaggcatttaacgcggctcctcctttgtcaaggtaaattcttggtcaacattctctcttttgttgcgcctgttgaatgatatttgtattattagtctaacatactttgtacgctcgaacttatgcatgctttaagttatcagttactactgcgagacggttctctgtatggatagaacaaatatattctatgcatagcacccacaagctcatggacttttactttagtcttgtacaccatttgctaatgattagtactttcttatctttcatagttttacaatttttaagcgatgcctattattaggaaagaaaacagagtaaggagatgagagaatattgctgtaagaattctctttttcattgactaagatagcatgatacagagaattgtttatatactgattagtacaatcgagaaagtcattagctaactaactaactactaactaacttaacagctcagcactaacaaccttgcttagataactaactaatcttgatactccccctcaagatggagtgaataaaggtttagttggctaagaaacaaaggtttagtcaacatgtcagcaagctgttcttgagatgaaacatgagaagttttgatgatccctgcttgaagattttctcgaacaacatgacaatcaatttcaatatgcttcgtcctttcatgggaaacagggtttgcagcagtgtgtagtgcagcttgattgtcacaaaacacatcagcaggtcccttatgctcttgttagctctttcagtatggacaaatagccagacaacatcacaagttgtgttggccattgctctgtactctgcctctgctgagaatctagaaactgtgtgtcactttttacttctccatgaaatgagagaatcaccaagagtatacagaaacctgcggtggatctccttagaatcatggcatgttccccaatccaaatcagtatatggtgaacctttgacaaggctctgataccatattaggaaaagaaaacagtcgagaagagagtattgctgtaagaattctcttattcattgattaagaaagaatgacagagaattttctacatacagagaattctttttcaaaaaaaagaattgtctacatactgattagtccaattgagagagtcagtagctaactaactgaactgctcaacactaacaaccttgcttgcttaactaactaaactaactaatcttgatacctatgtccaatttgattgagaaagttgatatgggttttaaagtttgcaatagttttcctgcattggcatgctgagtgatctgttttgtttctagaaactagtgttcaattccttccctgctaccgagatatagtttgtcatgacccagtgtgaggactctactaatgagcaagctatatgaaacttttgtagtggtttcggttctactaagtttatatgtgagtgttgcatgtcagttatgctgggatagaatttgccctttcaagattgactttgattcaatttgaaaataataacctactagactttaattctaaaaaaaataaaataaataaagaaaagaacctattcttttgtattgatttatctatctaatattgataaagtttgatgcagaaatccaccactttggggaaccatgaagtatctgtctgaaaaaattccaaaagatacttcaagcaaagtgcggataaaccgggacctctactcttctgaaaagtaagtcttgtttgatgattaacattgaatgttattcataatacaaggaaccctgatacatattaaaataatctttggctgtggaatttttacccagaattatggaaactgcccccacattgccagactttgccttagccttaaaaccagatgagtaccaacttcctccagtagatgcctcttggaaccaggagcatatgaacaagggccagacaggcttcaaccaactcaagattgataaaagatgaatcgcatttgttacatttggaaactacataattacaaagaccaaacttaagtttggattggatgatcattcagacgcagaggttcataacttttgagtgtccaacgttttctcctgtctttcattatagctatttcgtaatataatccattttttatgtctcttctgttcatgagatttatgatgtatctattatagagctgtgtaaaagtttcaattgtaaattggctgctgctgatgggagaataatgctctctttccaaattcccaataaggtttgttattttttatagtagagaatttgaacgagtttttgtgcttaaaattggctatgtgaaaagatgttgctctttataaactctatttcttgcactccctagctaattttcttatttgtataattgttaatgtaagaatttttcgtaacgagaaatgtctattatttgtaaaactgtaattttctttcagtttcgtcagtttagactataattgtcttaaataaagaacttgtaaaatcctgtttctatatttttgggtttggatggaaatatgtagcattagttatttttggattttcttttaataaattcaaaacgtaatttgtactgataaattttttaaaaaaattacagttttacaaaattaggtatttatgttgttataaaaatcatttagtttatgctactttaaatttgaaattttgagtaattatattgcattttttttttttttgtttagaaaat

SEQ ID NO: 184423 - DNA, 4730 bp, Cannabis indica
aataccaaccttagcaaaaaatgttacaggaagagcattatcaatcaaaatgtcaaactaatttagattgacaaaatgaagaaataaccaactttggagaaaagaaggcacaaccattttaactgcgcgtcacatgaaagaagaaactcaaacaaaatttgtggtagttagattatagatagtagatacttgtagcaacttcatgtgtggagataataaggggttgagttggatgaatccttttaagcttggtgataaagaaattcaacccttagtatctctaatatcttttttgctccacaatttgtaattttttgtgattttgaaatcaacttatatagctgttcatatgacggaacagaatggtgtggcaaaaataaaaattatactattacgaatacggtatgaagttttgtagttcaaaatataatgactgaacatattagagaagatgaacacaagcactaaatcattcataaatatttggtggattgcttatgcccgtattcatatatatgagaatacgaagatgttacatttgataagaaaaacaaaaaaccccacggaatgagaacattatgtaataaagaattcgaccaatttatatttagtcttattataaattagaatatcataacactactcaagattaagatctcttcagttgatgtatatgaatttctctactcaaacagaggttcttagaaattcatatgcatcgtgtctcagcctacataatgaatattgtttagagtacctcttttttaatgtctccacattaatagttttttttttcttgatgaaaagtgtgattatattacttaaaaaaaccgctaaacctcacggtcattacataatagttcaagaggaatagaatcaacagaaataactccaaacttctggtggaaaaacgtccaattagctacattatgagtaacgaaattacaaagtctactaatattactgaaaatacaactcgaaaaaagagaagaataactattacaaaatgaaacgtagttatccaatgcccaacaagagtctttcctattaagggcattgataactaccctcgagtcactctccacaatgataaacttggaacccatatccttcgcgatcgaaagagccaagcagcaagccgccgcgtcaccgcaaagcgcatcaaagaagtccagccgaactgtttgaatccagacaatcctaccagggtggttcccggcaacaactgcagagcacatgctttctaatcccactttaacatcacaattcaattttatccaatcctcacagggagaagaccagacctctttccatgttcttaacaataatagttgggataatctatcatgttcttaacaataatttaaaatttacatacatggtgcaacttctgaaaaagggtgcacggtgtgggagtgtatttttttagaaatatatgaattttcttttagatattcttaataatttattatgcaaaaaaataataatttaattaaacaaaacacgtgcacacaataaactctgtctcaattctacttttagcgtgataaaagtaaagttctaaatagataaataattataatgtagactaaaaaaaaaccagcaaaattatctataatattaagtaataatattatatgcacatctataatacactgcgacatattagtaactattttcaaccaatctcatttatttcagattgactcacatttttaaactgtgttacattaacgtgtataataatttgctgtaaatttagtactctataaaccagcaaataagagtgaaattaaactttatatgttacagatttccatcataagttgagatttgttttgtatcattaatacgaacattttttttttttttgcagaatcctagttccctttcaaaataaagataaaaaaagataaaaagaaaacctgaagtatctattttcaatcatagcgacactgttgcactcagatatatgcacatggtcagaaaaagagggcattatcgtaaataaacttataccaaaaagaatcttcaatagataaaagccacaagaaagaattggctgtaatactcatttcataaattttagagaattaaatgtaggacgaaaaaaagctcataaaaaaaaataataaaggaaaagtttcaatactgtactgtgctgcactgctgctgtggactcgtaagtctgaaaaacaaaaagtctttttttctcttgtcgaccagaccaattattttcttggctatctgccagcatttacttcaaatcaagctttgaattgctactgtggataattagatttcttggtctaagacaaatgtcaatatatcaataagaaaagaaaaacaaatgaaagcttacattagttgcctgttcattaaggtcgtatttcagaaactatacgcataaaaaggaaaaagataaaaaagccgagctgcgagacaatataaaagggctaactgcttcattaagaattttcatgtcccaaactatacgcatacatcattccaagtgaaatgaaccaatgtcatcccaaaatgttgtttgccatcgtgagaaaacaactccacctcaaaagaatcactaagaactataatatatacgcaatctcactacaaaagttgtagagagtttccagcttcacaaccattattgtgagcagcaacagcagcagaatgtcatagtagcctatttccaacagtctggaccaacaaaatcaacttctattgacaaacccaagtcatccaaaaatcaccttttctctatcattgtctaatatctccaaaatagtgagttggtatctccggaggagaaggcatgatcgccacagatttaaactgttccaaaatataacgattcaaatgagaacaagcattctataatactagaaatagagaattattgtgctttcattaatctgggcaaacaatgtgttacaaatacaattgagctaaaataccttatgttgcttgtatttccttcttgaagcttgataagactcccctcttctacttagatacaaatcgtgtataataagaacacattgctttaaatcaggtggtgtgtatcttgaatgattttgcagggtcaacgtctgctaaaattgcatacctcatcaatttcccttcacatatatcaagtcaaaaaatattgcaaaggaataaattaatatgaacaataaattcatacccaaggaaacacctttggcttaactatgaacctcgcaagaaatataacagatgctgccaccaaagaaggcaggaatttcacacaatgatagtccaacaaacttagctcagcaagatagtaactcaaaaattccaaatgtaagtttggaggaggctgtttcgaatgaacataaagataagttattattgtgacaagttgcagttttaggattaaatcacaaaaaggggatagatcaactgactttgttactctcttgagcaacgttaataaatctcctgcaaacaaaaatagaaatagcaacacacaatcaatccatttttcttatcaacaaatactagcgtgtttaattcaaaagttaaatatccctattaccttacaaaggtctttatggtaggattgcccaattcaaacttcaatgacttaagtacttcactttccatcttcactaccttcacaaagagctgttatgttaaaagaaaataaaaataataattcaaaatagtgaatttaatgacagagaaaatgaataaatcattacctcttccatagtgtaagtattatccgttatatagcaaaaatcttcaacatgaggagggccaatctcttcatactttcttcttatcagaataaatttgaaacaccaacaaaacaaaaatagaaagtatcatttccaagccagaaaaaaacagtatcattaatacagaaaaatccaaccctttcaaaaaaaaataaaataataaatataaaaatcgaaagacttgggacttacgacgctatcagcattgaagaaactcctaataactgaagactctggcgatccaaagtcttcattgacaaaaatctatcaatgaaggaaatagtgaggaataaagtatcggaaagtagtctgtattcctctgcaacttctaccaaccaatcaaccaaaattcccctcataccagctgtaatgtccttttgaactttctccatgtaatctggtagaggtcgtctgtttggatcagcctgaagattaacccataatcactatattttactcacaaaacacaaaagtggatattatacttttaagcaggaaagccctcgttacctcaatttcttgaagatatgcataaatgtcagagacataaggaacgcacatttgtggatcatccaacgccgccggttcacgattcaaactctcactatgttcgtctccggtagcttcggtggtggtggtcgaggcggttgcgggcaccaccttctgaagcttcttcgttttggtaacgcgtttgggctttttgggatcaaccccagaagaaacgacattagacaagttggggagctcacccaaaacaacgcgccttttattcttagacgatgggcggtcgccgtcgtcgtggaccaaggaggccgccgccgcagacctttttttagcagaacgcgtgacacgcacgctctggtgttgctccgccatgacagtgagtcaagctgagctgagaacaaaaaggtgaagtgaaggaaacaaaatgggattagggaggagaagtggagatttcagccc

SEQ ID NO: 184424 - DNA, 4207 bp, Cannabis indica
aagttaatcataccaagcgggtttatcgtacaaacctgtacaagtccaccaagattatctctaagatccaaaacgaaatatgatgcacccatcttttgaagtcttttcatggctgcaaatgcaataaaccaatgaaactaacaccaaaaactttacatctagctaattgttacaaggatgaagattcatcttcattgagataaagtagcaaagcataaacaaataattaataaagaaatatattttggtgaagaattcaagatattgaataaagaatacaataatcattcagttgtgttaccaatggccaaatcttttcttgccaatgcattaaactcttttaaccgcatgtacccaactgatggaccgccattttccatttgttcaatccgataaaacactggggtccgagcaacaacttgtctttcaattgttacagattgaataggtccacaattcccatgctttacctaaagcaagaaggattattcaaaagaagtaacacaacaatactctaaaacaagattgttaagaatgaaagctctcttcttttagcgcataaagcaaagaatcgcaccaaatagaatcaaaaccttgagggtaacagatgtctcattaggaccttggatagaagataacacttcaaatgctgattttcctgccacatccattccattaacagctaatacttcatccccctatcaacaaaaaataaaggagcaacctcttacacatacaagtttacacgcacaaacaaaaacagaaaaaaaaaactcgcaaaatatggtattagcgtaatatattatcatcaaatccaacaagttggtatattgagaaagtgatagtctattgaagtagaatgaaataagaagatatctaagctgttttgtcaatataatctcgactgtaaaagatattcacgatttcaccacatactgatgtgcaacaggataatgagaattccacattaaacctttaagaataaccaaattcaaacattctccaactcaatctaataaaatcaaagtgttatagaacagaatttaaacgtgaaatcataagtataaaagtcataaacggtactcaaaagtgaacgcacaaaaaggaaagcaaaacaaaaaaagagaaaccatccacaaattctattattgtattaaatttacctgtctcacacctgctaagtgagcaggaccatccaatacaagtccgagtaccctcaattttgtgccaccattttcatccgggacttccttgatgttcatcccaataccactcacatcataccttgccattttggagaacttccaacaacaacaaaatcaggatgaacttgtaaatgaaaatggcaagtgattgagaatcaccagcaatattgtcactaataaaccaaagactactgcatatatctagcactgtccacttgtaaggctatatatatacaagtcattgtaaatagatcacaatttctacttttctctcatcaaaaactttgctgcaaattgtttatcagttacaagcagcccaatgaaaagaacagaaaaataagtataatcattggtacctgatcaggtgaaagaaatcttgtgtaaggatcacccaagctagccaacatacgcttaattacatcatgagcttttgaccttgactggattgaagaactcctaatatcttccttcttcctctgaaaaagtgtttagtaaaaatagtcactatgaaattttataaaaaaaactttactagcaaaataatcacatttggtcgcataaatgaccaaaaattacattgtgcgatcataaaacaactgttatagcctttttgtgtgaaatttgacaaactaacaatgtgcaatactaaaatttacaaaataaccacacttaacttattttatgcgaccatgatgtttgcatagtgtaaatctatgtttgttttgcatttgtgcgactataaatggttattttgctaataaattattttttagagttattttgttaagggcaaatattattttggaccctgtgttttgtaaaagttattaattggactctctgttttactaaatgacaaattagatctcatattttctaaaatagtactctaaactgattttttatcaaaataaaaattaataataatccgatctagagttattatgataaaatttagtacattttctgtatatgtttgtgctaaaaattatcttcaagttagttatattaaaaaaattattgaaaattaagctcagaatactatttcgtactagtctaacttgtcaacaaaataaaaggtctaattggtaacttttacaaaacaaggagagtttagtattaacccttttgttaataaaaactttcatggctatttttccagaacactcttttttgtgaccaaaaactatcacaacataaattcaatgtggctattttgcaaattttacactttgatgtagttagtttagaaaattcatccacaacaaaactcaatacactaaacatcccaaaaatatgagattacaatctcatatttcaaaaacaagaaataaagttcagatttttaagagctaaacctgccaattttcaggggaccatcgatgctgacgactggtatcgagaaagctatcattaacgatttcccaagcttcctcaacaatcccctcattagtgacaaaggtctcttccgattcagagctcaaatcttcgatcaaatcttgttctcggcaatactcagaagaaggagaagatggtgatgatggtgattcgagagcaaggaaaggagaaggagaagaggctattagagtgagggagagagcacctgagagaattcgaattagggttttgggaggagtgaaattggggattaaagattgaagctttgaatttgaagagtgaaatggaattgaggtatggcaatagagtaacctcatctcataatcttagcgggtcttttgatttttgaggtttaaatatcaccattatcactctatttatatttttcaataataatattaaattatttaggaaaattctacacattcttataaattgatgcacttattcactttctacttgtttcgatattcagaataatttttcagtcaatatttttatatttgtgttcgttatatttattgaagatgtctaataaaattttaaaaatttcaaagtaattagtattcaaataatctattttatacgtatataaaataaaatattcatgtgtaatccaatatttgaaccttgttttttggcatattaaattttgtttaaattttttaaaattttatagaatgccttaaataactataacgttcataatcatgagaaaaaaaataaataaaagattattttagatacaaaataaataagggtgcatcagtacatcctttttgaggaggtacattgtagaatttttcttaaataatttaagaaagttctcatgtacccctatttgtttcgatatttgagagagttttttagtcttatttttttcatggtcatgtatgttgtagttatttaagacatcttgcataatttgagaaattcgaaaaaatatttaacacgtaaaaaatagagtaaaacagtatgatgcatgcgtgactcttttattttttacacgtatgaaataatctatttaaacgtattgtaaattattctgaatttttaatttttcttgtgtaggtcgacatttatctttaatgatttttaattttctttgtaataaataataatagtgtttatcactctgccttttgtaatgtccactttgtgctattcttgttgggctttgcattgatgtggggtgttattatttggttatgttcttgtgagatttgtacaactttattttcgcatgatttattgggcttttgaccctttaccggtttaccttgttgaatattatttttatataaaaatacactgttattttcattttgtcgtggatatccaagagaattgtgttaagagataatgttctctctatgaagggcattatgattagctacaagtaacacataatgatcttttccttgtgaaggcatgtttttggagtatgatcacttgttgaagaatattaattcaataaaagcttgttttcatttcataggcatgtattgccaaatatgtgatcttatttgtcatagttaacaaaaaagggaaatgtgaaaatgtgagcttaattgtcatattaacaaacaaaaaaataaataaaa

SEQ ID NO: 184425 - DNA, 3164 bp, Cannabis indica
ggaaatcaacctcgcaaaggagagggctgcaattcaaaataacagaatgctacatgtagtcttcaagagtcattaaataacataattgtcactttcaaatgtcatacctcccacaagtaaatgtgtgtattgatagagccaaccaaaaagagaggcctagaggggtgactggagaaagccctagtcaatatgctccccgcacgtggaggaggatccacaaactcctcaaattcctcttgagtctcccaacctaagccagaggcaccaataccagcataaccaggaatcccaaatgctccaccaccagtcaagtctcgcccaggccttgcaaaagggcccgcaccaacagttgctccacccagtccaaggtgggtccctttcttgcttccgagaccaataccaggagatacacatgtaggagctggggttgattcagaaccagcccacccatttaaaggccaatcagcctctgaccacacatagtctgagtgatctcttaatgatacttcttctctccaattaagaaatactataccctgaatcatatagaaactgacattaaaatcatctatgtagaggatgcatcttttgaaaattgggtcatattccacaagtttttgaaatcacatttgttcatattacatacaaccacagctataaacacacgccctttctatgtaagtgaaatgtatattaagtttgtgaaagaacaacagaactagaagattcaccctgccttaaaccaagtgatggtacctattgccctgtattcagcttattattattttttttttccattgatctgaatacataaaagataaatctaggagcataaaccacatggcaacagagcttgaaagtcagtaaggcagagaaggtagtgaagcaaatttacaaatgacagcagactatcaccacaaacaaacatgatatataattttgaggaaagttgtacaacttacttttcggttgctagaaacggcagcttgtccttgatgaatggagttgatacacattgcctgcacaaaatggaaagggacttaattaagctaattatgatagaaattctgaaaaaaaaatcactagcaaaaataacctcacaatcagcaaaatatgacagaatttccatatcagaagcccatacatgctatcagaggagaaaaagacacaaagttggaattggactgaaatacctccaaaagctccccgtttctcttgagcacttctctggggcttcggaagggtgcaataccctgtttattggtcgtgtctttctgccatgaattcagaatactaacatcattccgtaatggctgtttagcagatgatccagtttcagtatttaccgtgccacttccagaagtagtttcttgactaaggatttcctcagcttcatctacctctctgccaccttcagacatttcactccaccctttcaaaggtttatgatcaaaacattccagactacatattttttcctcagtaaaactttcggatatcattttaggatcagcacagatgtcccacagtatatcgaatccttctttgtcattcatcatgtccaaagtgaaactatcttcaccaagattctgagggggagctctagtatgagacctagaatcttctaaccaaacaagagtctttacatgctgcccgtgttctattttcaaatacaaatacgatgccagctgttttgtataataagatgacacatgttccactgttgctttcagttgctcaaccaaggtcaatgagaccaatccaatctgttcttctatactcctgtcactaaaatccgaatttgtcacactgcatgattctgaagaaagtccgtgtgaaaagtcagaaaaataactgtcttcaagtttataggacatctttatttggtgcttcataaatttggacatatgtcgccacaaacaggccccaacaattttccatcgttcatcttctggaattgaatgttttgtttcaaaagcttgatcttccaacaaacctctagaaatatgatgaccttttcccacatcagtgtccaataacctttgagatgcaaagtctgctatttgagggagaagcttcttcaggatggcaatgtcgacttcatacagtatatgctcatcattatgtttgatcaggagagattcaagcatcaaaaatagatatttatagtttcttagaagccaaacataagaaaaatgcacagaatactcgattaaatcaagagctgtaaggaatttcgtactgagatcttcactgagcgatccgcatttcatcctcaaagaagctcttaaaatccgtgatgacaacaaaagacattgaagatagtaagccaaagcatttgacaaggaagatctattttcacaagaaacatcattttccatatctgatttcagttttgaacaagttatactgcaagcaacaacaaaccgagaaaataacagagaggtttctttagtagcctttaagatagccttactcataagggaatacaagcatattctatcaactgcatggtttttatcttgtgcatgctcttgatttacatatctatgaaatagatcatatccgacaaccaacaacccttgattggatagtaagattaaaatctgcagaaaaaaaagggaacaaacttaagtcccagttgccgataactgttataacaacaacaacaacaggaataatatacttacatttctaattagactgagtggaagtagcgaaaacttctgttcaaacaatccaagctctgtgtaaaatttatgcctaaagctttcaaccagttctagaaattgatgattatcatatttttctgagcccgtacgagcaccagctgattgaacaacaatgtcttccctgcttgggtgctctcttatcaatttcgataagtgtttaagtgccaaatctagtttagcacaattctcaagactaaatgccacatcatctgcaagccaattggaagaatgtcttgaaggctttaaaattccatgcagaatatcagaatgactagagctggaggtgtttcctttagtcatattcccaaggacactcaatgaagttgaaaggcactccaaagcttcaaccttataagagaataagataaatgtatcgtgttaagctaaaaaacagtacagtgattacaccatgggttcatatatatatatata

SEQ ID NO: 184426 - DNA, 3662 bp, Cannabis indica
gttgtacaattaaaacgaaagaagaaaattccttttagtatttattataataacaacctatatatgttatattaatttaatataattgttaataattttcgttatatatattataacaggcgtgacagtctaattactcatcgagctttctgtgacgcattggctcaagaaactgcaaggcatccgacgagtttgaacaccattggtggtcaccagctctacggtaacagccatgtgaatttaggactgtcacagatgggatcccaattttcaagcctacaaaatcacccatctaccaataacatgttaaggttgggacataatattactactccgaaaatagaaaacctcatttcattatcctcatcaaaccctaataataataataataattcttttgggaaccctactcagaattattctccttccacatttttcctccaagatcatcatcataataatcaagcttatcatccatttttgaacaaaccatctcattcccttacccaacttccagatcttcaatccaataataacaacaacaacaattcatccgacattttcaacctaggatttttctccaacaataatggaaacataagatctgatcagttcaaccttgatcatggtggtggtaataacacaaatggaatgccaacaatgttctctagcatagccgatcatatggcggctggtcatggtggtgccgccatgtcatctctttacgggggcggtggaaacaggcaagataacagcaacaacaacaacagcaacaacagcctctcccctcatatgtcagccaccgcattgcttcagaaagccgctcaaatcgactcgactacttctagtctagtcgacgcgccttctttgcttagaagcttgagaaattcggcagctagggtttcaaataataatcatgatcatcacgatgatcatgatcatgatcaccaacttgaagggttaatgaactctttagccaacaataatggtggcggcggcggcggctcgtccaatcttaatgttttcggaggatttatgaatgccctaggtggtggttcaactactacatcgcttgatgttgatgatcaacatggaaatttgtgtgatgatcagctggatcatcatcatcatcataatcatcaaaccaacaattacaataagtttcatcagaataatttgggggtgagttttggatcgggttcggataaattaacgttggattttcttggtgttggagaaattgtgaggaacatgcatggtggtgggattagtagtaatggtaacaacaatactattactgcttctcttgacgctcagttgaagtcaacgcagcaaagtcaactatttggtgggacaacttcgaccttgcattaacaagaactatatatatatttataaataattataataataatagtaataaagtaatatttatatcataaactttagataaattaattatgagactgtttgtttaattaaatattaaggtgagtatacatgaacttgggaaactagctagtctagccagcttaattcatttttaatgtttcatgatcatttgtgcaagccttaaggcttacatgtttagatccattaatttcatattcagttataataattacttgagtgatgatcatatatatatattgattaaagtatggattgaatttgaggcatatattctttgttctatgtgcattattgaaatgatgatcaagataaaatatcgagaaaacatatagtaagatattttaaaataaataatattatatatatttatatatgcatgcagattttattgaagtaacttataattatatatatcatgaagtaagccatgttcgaaagaatcaaaacgtcatatatatagacatggatcgatgcagagccatacttgaaaagattcttctcaatcactacattccaacatgttcgacaagcaaagctttataatttattattatttgtctcgacctgaccctatatatacctccatatatattatattaattctggttattagttgaacaagatatatataaatatatagatatatatatattaatatatatattttgcataacctatagagaggcaggggaagaaatgtacgtgttgtaaataattcttttaagtataaattaatgaagagttgtttggtctcctcctaataatttaataatattacttagaattaattttatgatttgcaagtttgattttgttcccaaattttcacaataaataatagaaatatattaatgtcttgtactctcccatatatagatttagctattctaactcctgaatgaaaagcttgtgtgtataatttataaactatatatgatcatttctgttttgcacatgcattgaataaatacattgcatgaaaaaacattctatatattgactttttagacttgcaattgactttctagacttatatgcattggattatacctacacatatattatttttttaacatcaatattgaattaatttttgataaatttttcctaataacaattaacaccacaccaataatacagagtctacttttataaccagatttgagatcatttatatcttaattaattaaagctagctgagaagcttgcaattaaagtggagatgtgtgttcttgatcagtaaacctaaaaagattacaaacatacaaaacgaaccaagaacagtacatggaattaatgaaaaaaatgatcaataatgtaagtgcagaaaatttaaagtaaattatatataacacagaaatattttccaatttggagctactcctctcgaatggggattccatatatcttcactatattaatggtatgttacaatatgaactggacttttgatgaattacacataacaaacttttcccttaaacaaagtctttgaataaatgaattggtggagaacaccttggaaatccattgaataagcacagcccatcttcccttgatcaataactttcttcttcctctcactcaattatctcttcgatcctttcatcaatgcagtatattgaatgccatgtcatcaatccgtataaatatttaggatttacttaagatctgatacaacaaattccccaaaaatcagtattctaagttctaacactttagccttcatcaataaattccaagcatagcacaaaattaacttgctaagtgttagaagtttagttcccattacataaattaatttttgtaaactacccaaaccaagtcgaaaagatcatgataaaaaatgcaaacaaacaaaaaaaggacaaacccaatttatatatatatacatgcggatgaaaaataaaaccaatccacataacaaacccgaacgactaacttaattaagagctttctttttatatttttattatacataattatatattatatattatatatagagcttttggtctgctaacaaagccgcgcagtgtatggcacgtgatgcttgttattggtcaggtcgtctatttactgagagtgaggtcccccttgctcttcagcgccctttgttttagcggatatttctgtctaataaaattattttcattcaaaaaaaaaaatatagatttatatataaaaaaccatttaaattcattaattaaaatttagattaaacctatattttttacattaccaaattg

SEQ ID NO: 184427 - DNA, 1924 bp, Cannabis indica
aaacatttaaccattacttacacaagtcactctttctagcaaaggctgacttataactatggccaacttgaaacaatccatgtagagaaaatttcatttaaacgagaaatcaaagctgtgtgtgctttaaacacccatttctttttctttacttctcattgaaacatacaacatagaactttcacatacttgtattcaaaatataaaagttacaaagtagcaaagttatcagcaaaatatcaaaagttctctctctccagacttctattatcaaaaaggttaatcgaggtcaccatcacacgagaaaacaaggcagagaaaaccctctcaatggaaattacatcctaatcaacaggtgtatatgtattgactacaggcagttagcaatagtatcatctattttacagacatttctttttgctcggccagatggctacaataaataagcaaagaagcacaaaacaacaattacaaaattagaactcataagaaagctccccctctgcatatggatctttctaacctcgtcagaatgaagaaatccttgtcctatattctcacaaagcctgtactggtaatgaatcaaacttcaaattagaacaacttcttccccatttgagaagagaaggactaaatcccagcatagaagtacccacatcaaaatgtagaaccatatcctctaattgataacctcccaaaacaatcgaaactcccaagttcaaacctccatctacaatccctaagcacattacttcatcactcactttcatcatcaaattcctaccatgaaacttccacctcaccatctcactctgcaaccccaattcaacatctggcacaagtggaccgagctgcgttttctttatagattttgagtcaaaacacaacctaaaaggtgccaccggttcaacccttttcatattcatagaaaaggcagccttttcataagctttgataaatatagcataaattgagctttccatagtggtgaaaggaacaattgtgcttagcttagtgtgttcaacatcaaatgacaatctcttaccaccaattcttattgacttcaagttgatgaagtattcagtttgtgaatcatctgggccagccaagagaggagtgtagattagtgacttcgatatctcagagccaaaaacagaaccgtaatgcctcttctcatacaaaacgacaccatttgaggaagagaggcacaaagtgaactgccattcagagctaaaagctgcggaaacttgcgaaggaaacgcaatcctcgtccttccgaggccaaccattccattagcaccgccggctaagccattcaaaaggggttttggggcgcaagcaaagagaaaagggtactcacctaagttaacctcctcagacttcgacccttcatcagccaaaagaacatccaaggtatcttccaccaaaactccacgccgacccatttgggaaatcttgttctctgcgaaaagggtacaaccatcggcgtctcctccacgattacggttcgtaaaaggcttagcagccaaacattgaattgacccagatgaaattcggagcggagaaaaagaacccagatgagaatcacaacccatccagattaacggaccaccgagatcgacaacaagcttggtggcaagaagggaactcccatggcgaatctcggtcaaatactggaaagtcaacgcatctttagtcaccggaagaagaacaagaggacgagaatctccgaagcggtaatcaatctgagcgtgagatagagtcagcaagtggagaaggaaaggaagcaaatgaagaagagtagccattgatgaaaaaaaaaaaaagtacagatgaaggagagagaaaataagtagcaatggattatgcggagggacgccgcggatggtttacctaaaataatggaaaaaatagaaaaaaaaaa

SEQ ID NO: 184428 - DNA, 3855 bp, Cannabis indica
catatttgttgttttatcctatgagagttttggtttgtgcctctgtgtgtaaaaatgttctactgaaaatataaggtaattattgtagtttttgtaattgtgtctttatgatttctttgttcaaattagatttgagtttgttttgaacacgaatattagtatgttacatattcatcatcaataatagaagaagaaacaagaaggtatatttatttattttatttgttcttttttcttatatagaaagaaaggcaaatgtcggtaacactgtactagaagacacaaacaacaactcgtttagcgcttattaagtagttcttttcaactcagtattctactcactcactcactcaatcacccatggcggattgctttgactctcctccttctccttcacccacttctcccatgaatatcgatggctccgaccgtgactctgccctctctaactctgaatggctcactcagcgagaggtaatcgaacgtcgtgctcgacgagtcaagcaacttgctcgtctttacaggcaccattactgggctttgatggaggatctcaagtccaagcacagagaatactattggacctacggtaagagtcccttcaaggaagacgagcacctccctcctaatggtacggatggaatcggagagaacgggaagctagggttggcttctgccaccggagttggggatgacattaaaaggtgccaagtggctggctgtaaaaacaggcctatggccttgacaaagttctgccatgcccatatactctccgatccccaacagaagctatacaagggttgcacatatgtcatcaagaggtatttctaatttctattgttttttgttttttgatttattttttattgatacagtattttttggtagttgccgtgtggggagggagaaaaagactagttttctttccatgaaatttattggttttggttgttggtaagagtttgaaatcttctaagggattttacagctgaaatagatttcttgttagagattagcaatgaagatttaatcctttttcaagatgtcaagaacttagttgatattatgatttgattcactatctttcgtcgttgccatgtgaggggtaaaaatgaaaggattttaccactgaaatgaatttcttagagactagtaatgaagctttaatctattcaaaatgtcaagaacttagttgagataatgctttgttatgagttaggaagttttcggagtgatgttctgtatgctatgacttagaattaatgaattgagatggataggtgtgtttgttggtattcttttatatgaaggaaatgtttggtttgagtcacatcatacatgaaaagcacactgatggagagtagtaagttgaatataaaagtacaaacacctcgcgaggtagcagaatatttatgtaatgtgagagaggatcttttttgaataaatcatatcagttagtgttacttaaattccaatggagtatgtttggggacttcatgagagataaatggtgttatttgttgcactaagttacggttagtttgtatgttatgaaactcaggtgttgactttttatctatctagagatactagactgaatttaccctgcatttaatagtttactttgtttgaatgattatctctcaagtttctactagttcaatcacattattattccttctcacgttctctccaaatctaatagtgatgatcatgatcatcatgaatctggcagtaatcctatttccaaaaactcttgttctcttaagtagaggacgaatgattatcattaggatgatgatgatgttgaggcttagttgtcagatgctgcctactaatattactaataatgctgatgatgaggaggaggaggaggttgctgtcaataagaagaagaagaagaagaagaagaagaagaaaccttttgaaaagtgatgaggtcgaggttttaaaacgtcctaaaaagttttgtgcaaagaacatttgtcatgccactaaagtggacatgacaaagttttacgcatgtgctagaagaaagatgagttatcttgagttcaactagacccaactggcagatgcaggttgaaaataacttattgaccaagtactttttatctgccagttgtgtaagaatttttcaacctgcgcaccttatctgccagttgggtcttattgaactcatgattgctatctttcttctagcatatgcgtaaaattttgtcatgtctactttagtggcatggaaattcttctttacacaataccttttaagacgtttcaaaatctcaacttcaacctcgtcatccttactccaaatcctttcaaaaggtatcttcttcttcttattattattattaacagcagcctcctcatcagcagcagcagcagcagcagcagcagcattagtaatactgttaatggcagcatctgacgtcgcagcctcaacatcatcatcatcctgatcatgatcatttgccctcctcttaaaagagaagagagtttttggaaatggatactgtcagattcacgatcattattagatttggagagagcaggagaaggaataggaataataacataatcattaaccttttgggtaaggtttgctgattatttagtaaataaaaattttgtattgtccagtatgcagtcaggccctctgctgtgttgtaaaccaatactgagatccacagtaccttctctgtgtccaactcattttcagaagggtgaaaagtgtctcatacgggacctaagaaaggctggtctaaatatctcttcattaaataaccttgccccgaaactccatgtcgtagtcgctgaattcgtatctcaaatccaatccaaaaggagagccttacgaaaggctagtgtcgctaaggtggagccaaagtagagcggagctgaccaatttcttaagctccttatgccctttgatactctgctgaatacataattagtgggagggggactcaattttgataggacgatagacttttgcccaagaaagaagacatttgtgcatacctaagataagaaagactcgggagacttcattttcttcacaacaacctcgcccatgagcttttatcctaacaacaataatgtaaattggttattctactttaaagtcttgatgattttattgttgtaattaaatcacaaaatactcgaaatttcctcaatgtttattattattattattatttattatgtatgtaaccgttgtgcatgattgtgtgaagttacaagatgtataatagcttcatccagataattaccaagtatatttagaccatttcgactgtatgagaatctgcttagcttcctttctgtttattattctattatggttaggattatcaaaagtatacaccagaacggattaacttaatgagtaagtagttgaaatgactccatttcagaaaaaagaaaaaattgacattactcgtaacaacaataaaatccatttcacacattgcaatttttttttgggaaatttgaaattctatacttacaataccttaaaattttatccctaaatgcatagttattaaaattggtcatatatgaccacattcctaatttcttaaaaataccactgacatttgaaatccctaatctcatcttcctctctctcaacacactctcggctcaacccacccgatcccaaccccaaccccagtcgacccacggtgacgttgacggcggctcaatcgacccacggtgacggacgcagtggacgcacgatgaccgacccagtcgacgacgcagattttttcgacccacagtggatccacgccgacgtcctaaccgagatgtcgaaggtatgtttaaattttttttgatttttttttt

SEQ ID NO: 184429 - DNA, 5351 bp, Cannabis indica
aagaaaagaataacttacaaatcgaagcttcacacaaattaatagcagtaaaaagaagtttgaaaaaagagagggatacttgatcaaaagaggaaaataaatatgaagtgtctatctttctccctagatcacaacatagaaagttgagtagagattttatatgacattgagggactggggacgagagaggtttgatgcgagatggaaacggtggacagagttgtcttttaaagtggatctgtgtgaataggaggaagacagaaaaatagtattatctgtaattatcaaactttataaatagtattaaagaaaaatttaaaaagtaaaaaaaaagtaaccaaaggaaaggacaatataaatatttaatactagtaaaaaaagtaatttccctagaaaataaagactaaatcgaaattgaagttttggggacgttacctcaaaatttcagtaatggggtaaatcatgtcaaactaaaaaatttaagaaatttgataactaattacaagaaaaaaaaaataataagaaatcgccacatcactcagtgagtgaagaaactttttaaagatgttttgatttgaaaccttgggtttggactggactagcatagaaccaaaaatgaagggtgaagaagaaggtagtctgagaggaccgtacaagaagggtgagagaggaatacacggagacgatggcgtactagaaaccattagcccccaacgcaagagacgtcaccttgggattccccttcccccacactctcaacccgaccaggaactcggagaagaagagcaaaatggagatggagctgaagctccccacgcttggattacacccgaatcctccaaccctcttcaccagctcccttctgattgctccgctcctttcagcaacaacgcctccatttccgtttgcttgaccgaccatgaaataattgatggtgaagctttcactgtgcctgtttgccaggtttgttctctggtttttcaagctcactcttcaagttttgtaagtctttcaaattaagggctattttgcttattgggaaaatataataatttctattctttacttatgaagctctcactgaatttatatgatgtatgtacccttcattttcgtatttcttttggctaatagataatacatataggtatgtgtataaccttaaaaaggaactagattaataaatatgattagtgatgttcttaaaaatccaaacaattagctctccagtgaaggagatcttgcaatggtgaagggaaattttgaagagcatactgtttcaaaagaaaagagtagaaaaaagaacaagaacaagaagcgagtaaatactcctcgcccagcatgctcgtgggtgtattttaggtaagattctgggtcttcaaatttggtccatagtttacttttaattatctcctggctgccttgttgatcgttcaagtaaactactgcagccgagagtttatcaaggaatacagtgcttcccatcccgaggcctctggccttaaagctgtgagcctcttcattgtcattggattgccgtgttggtgaaaaagaaacgttaaatgaagtaaataattactggtttgtatgtttcaggcaacgaaagcagcatctgaggtgtggaaatcaatgagccttgaagagaaagctaaatacactagtcgtgctcgcgaggtatgggataactacttgagtgcagctcctacgcgaccttccaaaccaaggaaccaggtaaatagtgttttttcttttgggtgggagatgtgtgggaactagattggataatctctgacttcaaaatagcagactaagctagtcacaagatgctctcctggccgcttattcaacgtgctgcaacgccttacagctgaacaaagagaggcagtcaagtgcatgggctttggaagtctccttgatcttagatgtcggactctccgccgtagtttgtgtctttggttgttggaaagatttaatacgacacaatgcagcttggagatttgtggccattccattcctctaactcctaaagatgtggagtttgtgatgggattagctgctagtgggaaagatgtgattaactcagggccagatgacttgattttagacttgcgacatagttataatgcaaccaatcgaggtatatctgttcgccttttagaagagaagttggcagtttctgaagccggagaggatttcaaaagatcctttgttctctatgctctgggtacgcttttatctccaacagcaagactggatgttagcccttcattccttcacttcttaacaaatatgagtgtcatccatcaatacaactgggggaaatttctacttgaccggctagttcgggaggtagcacgttttcgtcaggggaagcaacgtgctgttggtggctgtcttttgtttctacaggtaatgtagaattttatttgcagtgttttgatagccatacagtgccttgtttatagctttgatttctttgcagctcttttattatgaaagaatctctatagaaggaacaaatgctcttgctcctgctgtgtgtccatgcttatcttcatggggggaggatgaaatcactgaaagagaaaaacgagaaagagagctcggtggttatggttgcggacaggtaccttttacattttctacttatgataatgaagctaatgtgtgatgtgaaataatttgtatagctctgcaggtgattttcaaggagagaggtgttgttgtggagtcttttgacagaagtgggcaaccaaatagtgtagctacaatcaatataagtaatggggttgaccatgatcctttcttttcgcacgaagggaacgaggtatttattatgtttcattcctcttatatcatgtattggttttatttacgtagcattaaaagtccaattttgtccaatctgtatgtaatttgttgctaaaatgtttgccaatgatttatgggcctacgacatattacacatatggttttctaaaaggtcatgtttgcatcattcacttcatttagctgtcggttcaacaataaatactcatattacacttatgttgttatactttggaaaagctttagcttagccatttttggtgcttaaggacttgctgcaaagatgttagtatgcattctgttatgcagaagatttttaagccattacttcagtaagtaatcatatttaataagaaaatatgttttaacatagagcaaaattttgtaggttactaatggaggacagatgaatgggaagattgctgttcaagaggtgatatattcttattttcctctctttgtattattatcagaaaggcctactagtagtttgcttattgtacctcatgctccttcccagttttaattattgatctttttttaaaagaaaataattaaacaatttaaaaatgaaggtgtaatttgtaaattttaaattcgtgcagtttttttaggagtatagtggaccctttcctttagcatgtcattttggacttttgtttattattaatctggtattcttcttcccagccacatatgcccatttctctcaaaagtaaggatattgtgcgtggggatattgaattgatagttgaatcagtcagaacacagtgccgaaacaaagattatggttgcaatgaaaaagttgattacatgaagaacagtgaccacaatgaggcatgcttctttgcaccatgtgcctgcccacttcctgattgcaattttgtcagctcatctgaacagctgtcacttcattttagtggtaagcattgggattcaggaaggcgcttcaggtacaacagcccattgactgtttccttgagtatgaatgaacaatttctcgttcttcaggcagaggatgatggtgctcttttcctccttaacaagggtattgaaagcattgggagcacagtaatggttacatgtatggcgccaagtccttcaaaaagaaggtttgtgtatgatcttgtgttgaaacgaggaaagagcactctcaggttgagctcactagcagaatgcttaccgagaagggttgaaggttttcctctgatggattttcttctggttccatttcgtttcttcgatgcctctggtcagattaacttggatgtgtgtatatgcaattctatggaagaactgactgatcattgtccttgatttcatagtaactggctgcaaagttcattgaatgcatggcagttctcctgcagctaaattgtgcttgcctggggaataagctttggatcctgatgcatttaagctatggtatgaagtctttactgcaaaatccataaaagaaggtaattgacaattatctcaaactaattatcttgatgaagagtagggcaattatagtactttatctcttctgtttagtttctaagtaactcctaaacttgtgtgtcattggcacattgggccagcagtccggtgctctcatgttatccaggaagggttgcatgccttattttgttacatttcctttagaatgtatggaacaaggaacttgtgctttgtgaaactaggaaactgatagcctagagaatggttagaatgcatggctttcttagcctggttagtgctttaatgtaatgcttgcatgtacaactaaactaaatcaatttactaattaagtcgagtggaaaataaaaggaaaagaaaaggattccttgatacaactgactaaagattgagcatgggtagttaaaagttaaaacttattgttgtccatacggtagtgaaaatttagtatcaccctgttgaaatggaaaaaagtgaagatttaatttcttcttggtgcttttcagctctgtttatttttttttctgtctattctttcttttcctttcaagttccaaaataagcttcttatgactcctattttggtactcaatttctccctcttcatcctctatttacactcttttcattggtgatgaaatgctttctttattgtgtaggctttttcaacccaactttggcgttcttgccagcacacttgtttgaggtattataagatttctttacgacttttaactcatttcagaatgataaatacgaatattttttcttctatgctctcattaggtctacaaagcctatgattttcttagagaaagaaacgtagatgtattgtgataaaaatatgtgacttttcctttgcagttgatattttctgcccatctacagcatttatatagatcattgaaagctgtccagagtttacaacattgggtggtcaggctctggctctggctcaaataaaatctaccatgtcgaggacaggcatcgtgttctacaatctctcatccgacaaacattaccattttggcagctccacaatcttcgctaaaccttaattt

SEQ ID NO: 184430 - DNA, 4157 bp, Cannabis indica
tatgtcatcagcgaacatgaggtggtttatggcagttccatttcgggccatcttgaatcctttcagcagcccgagtttctccttctcaaagagaagtctagttaatgtttccgcagcgatgataaaaagcgatggagaaagagggtcgccttgtcgtaagcccctcccaggggagaattttcccacaatagaaccattcaatagcagctttatttcctcaactgagatgcaggcctttatccaatccgtaaagggacttgtaaaaccgaattggtataggactttgatgataaactcccaatccatcttatcatacgccttttcaaggtcgagtttaataagcatgaaccccttcttacctatttttctcttcattgaatgaataatctcccgggctatcatagtgttttccgcgatgtgtcttcctttgataaaggcagcttggtttggggacacgattttatgaagaatgttcctcagacgggtggcaatgacttttgaaattactttgtaggctacattgcataaggctatagggcggtattcattgaccatcgctggagagtccttcttgggaacaagaacaattgccgtgtcattgatatacttgggaagatcagtgttggtgaagaagtgggtaaccatctcaaagagatcatcttgaaccgtgtcccaatggtgagcatagaagcttggtgggaggccgtctggccctggcgctgtatcctttcccatttcaaatagagctactgttatttcctccattgtcggtatcgcattcagggtagcattgtcctgtattgtgacaattgtgctattcgactcttgttggaatgaagggtgactgcattgttgtttcttgaatagctccctgaatttgtcgatgaagcattttgctatctccttatcgtctctaatccaatcttcactcgggttgttcttgatacattgtatgtagtttcgtctccgccggactatggtagaagctatgaagaattttgagcacgtgtctccttcatgaagccattgcactctcgatttttgcttccagtgaatttcttctctttttagagcctcgttgagttgttggcttgctagctctattgcaaggtagtcgtccgggttttttgtttcagtgtcttggagatgagcttgagcgttctgcacttgacgatggacattctagaattgaagtttgttccattgctgaagtttctttgttgtggctttaactttcctaaagaaatttagcatgggattactatgttgtctcttttcccaggcctctttcacgatccagaaacttctggggtcccttgcccacatgttctcatacttgaacaatctactcttgcaattggcgccacctagagtatcgaggagaagtggcctatggtcggatccagaggcagagagatggtttatgactgcatttgggaacagtatatgccaatccggggaagcgagtccagtgtcaagtcgagctcttttcattgctcctcccgggttggaagtccccccacctttggcccaagtgaatcgtggcccttggaacctcaggtcaatcaagccaacacgttgaatcatacgacgaaagtcaaaagagtagagggctgagtttctgcttcgagtgtaattaaaacaatcagagtctcgtagagttccattcatgtcccccagtaataggattgggttagttgtgttgagtgctaaatctctcaggtggttccagaaggcctccttttgatctctatgtggggggccataagttccacacaaatgccatagacatcctggggggtccgaactaatttcgccaatgattacatatttttttgctagcttgatgttacaaataacccccttcatccaacagataccaagccccccagaaagaccaacatgggggacatagtgatagtgttcaaagtgaagtctaatacaagttctagagaatttatcttgcggtaggcgagtttcagacagaacaagtacatcgggtttgtgttggcgaaccaaattcgccaattgtcgaactgtcgtggaattcccgagaccacggcagttccaagctagcactttcatggggactcgggagacttttctgggcaagtctccgtagccccaaagtgaaaatcatgtcttccttctattgcactttttccttttgtcgtagtttcctcatcttcaacttctgtgatttggcaacttgtcctaggcttcgtggtcttttcaattacgatgaagtggttgtttaaatccactttcaggtcgaagacgctaccaccaatgtggttatacttccctgactttcctcccatgttgatttttgtttatttgcgacccttgaacgatttcggggttgctgagagtgttgggtaattcttgggaggccgtcctctacgtttcttttccactggttcatcgtggacaatgggagccttttcgcttctgcctcccctgcttctgcgtttgctgctagagccttgttccatacacgtgccaggtgagaagctagagggtggggagaccatctcagtgtcgagccccaattgttgctgaactgtgggagcatttttcccagttgtgttgtctcgagtttcaggttcggaatgactttccttcgattgagaggccggagtgctgtttgtgtacgagttgaaacttttgactggagatgggttgatgagtaatccatctgatgctttacgttttctgggcccttgggagtgttcttggactctaaaatcttctatgtcaagtattgggtttattagagtgggctccctgtagtacttatccacagttagggatccaaagattagctcacgggcctttgggtcggcccagcattcatttgagggccaatcaataagttgggcatgtgttcccagtagtgggttgtaggccagtttgcttgggcccatgtcgaagtcagaaacttgtttgtttgtgggtgattcacctgtctcagctaagtcatcaggctggttgttgctaatacgaggttggtttaggtgtgcccttgagttatctttatttgtagctcttgaaatggaaatttttgtcttccccgtccctttcatcctcaggcttttatcagctttgttcactgtatcattgtcctccactgtattggagctcgatgccccattggctgtgaccatagcgtcctctgtggcagcctgttgcaagtcgagaacggataccatttttgaattgttgccataaggggcaaattccccgatacccggaagataaactaacggaatctgggtaatgaccatgttgggctcatcagcttcggttgcttcctcttcgtcggagacgattcttttcttcgtcgggtattgacgacggcattcgcgtatctcatccaactctccgttttgtatggctctgtgaaccttgaactggtttctaagaatggggtcattccccaattgtttttgcaggactcagtcctggaaccacttggctagggggtggagaaggtcgatttttcagggacctccttttttaaccatgtgccgaacatcggataaaaatttcctttggcgtctttcactaccgtgggggacttgaagcaagtgctttggtcgtggtttattatcccacatttgaaacatgtttttggtaggcgctcatacttgtattggagccataggtctttgagtttttgtctccggaggaagaagcccgagaatataggtttattcaagtctatagttgctcggaatctaagtgaactcatgcctacgacatcttcaatcccatgggggagagttcataaactggtgaggctttggaggcgatttctttcaggttggataagttccagtaaagggggggatgctgtccacttggacccatataggggttttgtcgaatcttacctcagctggggagagccacgatggccatggcatgatgacaagcaaagctccgcagacaaaccatggcctacggttgaggacattcatcgcatcatttctatttgcaaaagtgaactggataataccatcatctagttctttccatttccaccccttgatggcattccaagacattttcagagagccctgtatggtggccttaccaagtcgataacgacttatgattttccccagcaggactttgttctcctcctgtggttc

SEQ ID NO: 184431 - DNA, 1600 bp, Cannabis indica
gggaaggcaattgcttctaaattgcaccatgagtcagatagtgatgaatatcctgatcttctggacgtaggtccagattctgattcaaatcaggaagacgagtaatgattatggaaggttagaattttgttaattatgattatttttttaacaagttgtgtacatgaattttggccaaaaatacaattataaagaaagaatttatatttcgaggtttagtctgttttcatgtacttaataatagatggcagaggtgtatcacagaagggtaagataacaatgaatctgttaaaataatcataatatataagtttatagttgtaagaatcaaaatttttaggtaatataaaatatttccatagatgtgttagtgtgtgtcaagaaatataattatattgcttaacacctgataagaatattcatatataaagtagcagggcatttattataaagttattttaaggtaagaaaagtggaccgttgatcattatactgtggagttaggttgtgaaatgtgcttatttagtttgactttggagtcaataaacaacttaggctgctctattttgacttgagaaacataattgattttttttatttttatttatttatttatttttgctgaataaaaacgtaatggtttggtttaattcattacttgttcttctgaccgtggggactacatagtgaacaaacacatcttttgttgaagaatttgtaatttacggtagattaattataaaaatccgaatgatgacttataacattttttgtccaaattttgagtattttttcttcaaaattttaaataatttttaaaatgctctactaactaaatcctactcatgtgtgatgcattaattatgaaaaaaaatgtgctatattggttgatgtgtaatacgtttactggaaagtgtacttattgattgactttttagagtcacatgactcaaatcatatcgtattctcaatcacaatttctcgtgacaccgaactaaaacttaaaatacatacattactaacgtaaaaataatatacacatttttaaaataaaattaaaagaagaaaagaataaataattttattttcaggcatatctatttggactaaattaaattcaatatttgtgatcttcatcttcaatacgtacaatgccattatgtttcttctttttccaagataattcattttttttatattggggagggtggatttgaacttagacttcaatcactaaactatacctatgaccatccaatataattcatttaagatttttatatatatattttttgaagtttttatgtttctttcatttaagatttttatattaaatggatgaaatttcaaagcatatatatgttaggaattgcattatttttattattttcaaatttctgcatattattaggttgaattggaatagtctatttgaaattattcatttgaaataaattgtatacatatttttaataaatcataaatctcaattgatatttctatacttttttgagctttaatttacgtccgaccttacattactatcgatatttgacaaacatatgttttgttgatcaaaggggtttttttttttttaatt

SEQ ID NO: 184432 - DNA, 5985 bp, Cannabis indica
aataagtgatcatgcgtaaggttgacaaaaacatgagtttgctttttataacatgtgcaaggccaaattgcctcaaaatcaagagaaataccctgttttaatggtggcaatctaggttcatattatttatatcagcaagctgaattaaacaacttcaaaaggtgatggtaagtctaactggtaatcacatttcacctccccttccaatggttgaggtcgaagaaggtccaaatctcttatccctaatccaagaaaatttaaaaatagaaaaaaccacacttctaaatgccttttcactcgagtttcacctctcttttgggaggatcaaattccaaataggtatacggctcggttggttcctccctgcaaacaataagtacgtttgatgaacttgtagcgacagaatgaaaattatgtgtacagtgaaaataataacatcatttttaaggtgagataaaccatacatacccaggtttagaacgcatgcaccgccagaaaagcttgaaaggtcctggaactgtcttgaaaggatttccttcaaaacaagcctacatgaccacacatgcacaatacgataagtttaactcaaaagaatggtgtaaaataggcacaattttcagctgatttctcagaaaattacaagcgtctactttttataaggagtacctactgtaaaagccttttgtgtgaacatccctagagtattatgaagccttatatttggagctcaattcgactaaaagtttgtaacttaatagacaaagcatggaaactttagtcttagtaatcaattatagacccatctgaagtttttggaatacattccgacatgtatctcaattctcaagtataaaaaaaattacattctaaacaagaaaaaccctatgcccaattttgatcttttttttacaaaaaaatcctcaattttatggaatatccatccattgcacaaactgatgctgtggagggtgtttacctaacaacagcagataagttagtgcttgtcaataaagagagtggggaatttttcttgtgctcctctgccaccaagcgaaagaatctccccttcatatcattaaggaggaattcaggtgcattcctgctgattccatgtgagctaggcagcatcataattttgactaaactccagtcgaagaagctgcttcttcctaaatctaaagtggataaagtaaaagtaatgttgttggatgcttctttcattcatggttaggcgggatagagggactttaaccctcacgatctttaggcagcagatggtagctgtttgcaagaagtaactgaccctacatgtatcccctctgcactagaagcttaataatcagctatcctggttggcttgttcttttgcaaagtaaattatctggtcttaaaaatcttggttcagttgggagtctttgtcctaagaaaggttctcctcactggtattggttgcttcaaaattctatgaacttctgattttaatttctatcttcagcatttttgatgctgagtttctgcctacaaagttatacggtagctgactctgtagccaagtggtcaagatctagtaagatcactgggtctttcgttataaggaatttgccacccgattgctttggtctaatgattaatcttctttttcttgcaaattaaaataatctacgatacaacttaattcatttccaattttctaattagctcccgaaataaaagagtacaacaataattagaagcaaaataaacctaacaaaatcctaaatcaccaatgtggtagactaacaaacaatcaaactccggcgattcaccgattaaaaatgcataaacctattcgctaattgaatcagtaaatacctaatccaatgacagcaatgcaatgaaattagggcaatgaataggataaatgatttatcaatatatagagtcaaattctgcaaaaggaggatctaaaatagtggttgaagaggagggagtgggagttcatacctggatgacgtcttcagctctatcattgcaacgatgggctttgggctgacggtgctctccctccggcgttccccatggactatctctcctcggtacaggcctcgtctcgctcattcttcttcttcttcttctccgaacacaatctctctttcagatttttgcgacggggttttaggtaacaaattatattttggtttttttttttgtaaaattaatccgaaaagacaaaaccaaccttccatcttggttttcataaacgcagaagaaaacagttggtaagggtaaaacgggaaatagacgtttacaaaatataacattttattttttctattaactaaaaaaaacagttaaatcatggttcgtctcaaagacctagtcaacaacaaaaccagaaagaggagaattttgattttcagggaaaggaagaatgggagttttggtgaaagtcactgatgcgatactgttcgtgttctttgtcattatcgcgctggcagctccgttgatcgacgcgcagacgtgtctcccgacgagtcttatcccagacttcttggtggagctcactagttggtatagccgtgagttcggcgattatctggttgacgagaggcctcatttctatgtcggtcttctttggttggagttccttttccaatggcctctcgctctcatcaatttgtacggtattttgagtgccaagtcttggttcaataccacttgtttgatttatggcgtctcagcgtctaccgcattggtaaagttctctcttcacttttggaacttgggttttcataatagttttggttcgtgaaaattctaccacttgggtttgttttgaatttataatttagtacatatccgtactccgtatgaaattttctgcttgttttgttacgtttatgtttatattctcgatcaatttaatactgagatgaagagagtgaagaacgcatacaaaaacatccccacgcattgtttggttatttatcataaagacttaactaagacaaagtcgttaaactatgaaacgccaaatgtctgttattagagtctaattgggtttgtgttaaaatcagaagtatcctgttgtccttaacaaataacaatgcatactccgcagtattgacttttttcaagttatgatgattgattagtctcattttattgatcttcttggatactcgggaaactcttttcaggctgctattttatcagaaatgatagggtccaataaagcatctgataagctcataatgttgcacttgcctttcttggggtttggtgtcttagcgacgctgcgaggcctgctaccacaatctggaaaggcttctccaactgttggcaagggccctgcactggctaggaaaaagagagcttgaaaaagagattgtatctggctaataataagtgcactgaaaagtttttgcctttttggtccttttctctctgccttccatacttctgttgcctgattgagtatatatgtattctgatcttggtattgttggcatatttggaacaaattcttatggttaaaattggtggtttcttgattggatagttacgagctgtatgaataatgaaagacatatatgaatgatttgagatggatttctctaaactagattttatattctgatttctttatttgtattattgtgcctgagtttgctgtccgtgttttgtagctctacccataacattagaaggaaatgagaaatgttatatgtgtatgcattggtatttcactcgtggaattttgacatatggtaataagagatttatgtttgtatgcatccatattctcagtctttaggcattttgacatccggagcagttatgaaaactaatcaataattattggttatctatatatatgtagattgaagaggagcttgttgatccataaatatattgtagctaaagtacatcaacagaaaaggaagaatagaagaatttagtttccttgctattctagctgtcattcaaatgtcaaacatgttgagaaacttctggatgcaacgcccttcctcttatcctagtagagctttcatttctttgtgggatctgtttggtctcaagcttctttttctgaggcggctggatcccaagtgttggttcaagaccactggcttgattaatgattacagcttctctctctaaatggccatggtatagtatttttttcaccctgtgctaatgaagttttggattctttttcagataataatctttgttatgaatctctggttggtttatgtttgttctagatttggattggcaaaggacgagcataataggtggggttgaagaaagccttaaaaacacagccttgtttgtttcttagtctcatgattgagtttatgaataacattgtttttatgtaacaacattgttttggtactttgtcagtttaattcttaagaattaagatctattttcatctataattttctttgtaattcaatgttgtaatgcgacattccatagttttggttattattacatttatttacaatgttgaatttgagttacttttaacaaccaaaagtatatgattaagtttccaatcttgccaagataaaagattcattctttggtgtaacgtaaatattttcttttgttgttgtcatagagtttttatgcaaattacagttaggaaaacaagatttcaagttaagcacaacatgaaaacctttggccactcgccagtcttgacagtcaaagaaaaagtcaaaattatcccattcaagttcttgagcccactgtagggccattttcatagcctcaagctctgcctctagagcagaatctgaattaatgctgctaacccagccagcattgccttccatgaacgctgcatccgccatcagccacttctggaaggtcctatcattgtgatgaacttgctgcatggcatgctgctctgcttactctatcatcatttctttctacaccagaaaactctttttttgaactcaatatatctatcatccacaaggtccaataaaatgtccgtggaccatactcttccatctctgagaatggagttcttgtacctccaaataacttagaaaacaagaggcagtataaggtgggaaatccttgatgagtgccaaggagagatttcgttgtcatagagttaatataactctttaaattgtattttaatatgaattttaggcgatttcatttattattattattattattattattttttcatttgtaattaagaagtcctaaaattggacagtgcattaacgagtattaaggaatagagtttgcaaaggttaaaacagtaaatagaagaggcgactatctagcacgtacagaaatccaagatctaaaatttgatttaattatattatttgatatggttgattggtaagagaaaggagtattaaagaagtgtgaagccacattcttttacagagaagaagaaaaaacgtgttgatttgcaaaaatgggtgttttggtgaagctgattgatgcgattatgttcatgtttttaacagtgatagctataggagctccgttaatcgattcgcagacgatttttccggcgagtttgttcccggaagtgttaatcaacctgaagaagtggtatgctcacgagtacggtgactatcttttcacagagaagccccatttctttgttggtctagtttggctccagctcctctttcaatggccgctttctcttctcaatatgtacgctattttggcttccaagtcttggttccccactacctccttgatctatggcgtctccatcttaacctccacggtaaagtttcttcttcttttgaatgatttatattcgcttttattgcttaatttgttttcgattggtgaaatctacgatctgggcttggatcagattttgaatttgattcctttttcaatggcttaaatatcaaaattttggtgattggtagaatttgacacgtttcacgttgaagtgaataaaacccataaatgtgttcgtgttccattttgtgg

SEQ ID NO: 184433 - DNA, 8516 bp, Cannabis indica
aaaaaaaatatatattttattctaaaaacaaaatgctaactactatttttgacaaatgaattttgatcacaggatagacaaaccaattaagtttgattttctttttgattttatattgtagtcctctttcttgggttgatcatccacttgagaaaatattggaagaaaatgtgggcaactaaaagacatgagctaaagaaaggatctggaaatggattggtagctgtggctatagacaaggacaaagggagtcaagctgctctaaaatgggctgcagagaatattctctcaaagggtcaagttgttgttcttatccatgttgttcaaaagcaaagttctcattctccatcaggtaagaaaatagagatcattttcttaattagatttgttttaaagaaattaaaaaaactaatatcgaattgaaattaatttgatttttgtttctagttggaggaagcaatgccataatatgtgacaccaacaatacatcaggttcaccacacaagcagctccttgaaaaacaaaccagggatctttttgttacttaccattgtttttgtactcgtaaggatgtatgtcttcttaaaccatcctttgtcttatatatgttttaatctaaaataaaatatgtgaaagccgatattaaattgattagaaaaataactcacttctctgtttcattttttataaccaacatttgttcagatacaatgtcttgatatcatacttgaagactcagatgtaggaaaggcattatcagagtatatttcctatgctgcaattgagaatatgattatgggaagtccaagcaagcatggattcatgaggtaattccttatcttcttctcaaattcattcatcacaattatgaccacctttaaattcagtgcttttattcttcagattcaagggatcaagtattccaagcactgtatcaaaaggggcaccagatttctgcagcgtttatgtcatttccaaaggaaaggtatcttcagcaagaaattctactcgtccagccccatactcttctccactactaagccatatacagaacctaactgcaaccaaagaaattcttaagccagttgagacaactaaaccaagacttagtgtaagaggttagtacttctcaattataattctatgaaaaatccaatttggtttttgatgttagctttacttttaatatttttaacaattcagttgatgtttctgtgcagcgaacgataggcaatctttcaagcctcgcagcttacaagaagatcatgcaataaggtaaggacttatgttatgtcatgtcatgtaaatgagtaatctcttagagtgaaaacttacaccacgatcacatgtctgaaaccagcaggtctccatttgcaagaagaagaaaccttaatggaatttataatgctggagcattctatgaatcagacactgacatatcatttgttagctctgacagaccgagtactgaccgaccatcttcagtactctatgattatatagatccaggtaggaactcaagagtttctaccagctccgacaacagctttggttcgtttcgtccaggtcccaagttctgtgacctcagttcacttcatgatgtatccacaatttcaatggagagtgacatgacaggatgctcattttcctcacagggtctggtgtgtatgatagtattctcatatatgaatcttagattttgaatcatacaggatagaagtataaacatttcaacaagaattagaagtttctagcaacatgtatatgttaacaccattaataaatcatatgctccaaaatatgtgaaaatttgagtaatcatttcattactactttgatcatatgcatagatattaaatgttctaaaaaatttaggctttgatgttaatcatctaacaactgaaagatcttctcataatccacttctatttgactgaaacacaggatgaagttgaatctgagatgaggaggctaaagcttgagctgaagcaaacaatggacatgtatagtgcagcctgcagagaagcattaactgcaaaacagaaggtattaatatgtcataatcatttgttctcaattatcgttcttcaatactcttattctcgtctatcaagtttatttcttataagaaaattttgatgtccaatgaaggaaaaagagttgcatcactggcgtcttgaagaagaacaaaaactagaagaggcacgactggcggaggaagctgcattggcacttgctgagaaagagaaagccaggtgcagagcagccatggaatcagcagaagccgctaagaggattgctgagttggaatctcaaaagagagcaagtgcagaagtagtatcgctcaaagaagtaaaggaaatgcgaagaatgttggataatttagcccaaagtgatggaagatataggagatatactatagatgagattgaattagcaacagactattttgcagaatctcgaaagataggggaagggggctatggtcctgtctttaagtgttacctcgatcacacacctgttgcagtcaaagttctgcgtccagatgctgctcaaggaaggtcacaatttcagcaagaggtaaataactgagtaatgttacaagtccatagagtaataatcttcattgcaaactcatattcacaagtggagaactatattaacaaacacatattagcaagaacttgagtgaacaaaacttagtaaacttagtaaacttagtggactaaagtccaagctaacactaataattttcaaccaagctagaacacatgcttgaagtccaggagtagtgaatgagatattcaaagcaaaagtccacatctctatgcaagttcatttaataacaaagcagtaagtgacaagatctgcatatggaaaatgtaaccattcattgcctcattatgctaaaatgccaaacacatttgcatatttttgtataaaattaacttagaaagtaattgatgtctgaaaaagaactcttctactgagtgattcaaactttgtacagaagcagcaagaactaaattttaaccaatacgaagaagatttttttttaaaactcatattttataatgtaagtgcagattgacatacttagctgcataaggcatcccaacatggtacttctccttggagcctgtccagagtatggaattctagtatacgaatacatgggcaaaggaagcttagatgactgtcttttcccaaaagggaaaaccccagctatgccttggcaagtgaggtttcgtattgctgctgagatagcaacaggcctgctctttcttcatcagaccaagccagaacccttagtccaccgcgacctcaaaccgggcaacatcttgctagactataactacgtcagtaagattggtgatgttggattagctagacttgtcccagcagttgcagaaaatgtaacacagtaccacattacttcaacagcaggaactttttgctatattgatccagagtatcaacagacaggaatgcttggtgtgaaatcagatgtctactccttaggaatcatgcttttgcaattgataacagccaagccgcccatggggctggcacacttcattggaaactccattgagagaggcacatttcaagagatgctggaccctgcagtgactgattggccaatggaagaaaccttgtcttttgcaaagctagctttgcagtgtgccgaactgagacgaaaagacaggcctgatctttgtaatgaagttctaccgcatctaaacaaattgagagaatttgctgaagaaaacatgaacttcttctcacccggtgctggtttggtaccttaccaaaaccctgcttccattcatcatgtaagttaataagaaaaaaaaaactaaaaactaattttctaatcatttaaccataacaaagtgaaataactacatatgttttaacataattaacatgaaaatatcacacatttgttaatctatatactgtatagaaacgtaccctttgaagatatgaaatgattgaaaaatttcttgcaggatgtgatgaatgaccagtttcctcgttctacctcatcttcagttactggaactcctacaagtagagagtgaggaagagcatttttgcctgaattttttaagattaaacaaatgtaaaggctgttttttataacagcacaaacttacagtgtacaaaataaacacttagtttcagaaaatgcatattccaaatttgtatattttcattcctgtacacaaatgactctgtagttgttcctgtgaacataagttggaaattttgttgttctttccattgatttttctattgttggttctagatatggagaagagcttctcaataaatgtaaagaggaaatgataaagactttaagtttaagttcctttcctgatagtcaaactttgttcatgttaatttgagttcaataaagtctttatagataataactacgataaacttgattataaagaaaatatcaagtagtgtactgaatacactgtacatacattactatatttattgagataaaattgtaaatgcaagtggaaataatttcctttgtgataaatagactctaacctttaatacttcgaaattcgaatcttctgaaaaataggcatgagagtagaaaccaaggtgaaaaggtatctaaatctaacattgaggataaaataatgaattgaaattctgcaaaaataattttagaaagagaaataatgacaacaaaaagaacaataaccaagaaaaatggatggaaagccattgattagaatttgatgtaattagaaattaaacaactgaaaataattaaggaggccaacgattaaaattgggtgcaatcagttcaatcaagttatgttctccatgaattcagcaaaaaaaaaaattatgtactccatgattgataatcgaggagtttccttatttcagtacttcataatgtctaatttttcaatttactttttttagtggaaaacaaatttccaacaaaggttttattaacctatccattttagcatttggtgtgtttattcatttgaacgtgggagagtagaggaaaaaataacgatacactaattatagaaggtggcacattccagaacaaaagacaataacacgtgtcctcttagtaagcatacgtgtgttacacagttacactcaaccactttgtttctacattctgcaacacattaaataggaaactcaaagcaaacaaaaccttagattctcttcactcattttattaatctcaccaaaaaaaaaaagtagaatatatatatatattatatatatatattatagggatgggacaaggcaaagaagtgaagaccagacctgaatctcaggttcaaattcaggtgagtaatgttgtttgttgcatatctgtaataagaaatttcttttgtatatatatgaagattaatttgtagcaagtattgtaggagaggggagagatattcttcttttacagaccaaaagtgaacaaagaagaggtccacagtgcagatgaggttcaaaggctttatattgttttgagacctgagtctggtgaaaggcctgttgaagaaaagcaggaccaactttctggcaaggaaggttttatgcacaagtcctctcaaactgaaactactgtcacttcaggttcaaatcaaggtggtcatggaactgaggtaagtggtaacactttccataattggttaaattgaatgtgaactaaggtgattaattgaataatcttcatttatatatgttgagatttggcatttatatgtgtgtgtgtacttattaggaagtgaacattgagaagcagcctttactgaggttgatattgatgggaaagaaaagcctccctgatccagccaagaagaagggtgtcccttattggggttttgtggagttggttacaacccaaatagaagatatcaaaactgccctcaaaggaggtatgtatacatattttccaccacactcaataacaatcacttggtgagttcatttcgctaattaaatgtctcaattaagaaataaatgttccaaaaaaaacccaattatgcaattattatcttgttcatgagtgaaatttttatcatgacatactagttttttagagatatttaaaacattatacatatgtttgtatatgaactacagaggagtatgagacatcaacgagagggcaccggcaccagcctggcggtagagctctaggagaaggcatatacagaattcttcgtcactatccaaataagaaaatgcatacgcatttgatctacaagctcgaatttccagctgagaatgcaaagaatgagccacaggaatccctcaacatcgaacgacaaggttcattcctaatccaaataaagaatccggatgatcatggtcaacagcatggtggtggtagtactagtactagtagtagtggtggtgcttctggctttagaggccttccgaacaagcgcaaggctatgtttccagcccatctccaaggccaatttgggcataaccgatactctcctgccgatccccccgactttttgaactacgaaggctgcgagttcctgctcattgcagcctcagatgacataggggaggagttggggcttgatttgaagccagaaggatgtgattcttcggacaagtcttgttctgatttagtaaacacttttggtgagaatgctgcttattcgactaagcccctttttgaagggacatgggattgatggccaaatgaggatcaataggaactaatgctaatggaaatgctagtgtataggtatagaagaaggatagtgttgtgtttttgttgtttttcaggtttttgtaaattatacttgtatgtttggttttgatgaaactagaaaatgttaagattgtatgaatttttttttgttggttaggattctatagatatgattgcttttcttatgtagattagttactatgttactgtttttgtttacaaatataggtgaagtggtttgatgatgaagtaatttgtagaaagattagtataagtaagctaaaacacatctgacttggcaataaaataatccatacatcaataagaaaatgaaaataaatggaaaatcaactaaatttgagctcaaccagtaacaacataatttaaacaaaacctagaaaaaataactgaatttggctggtcgaggacagcctaggaggaaggggtaagaggtgatcttggccccaccactatgcggcagccgatgacaactcaaaaggccaccccggtgccgcttcgaccattaaagactcaaatctagtgccgcttcgaccattaaagactcaaatctagtgccgcttcgaccattaaagactcaaatctagattttgtggggactttggttgtgccacttcgaccatagaagactcgaatctaaatcttgtggggactttgactaaactttgcgagaagttagagctctcaagtgacgcgattgctcctggttgatcatttgggagttttgactgaggtgactcaatccttggcaaaggaggttgatgggttagagattgaaaatgtacttgatgctagtgatgttgagggatttttaggggacttcggagaaggttggtcttaattcaaaggaggtttgtgtgggaaaattacaattaagagtgcataattaaatgaactaaattttaaacaatcaaacgattagcaatgataagatttacaaacactaaacaaaaaattgagaaaaataggatcaaacagagtatatgaaatcagcaataataaatgcagaaaataacaagatatatactggttcaagtccaatagattaatgtgatctatgactctactccagttctggaacaccaccaaatcttctttattgattgagcaagagcaagtacattaaagtcgagatcgattctctgttgagttctttcaaagtgtttcaactttcacactcttacccaaaaatcttcttcatctacagaaaattattcatacaaaacccaaattcaatctctctcttttctcagtacctctcaatctctatctctctctaactctcattctcaatttgaactgtatgcttttcgtcatcttcaaatgcgtaagtgttggtgatatttataggtttaagattaagatcatggccgagacctggaagaggctttttcaatgataaggaagtatgggatgaagccaaatcccaaaaaatgtacttttggggtctcttccaggaagttcttgggatacattgtcagttctcgggggatagaggtcaatccagagaaaattaaggccttcatcgatatgccctctctcaagaagcataaagatgtctagagtgttacggggcgtattgctgcccttagccggttcatttcaaagcctactgacaaatgtattccattttttaatgtgttgcggggtaacaaaaagtttgaatggattgaggagtgtgaggatgctttccagaagttgaaagagcatctcactaaggctcttattttatcgaaatttgtagaaggagaagatttgctcc

SEQ ID NO: 184434 - DNA, 8918 bp, Cannabis indica
cagaccttccaagcatagcacgacaacttcgagttgtttgacaggcttcaactgttgcaaactgaaatattgttcaacacactatgttcagtcgtctggctcgagaactaaggaaactggtaattcaatttttcttgctttgaactcatggcatcgcgctccatctcctttgtgtttaccttgttgttgttgccactgctactgcccagaatagagctatatgaagccgacgctccttagattctttgtggcttggactcttgggaccattggttaattttgtagcaactcttgcctgatctcatcaaagctcatttcacataggtcatttcatcttggttttgattatgagaagcttcttcctcaatcgtctccattagtttggcactcctagtattcagccaccacctaagatcaaactatactaaaaaagcaccacaagcaattgaacaataactagaaaacaatagcaacacaccagctaaaaactaaaaaccataacagccatggttcttgattgtatttgtcaaagaggaaagcaacaacaaaagggcaagacaatggttctttcagaccttgatgaaatctgagttcttacataacttttcccactaacactagctgtcactgttttgcctttccaaccactcaataattactaaaaggccctccctcatacacacacctcactgtccttttcatgtttgttcccttattaccctttgccaagtaaacctcataggaggtctaacattaactcaaaataattggcaattgtagataaattttgttatagcaaagatattaatacaatttctttgaaaaacctcacttatttttctctcgcactctttctttctctatgttgagttctctttttctgtctctcactaaaattactctataataatgagataatcaactcgtagatatagtttgtatatggggtgactttaggctgtggaagtttgtggaatgcaagcttactttgtcacaaataatttgtagaacttcattcataaattaatttctattactttgtagaaaattctcacattcttggactattcaacacttagttgagaagcaatagttatatatggccgactcaatttcgaaaatccacaaaaggggctttatttacaacctttttctccgacttaagtcacgtttgtaattcttctttcctttctactttgccacttccgtgctgctacgtttccgctaggccaatagagaatctatgattctataccaaataaatttgtcactgttaaccaactttattaacatgtttgctaggttatctctaatatggatattctgcatatccacacatctttcctcctcacaaacaaaatgatatttggcgcgtatgagttttgtgtttgtgtgaaattttgaatttttctcaggtggaaagtgctttgattgtcacaaaacttaatgattttctcttgtttgtgccaaagctcttcgagtaacatttgcaaccaaattgcctttttggcgcacacattctgtatagttgattgcatttttaaaatccagcttacaactccagcaagagtaaacatatatcctatggtgaactgacttttatcgagatcacttacataatctgaattaacataacctctaacaataaagtttgatccttcgtaacataatgcagtatttgaggtacctttgatgtatgtcatgatcctcttcacaatattccaatgctctctaccaagattcgctttgtatcgactaaccgctcccactatgtaagcaatgtttcttcttgtacatatcatagcaaacattaaacttcccactaacctatttgcttcactgttagggctcatacttgagaataacttgaattaatagggagcagggtagatattgacttacatcttgcatgttgaagcattttctgaaagtacttcttttgagattcttcctatttctgtcttggtgatttttataccgagatagaaataataggaagatttgacctttgaagacgaactacttcaagaaaatcttgcagcgcgtcaacatgcaagattgttagccaatctctacctcgttttcttttaacttcaagctatcctcaagtatgagccttagcagtagagtaagagcgattcgccaatacatggaaaatttgggtagagaatattgaaatactgtgaggaggatctgagatatatcaagagtacctcaaatgcacattatgttgtggggaatcaaactttaatgtcagaagttatgttgattcagattgtgttggtgatttcataagtaagcccgtcttagaatgtgtttttgtctggaagagttcgactacaaacaagtgacattgagagcactttgcacatggcaaataatttggcatttcatttcaacaaagcacatacacatcaaatattattttgttcatgagaaggtggaggattatatgttgaattgcaaaataatctacactagagacaactttgcagctatgttaataaagccgattaacaatggctaatttatttgtgtcgattatccattggtctagcggaaacataagcggcatggaagtgacaaagtagaaataaaacaagaattacaaaagtgttaagtgagagagatatttaaataaaatcacttttgtgaactttcaaaattaagtcaaaccatatatgactattgcttctcaatcaaatattgaatagttgaaggaagtgagagttttctacaaagctgttgaagataattaatgaatgatgaagtgttacaaattgtaacaaagctgtaatattacaacatgcattacataagcttccaccgcctaatgtcaccgccatatacaagctacatatgatcttggtcatttgtcatttgaatttgatcatattattccaattttgtagagtaatttgagtgagagaaatagagctcaatatagaggttgaaaggtgtttctgagaaaagaatgaggtttctcctaaacatttgtttgtagtcttttatttattagagtacgaggattattatcatatgttatccttgttatgcaattatcaatttttttggctcaactttatttgaggttctcatattcatacatcaacttcagttgtaattgagtgcctaagttcctcaacatttctaacataaactataataatgctactgtgcaggaccatcaaagactctgcgtgaacgtttttcaattcactgcttcaactttgccgggtgtaatggacaccattgccgtcttctgtttgaaatgtaaggcatactgtcatgagggtcggtgttgcccctaaaatcttgcaccttaggtgccatgtatttagacaaagcctccacattgatgatatttctggtgtacacgataatgtgcttgcagtgttcaccagatctttgtgatccgatcggttttaacattcatcatgctctccattgtgactattttctccatcgtggtcctattcgttcagctggtgacgattactgttcgagtagattctgccccacttgatcttccagccttattcccttgtgcagtgatccaggttcagtgccttcgatatgtcctgcaggggtaactggaggaacgactgcctccttataggttctcgaattgattttagtgtattagtttctttttatttgacaaagtgatttgatgtggtaagataaaaaattcacaccacacatcattatgatcatagaagcacatgattatatctaaagctaggatcacacattcacattgtgcttaatctctttctctctcattcctcactggtttttgttttctcactgaagaaagaaaaaccattttctcaaataccagtcctatgatttcttcataattttcggatagatcagtaacttcaactgggtatgtaagtttcataggttcattcatttttgttgtttctttttttctcgatcagttggtgatgtactatagtgtgacatagttctagatataatcacgtgcttccatgatcataatgatgtgtagtgtgaatttatatccctcataatgatcattaaaagaaacgaatacaattaaataataattggagttacctcatccctctctgcttgtccgaagacttgattaactcaacaattttttccccttagaactgtctggggatcccttgttaatgccctccgagttgctggacttgcgagttcagcatatcgataattcatatttgtctattgcggtgttttccatcgcagaataatgatcactcccgaaagggtttttaatcttcttatgtaaaagtctctgccttattgtggggaccaaattgttggggataaatcaactattagatttgaggtttgagtggttttctggttgggaatgactgcttgatttgaagcttctattcttatttccaccaaaagcagtgaaactaggaaactgctttgcaatccagagtggggtttctctcatcttttaggcactttttgccagcctaaggcagcaaataccccaaaccttttcatcaaatggactgaggaaagcaaagattggtttagtcctcctcatatctccagtccagtactattatgttaagcaatttaatgataccacaggtggggaaatgtaagggaaacttgatcaaaatacaagaagggaacacatttggaaaggtgatatttcaactataataagattttgatttctttatgacttaacaacaaaattatgaatattgcaatggggttacctcccatactagttgatgcattatatcttatattgatgcaatttaataccatgccaaaatcgtaccgtgtcaccttaaattcatttataacattactcaaaacattatagtaagccctcttgatatgtgtctcttcctattgatatcattctaaaataatagagaaatttattgagaatttgttagaagattttctttttgtgaataaatgatttcatttcatcatctataataggactaagttcttttatgctgcttcatattattcttgctctgaattatgtatcatacataaatataattacaatttatgttcagcttgatggtgattctcccttgattttttttattactggtaatggctaaaaaccgaacccgattcgtaaaatcttgaatttaataagacgggttcggtacctattttcatgaacctaaagcccttaattagctgataaattcacttgatgtgcagccctgttgatgtacccttaaacaattcaaatataaagtgaacttaacctctatagagtaagttacagtcaataatttttatttttaattttattatatataataatttatgactacatacatcaattaaactaatatattataacaaaaacaatgtttgtgtaaaataaaatttatatttagatgctaaaagccaaataaaaaccccatgtgggatgagtcacatcttctgctctgcttatcttattatcatttatatttatatatatatatatttatatatatgtaccaaaaaagagctagtacgtatacacatacgcatacattatatatatacttatatttacttcaacttgataagttctccttctgatcaggtctgcagctatatatggcatcgtgcaccgtacgttctcaagtttttcaacagacagagagaaagagacacagcttttatataatactatatagtacactcacacacacatatataaatatattgtttatatatattattatttaatgatatgtggcagacttatgagattcttataggtttgactttgaagaagatgccagctttgattgccaaagataacgccatcaaagacggtggtggctaaagaaagaccaccgtacgtatgaagaagaatatctttacacttttccttatatatactcattgatcatatacagtctctcttcaaaaccactcttcattttctccctttcttagtctttaactcaagtttactataagttttaaaaccccattccaaacttattggctactaaagaaaaatggagaaaagggttattgattatatgttagttccattaggactctttgctttggtggcttaccatgtttggcttctctaccgagttataaactaccccaccaagaccatcatcggtatcaatgctattcaccgccgttcttgggctcgtgctatgttggaggttagttaaaattaaacgtcgtcattctgtgtttaatatttggatgcatatgtatatagttgaatctaaatgacattttgttttgtttgcagaatttgcacaataatggtgttcttgctgttcagagtttgagaaacaacataatgtcgtcgacccttatggcctcgatggcaattatgttgagttctctaatcgctgtgttgatgaccagcggtgggaaaaacaaaattgagttgtttatttttggagacaaaagtgaagcaagcttatctatcaaatacttttccataatggcttccttattagtggccttcttgttcaacttgcaatccataaggtattaatttcatatatattatatatcgaaagtattcatatagatctagtatcgcaaaaagacatcagtggtgtccagtaccaacacaactcaatccttaattattcattgtttgtgtttttttttgcagttactatagttatgcaagtgttctagtgaatgtgccatacaagaagatatcacaagacgatgaacacgagaagctcatagttgattttgtaggaaggagtgtgaacaccggaagctatttcttttcgctagggttacgagctttctacatctcgttcgctctattcttatggatattcggtcctcttcccatgtttgtttatagctttgttttggttttcatgctctatttcttggatgttaactttcattgtggtgccattgttgatatttctgatgaagacattagtattagaagaccaataaaagatgaagagcttggcattattataggaagaccaatttagatgtttttttttggttggtcaaactagctatagctacaactacttgttgttggaaaataacatttttgtaatctcaatctctattgtgattattgatcttattcactacacaaaaaaagtaatgtatatagcggatcttgttctgttttgttctcttttattctttatgaaattacattccactaagatacaaaaattaagttattgttccattgttgttgatcaattcttgactcacgttatttaagttacaagttggtagttatgaaaagaaaataattaaacgaaaggccaaaatcatgctaacttgtatagctataatattattaggtggcgtttggttgggaggaatgaaaatataagaattggaatgggaatgagaataggaatggaatggaataaaatttgaattacataaaaaaattgataaaaaaaattattaaattttttttcttgttaccttgaaatagtctttctttctttttaaaaatgaaatagtcattccaccaaaatagtagaaagagcattccattagaatgtcatttcaatactttaaaatgcaaccaaacgaagaaataaataaaaattatttcattttcatattccatttcattacatcaaaccaaacgccaccttagagtttttggctgctaaacccttataattgtcatttcacttgtatttaacttttcaagtttaaattttagagataaaaccttctatattgaactggtagcaaatttaaagtatcatcgattttttattgtcactatggactatttatgtatacactcttgtatacatgatatgttcatattggtacacttaatattattatttaaaaattattcagttcagtagtttagaaaattttatcatcaaaattgagcttaaagaattaagtagaagtggaatgataattaaaagtgtttagccgaaaaaaaactcatattattataatccatgtcatgatatactcatccctcatttcatctcataatgttacattttcaattttatttgtttaatgttttacttcatgtatagttgtatattttttaacatttttagctgactacattaattaaaatgatataaatacatactatattatataaatataacatgaatggaaattaaatttggatgtacatagtcttaattagcacatgcacaaccccaaaaaccatttgggattggaatctaagcttgcttagccacacatgctctgtctacttataacaaactcatatcacaaaagcatacatgttcattcaaaccacctgaatatatgtcactacaatatattatatatatgtgattaaatattgtttgtaagttgatttatgttgaaatctattttctttggaatgaagttgttcatgttactagtctctagttttatgttaaagaagaaacgaaatcttctaaccgataattaagctaaagaaagaactttaattttaattagcattaacatatgattctttatcttagtttcatgaaacttctaataattcgatcaaaaagaaagaacaatgacttttcttttctaacagtttcgggaatagaaactgaacttccttcgaaaacaaatttcatttttcgatttctagaattaaaacaaattacaattctcaattctatacgaactctagggactacaatcaaccttaattattgtactccattaatatattaaaaaaaaaaagaaactagcattcaaagtggttgttttttttccttacaattataaataaagccttgttctttgaaagatctatctcgtgtctggtacttcatggtttcactttgcaagaatttcgaatcattctgtttaagtccattttcttcatcataaatgatctgcttgccccgaaatgacctggctcaatagtgaaatcctaattcgttggagctttctatttg

SEQ ID NO: 184435 - DNA, 6914 bp, Cannabis indica
tttaatgcctgttgcgtgtctttgtttgggatacattcaaataataacacttgtggtttggctgggatgggttagggggatttaaacatttttttgatgatctctgtggtttacataatcaatgactcagttggatatttaagtattctttttctgttgccaaagcttggattttatcaatgtgatgtttatgatttctgtttatgctttttctttcaaaatatattctgcctcctcttctattctaagttctaactaagtgttcttactatatcattcttcattaggcaactccagatatggctgtcactcttcttgaaattgcaaggatctttgctaccaaagttccagggaagatcgatgctgatgtgttacaactactatggaaagtgggttttgttctgttctcatttcaaactgtttcccattctgactttgatattaattctatgttaaagttctttttaatgtcgtaattatgatatcattgcttatagtttaatcattgtctccttgtgaaaaacactgtcatgtattattttcttgcttgctgatgggttatatagcagttacagggtaatttcttacaaattaattgctgtatcttcgcttctatctgaaaagtattgttttctgtattatcttcttgcttactgaggctatctattttaaattttctttatcaattggattgtaatcttaccttcatgttgttccttttgtaccttaaatacttccagtttaatactgaggaatttttatcccacaaactaatgtcgttttattatttgttaatatagatattagaaatttctattcatagtattttcgaaatgtcctttttcagacatgcctagttggagctggtcctgatgggaaacatactgctttagaggcagttaccatagttcttgatctacctccaccacaacctggatcaatgatggggttgacatcagtagatagagtatcagcatcagatccgaagtcagctttggcactgcagagattagttcaagcagcagtaaggggattaatgtctttttctattttaggtattgatcaccatttagatttttgtttcttgctgagcgtatagattggcaggtatggtttcttggagaaaatgcaaattatgctgcttctgaatatgcctgggaatccgcaacacctcctgggactgcattgatgatgttagatgctgataaaatggttgctgctgccagctctcgaaacccaactctagctggtgcgttgactcgacttcaaaggtgtgcattcagtggcagctgggaggtataagctttttcctgtgtggtcagtttttatctatgtgcataccatctgtatcttgggtgatgataggttgaattcaatgtaaaaccaaaatttccatccttttatgggattacctacctagtttaagtgttgtaatcatttaccccttatgatttaaataaattggtgttcgagaatcgaactgctttgagtaatctgttttgatttgcctttcttatatgttcttgggttacatgattctccaggttcgaattgtagctgctcaagctcttacaaccatggcaattaggtccggtgagccttataggctacagatctatgaattcttgcacactttagctcagggtggtgttcagtctcaactatcagagatgcatctcagtaatggggaagatcaaggggccagtggtactggccttggagttttgattagtcccatgataaaggttcttgatgaaatgtatagagcgcaagatgaattaatcaagtaagctcttgattattttgcttctttattattgatgtgtcatacataagaaatgataactatttatttaacacacaataactgttgtattaaagtaagtaaaagaattattaaccaatggagaccagctcaagaaaaagtttgcttctttatttgataaaaatatatgactatctagcttctttaattgtactacatcttatactgacaaaagtttcctttgtgatactcagagatattcgttaccatgacaatgcacaaaaagaatgggcagatgaagaactgaaaaaactctatgaaacccatgaaaggttgcttgatctggtttcactgttttgttatgttccaagagcaaagtatctaccactggggccaataaggtagacactattttgcagatcactttgtgtttgttttgataggtgtcaagtttttatgattattttctttttgagaggaaagagcatagttaaatgatttttacatcaatattccatgtttctctccatgtaggaaatgtcagtccttgtattggtttggatatatcttatatcatttcgtagtatggctctcatttctgtacatcatcacactactatgactttttatattagaaccgagttttgtttcctgcagtttttttactgtttctctttgttttgggtgttggtggattaggagttttttggaaaatgatactttgggcctattttcctttattccttcttttgtaagtatgttttctttacctcttaagaaacaagaaatttattgatgggtccagctgtagtttgcttatactgaggaacctgctatattaagtaaacaagtgagaaatttgtactcatgcttgttgtttagaggctaaagagacacaaggcgagaagtttatactcatgcttgtagtttagagattaagaaatctcaaaatagctttagatagtttaacctgagaacggtatattgaaattagaaacctaaggactgacttttggactagttaattctagtctatttcaaaactctttagcaagtaagaattcttaataaactagactgagatcttacgtcatggaggtccttatataaaaactatctccatctgctatagtagttagtccttggtaatgttcatcgactgaaagtttaacaagccgattcctccacatgcatatccattgttgactgatatatgttgtaagttgtgttaatatattggccatgcattgttctttgacattgctgaatgtttctctttctccagtggaaaactgattgataaatatcgctcaaagcacaatatcagtgcatcaactggtttgagtgatccagctgttgctactggaatctccgatcttatttatgactccaaaccggcacctgatgactctgatgcactcgatgacgacctagtgaatgcctgggcagcaaatcttggtgatgatggcttgtttggaaagaatgcgccagctgtgaacagggtaaaatgatcagtagtaaatacttgttgtatttgttactaagatgttttttaatattagtaaataatcagtggaatctacacttattttgtgttgacttattttcaacttggtttttttcctaggttaatgaatttctggctggtgctggaactgatgctcctgatgttgacgatgaacatatcatctccagaccttcagtcagttatgatgatatgtgggcaaagacacttttagagactacagaaatagaagtacgtatttttcaagctatcatgtattgttagcttagcactaaagaaaactaagtttagtatactatatatatatatattaatatacatatgtatatatataaaaccttctggctgttcactatttatattcttttgaactgcaggaagatgcaagatcatctggatcatcatctccagattcaacaggatcagttgaaacttccatatcatcgcactttggtggaatgagctacccttcattgttcagttcacgaccggtacagtcaaattaaaattgatttgagatcactttattttgtaatttaagagtaaccacgattctattttaattaagcggtacttgataggtttaataaggtttaaggggctctatttatcagataagatcacaaaacaatctggcattcttgttcctaagttgatcttgaagtgtgttgttatattaaagtaatttggttcccatttttgtattcattttactaattaataatcttcaacaggagaggtcaggaggaagtagatttagcactccagccacaagtggtccctcattgtatgagggtgttagttccccggtggggctcattgccacttatctttcatgtgtagcttttgaccgagttaaattctaatgctttgatcctttccagattcgagaagaacctccaccatactcatcacctgttaggcaaaggtttgagtcctttgacagtcctctgggtggtcaaggatcccagagttttgaatctcaagatgaggaacgggtttcttccagtaatccgcaacatggaacagcactttacgacttcactgccggtggcgatgatgaggtaaagatgagaaattatgtcgtttgatgtgagatgtggcattccaacaagttcagctagttatgtacaggagatgacgcttgaatcttggatgcgcttatcattatttttatgagcttgatttcgctctatcctttccttttacttactatgatcatccatttttttcaaatgcggaagatgaagataattaatgattaattatgtcaatgcagcttaacttgacagcgggcgaggaggttgacatacagtacgaagtggatggatggttctatgtaagtgttttgtagacaagggaggaacttacttcattaaatgattttggctaatgcctctcggtttgcacaatatttgcaggtgaagaagaaacgccccgggagagatggaaaaatggctgggcttgtcccagttctctacgttaatcagtcttgagttgagcagttcggcataggaccagaaaatttggccatcccattgttttcccttgctgttttggcatggcagctgggccagagcacttcgatgtgctagtttgagtatggtattttgtttgacagcatgattttactcctgacacatacccgagccaaaggaccatccacatttttggaacagtggacgttacatgaagaatcagccaatgtgtgtattactttttgttcataattctttcttaacaaccaggttatttcatatcatttttttgagcgattgattgtgattatgatgtaataacttgtagccttaaagaatttgtgtgaatgccatatttttctttcgatactaatttgtctactcttgatcaaccttatcttcgttttgtcattacactgtagatccagcgagtgtttacctagcaatattagaatatataaagacctcaattaggataataattcaattcatacggataaatcttaaaattttgtttggagccttgagccttaagcgggtgaacatcatatttgaggaaggggctttgtgcaataatgtgttcatagtaacggaaagaaaattatttgatttcaaattgaagagaaaaaaaaaaacaaatacttcattgctaatctggggataatgaattcaatcccatggacttgggatggggctcccaacattcttgagagctttccagatgacgctgttgcacttgataccagagccaaaggcaatttgccaaatgcgatctccacttttgatctttgaagttgactccaagtaagccagttcataccagacactgctacttgaagtattgccaaaccgctcaagcgttttccgggacgcctccatgtgttcgtctcccaatcctagtctcctctgcatttcatccagcactttcttgctggttgcaactatgcagatgtgctcaaacactgtcttagacttcatttggttgctgaaaaaatcgttgtgttgagacactgggagaagcagagcctcaacggcgtctttgctcacacacacaccttgcctcccttcctcatcttcctctacacgaatgcttttgaagcttttgtctagcatgccgtggtgagttcgcagcagctgatgcagctcgtacttggcccgccatctgtgttgtcgagagctggagagcaacatagcagcagctcccattcggtagaagcagttgggaaagagcttgtcaagatggtcacccttataccaagtatagctcacagcttcggtgctcacaaccagtgcatatgaccccggataggccttcataaggtctttagccatgtcaatggctatgatcccggcagagcaacccatgcctccgatattgaagctctgcacgttgttcctaagtttgaaatggtttataaccattgaagagagcgatggtgttgtgttcaatactccacagttgaccaccaagattccaatgtccttaggccggatttttgtcttggcaaacagctcatttatggccccaaacatcaccattgcagcctcttctctgccatcgttcaatgttatcttgtggtctggcttgaaaactattctaggcatgtagctttcatcgcctatcccgcatttcttgagaactcgccgttgatagcctatggaagcttcactgaagtagcctgattttcttgctaactcgatgaattccacctttgatatcttcagttttggaaaaagaccattatgtataatcagttagtagtacattctcatattagagttaccaaacggacatgggtgttctgttaatgaagtcttacctttagatcatctggcggacgataacaagcaaagtccaataaatatgtagagcgaggaaccaagtagtacaagtagacacatagaatcaatacaaacaagccaactaaaaagaaagcatccataagatcacatttggtagacaaatcttggcgtatgtgcttccatatttcagctccaaagatcaataacacaattggtgcaatcatcaagatataaaaccatcggcaaatgaggtaaccaaaaccaagtttcacatatctgaggctgattgaagtgagaaaatcaggcaaggttggcctaaccttgatggagaaataaacagatc

SEQ ID NO: 184436 - DNA, 2940 bp, Cannabis indica
tatgtcagtgaatgacatctcagaattttcgcaagataccaaaacctcttacacaagatctttatttatagtccaaatgagtagctcaagaatacaagaactgtataactaactaagctaatagcaattagcagagcagctagataactttaacaaataggaaacctgaaaagtaaagaagctagctatcttataactgcatttaatcacagtctatcacagaataataacttctaattcccaatagcaatcataattgttgagtttacataagtacctcaaaaagaagaaccccaagtctgtaaatgtcagaagcacatgaacttgaagcaccagtagcctcttcaggactagtgtaccaattagtctccataagcaatacatgtttcattggaaatggttgttttttctcttctacttcagcactcctcctatctttgtttctattttcttcagcttccacaaccaatgattcacggggtgcataggttgagcttgactgcatgcaacttgtttctgagaaagcgttcgctgaagccttcattggctgaagatcttcactgcccgggtttcttttctgtgtacacaagtcatcatcaggcaaggatgtggatgaagtttttggttcaggagtggggctgttcgagccatcctcgagattatcagacccggaatcagaacaagatgcagactcaatgaaggagacgaggttgaaagaagacataacaaagcaagaaggtcgaacattattgacaacgattccttgagaatgagcaacattcacaatccccactatttgtctaaatatgtgtaagcattcaaagacatcaactgagcgttctggtttatctaaccattgcctcaagctgatatcaccccattcaatggcacgaacgtaagggtccactgctacctcatcctcacaaacaccagataaaccaccctgattttgaacgtaatcattgtgagcaaacgaaaccctgttatcatctccctctctatggctagagtcattcaatacaacaccagataaaccagttccaccaccttgtggaagcctcaaatcgaggttagaaaccctggaggcgttcaattccctagaactgctagatttcatacgagtagactcagtggatccctccattgctatccatctataagaaggttcaaacttgaatactatttatttagagaaaatatcaaagagaaaaagaaaaaacctatcagaacttcagcaaaactcttaactatcactgaatattacaaacaagattaaggtttataataacttttaactaacatgacagactataacaagagtaacagatcttgtcattaacaacaaactaaataaatcagctaatcagtcagttacatcaaaaatctagagttgcatgaaggccaaaacttactcatccaataaatgaagaaccttttggacttgtctgtgtacacactccaagctccatcatcaccaaggaatcatcgaaaactcaattcaaaacaacgaaaaagagtcaaacaaaagcctctcgtcaagaacttggcttcccacctgcaatggcataattctactttcggtgacagaagtagacagattatggaatttcagctcggttaccaaagcaagtaatccaccagaacaaacccaagaaaaaaaatatatctggtgtcaatttctcaaaaaccaagctaaatctccaaaaccccactaagaattcacattcagtttttcaaaacaataaacgattcccgaccacgtacagcccaaaaacaggatcatcaacaccaacaattacccacaagataaactcttcctaaaacttagaacagaacatttttatggtagagatagaatgaaaatgggtagcagtagaaccataagagggtcttcctatccctgctagaccaaggtgaagacacaaccacacacacaaaaggaaaaatacccttttcaaaccaaacactgtgtacccctcaggaggatccgtagcctcatatattccctactatatttttcaggaaaaaaaataaaaaataaataaatatcttgcccacaaaaaaacacaagcttttttgtttgattaatcagaataaagcaatctactttaataatataacaaacagtagtctttaaataaaatcaaggctcgtttcaaaaataataaaagaataaaaaactcccagcacccgaactgttcgtagttagtaatgtatattcagagccagagaaagaaaaagccactcttttttagtttgtttatcttcttgctttattccaactcaccgacgtggcaagatcttgtcctccgatacattaaaaatgtgtaatatttaatactttgtttgtggtccacagctttaaatttccaaaaatatttgtgtatgtttttcttttatctttttatataatttttgggtttatttggtgacttattaaaaaattattttgtggggtatgcaaagaggaaccttcttttgccgaaggagaacttaaaaaaaattagatctttttgtattgttcatattatattgttgttgtctctttctggtattggatatgtaaaaatgttgaaataataaaatattattattctcctacaaaaataaattattattttcatacgaatacatgcatgggaaaaagtagaaaagaataaataaaataatgttaaagtacttttgttgtttcgaatggaatgttaagtaccttgttatggtgtaaataatggtctaataatcattaatgatgattagcgtagcaccattaaaaaaaaaccattttataatgtgtttgacttccatcattattttaatggcaatgagattgctagcatctacataagaatttagctcaattgcacttaacactaattgatgtaacataataatgtaatgagtgtaattaacatttgatctaatataatttaattataaaat

SEQ ID NO: 184437 - DNA, 1679 bp, Cannabis indica
tcgagacaacatttcctaacatattgtaatggaatcattattagcttacactttacaaacaaatccactgcaagaatacaaaaaataagaagaatcagtaaaattgctaataaactcatcaaagtgacaaagtcatcatcattactttagagccaagaagaaaaaaaaacataccatcctgtcctagctggtaaatggtatccacatatcaacataacccatcaaagaacgaggaagcatcttcttccatgaatcaagatcaggcataggaccagtaagagcaagagaactatcttcatctctattcccaaggctcaaaaccaaaacctttccaccaaaaacatcactcatagcctttaatgtttcctccatcactactttcccatctctaccagaatcctcagcctcaacacagctacctccaacattcaccattactctcccaccttttctcaaacactttctgagcattacccaagtgtttggatcttgaagctcagggattacactacctttcgaaaacaaatcaaccaaaatcccagaaaacccatctctagtactagctttcaatgcatctccaatgtagataaaaagcctatcttgatactctttctctagctttgaaaccccaaaatactctcttcccactgaaatcacagatgggtcaagctcccaaccacgaatcacaacttctggatacagtttgagaatcaaacttgctgctgatcccgccccgaacccaagaattccaatgggtcccgggggcagaattggcggcaaggtagcgaaaacatcgaaatatgtttgggttagtagcttggaacggaaagagatgctgtgaatgtttccaggggcatctaaaaggaggagccttgaaccggcaaaagggtggtcagcttttcgagaaacttccagaacccgaatgtagttgtacctggacttgaatctaacaatggttttcacgtcatcaatgggaatgtcatcgtcttgtgatttggtttgaggattggagtggtggtgttggtgggatttggctattaacaagctgaaatgaattggttttggcattgttttgagtgggagacatggtttggggttgtttggttggtgagaaaatgagagacattgaagtggggagggagccaaagactggatttggtaggagctaaggagtgtcatagctatctgtaaaatcacaagaagatcaaattatgaaccaacaaaaacttttctgcctagaaatgaaatggaagaattctaacatatataatcttctttggttgaagcaaaaacacaaacacatcatatgcattaaaataaacacatcatgaattatatgctctatatcagattattcataaaaagagactgtaacccatttctaacaagagaaatttatatacattttctcatattatgcatgaaaaatctttcaacacaaaatattagctaattaagtatatgatgtttgaagaaattgaacctgtttttgaaattggcaatttagcatcatctcccatgaaagtcaggcgttggcgttcattttcatatattaaagtgtttatttagtaccttattagagtgttgttaaactaagaaattttagaaactaatcatctcattatcacagttgtacgtactcttgtcttgtcccaaacactttctccaattcttatttt

SEQ ID NO: 184438 - DNA, 4511 bp, Cannabis indica
tactaattagcctaaaaaaaaatcaaatttccccacgcagacccgacccgtttgaaaacctattaattgctcatttgtcatcgaccattaccattcttaggacagactccattttcatttctccctcaccaacgccggcttcagccctccctagcgacaatctcccgtccaagggtgacaccaccgcctttgaacatcccctgctgctgagggtctccattcaactggcccttcactgcggatgaaccgtactcagtgccattcatcagatgcttcaacagtgagagttcagaccgaaaattccgacgtctgttgcattgattgaacctttgttttctgaatcgcccccaccttctgttctaacccaggtaactgctcctgccatttattatgctatactgaatcataggcttgattgttgttttattgtttagggatgatataagcaagtgtgctctgtaattaatttggtcaaatatttttgtgcgttaggtaaagaaaatggatgatcatgttggtgaaagtcctgtagtcctcctatagtttaccaaaattctacctttattccaagctcggctatagctacattgcaatttccttttaataatttttgaaaaatgagaatagaaaaaatcaattttgatcttctatttatatcatgcacaaaggtgcacttggccaagcgcctccatgcacttcttgtggtgtctgggaaggttaaagacatgtttgtttcagccagacttgtcaatctttactcttacgttggtgatatatcttttgcccgccgcactttcaatgatataccaaacaaggatatctatacttggaactcaatgatatctgcttatgtacgcacatctcgtttccgtgaagctttagattgtttttgtcatttatctttcacctctggtcttcaaccaaattcctacactttccctcctgtcataaaggcttgtggaagtctaattaatgggaagaagatacattgccaggttttgaagttgggttatcagtgggatgtctatgttgctgcatccttgatccatatgtactcacggtttggctttgttgcaattgctcgtaatttgttcaatgagatgccggttcgagatataggtacttggaatgcaatgatttctggattatgtcaaaatgggaatgctacagaggctttagatgttttgaatgaaatgaggttggagggggtaaatatggaccctctaactgttgcaagtcttctcactgtgtgtgcacaatcaaatgaagtattaagtggaatgtttattcatttacatgtcataaaacacggcttggaattcgacttacttgtatccaatgcgttgattaatatgtacgccaaatttggttacttggtcaatgctttaagggtatttaatcaaatgtctgttacagatttgatttcgtggaattcaattatcaatgcatgtgaacagaatgatgatctgaaaactgcacttgaacttttcaagaagatgcagcagattggctttctacctgatttgttaactctgttaagtttagcttccgttgtagctcagttagctgattgtcaaaaatgtaagtctgttcatgggttcattctgaggagaggctggtttatggaagatgttgccattggaaatgcagttgttgatatgtattcaaaattgggtgctataaattctgctcgtagtgtttttgaggggctccctattaaagatgtgatttcgtggaatactttgatcacgggttatgctcaaaatggtctcgcaagtgaggcaattaaattatacaacacaatggagaaatgcgaagagttaacaccaaatcaaggaactttagtgagcatcttaccagcctattctcatctaggagatgtgcaccaagggatgaaagttcacggttgggtgatcaagaacaatcttcatatggatgtctttgtggcaacatgcctgattgacatgtatggaaaatgtgggagattagatgatgcaatgtccttgttttaccaagtccctagagggacctcagttccttggaatgccatcatttcttgccatggacttcatgggcatggggagaaagctttaaaattgttcgaagatatgctagacaaagaagtgaagccagatggcgttacttttgtatcgttgttatcagcttgtagccattcaggtttggttcatatgggtaaacattatttccacttgatgctgaaaaaatatgggatcaagccgagtcgtaagcactacggttgcatggtggatttgcttggtagagctggtcatttagaggaagcatataatcttataaagagtatgccagtagaacctgatgcttctatttggggagctcttcttggttcatgtagaatacatggaaatgttgagttgggtaaatttgcttcagatcgattgtttgaagttgattcggagaatattggttattatgtcttgttatctaatatatacgcaaaacttggaaaatgggaaggtgtagataaagttagatcactagctagagacaagggattgaggaagactcctggctggagctccatagaaatcaacaacaaggttgatgtcttttacactggaaaccaaacacatcagaagtatgaagagatatggacagaattgaaggttatgactgctaagatgaaaagtcttggttacattcctgactacaactttgtgttgcaggatgtggaagaggatgagaaggaagaaattctatcaagtcatagtgagagattagccattgcttttggaattattagtactcctcctagaactcctattaggatcttcaaaaacttgagagtatgtggtgattgccacacagcaactaaatacatgtccaaaataactgaaagggagattattgtgagggattccaaccgtttccatcacttcaaggatggaacttgctcttgtggggattattggtgacgatgctcttcaatgtaccaatgaattcgtttgtcttttcattctttttttctaaaattaccagttatcaactagaagtattacgtggtatttaaccactcttgtattataactacatagtaggtgatgatttcctgctatcatattaatacaagctccatttattttttctaaaaaatatttgtccccaactggatgtatgcgccactagaaatagaacagtgatggtgcgtagttggagaaaatacaccaactaaactagccaatcaattcaatatgttgacaaagccagcaaaagaaacactaatgcaattgaatctttgagtctgacttgttctagtctcccccatccaccaaaatccagttgggcatgtaggttctccaattatcaggatacaagttgaaatgtatacttaactactctgtcaaactatatttcttataaagtaaatgtatgtccaggggaaggtgctagcagcatatttattgaattgaggtgaaatttttggattgttcatttactttgtgtttactatttcagtgctttgttatgaacatttaaaaactagcagttgaacattgtccgctgataaattatttcacttgtaaatgagttttgattcgggaatattatactcaagtattaacaatctttgcgtagtatcaagttactgcatattatgaagaaagatataacttttcactaaatcaatgtccatgatttttatttttaagtagtgatttatctcaaaacaattatctttcttattttgtttcagagggagaaggaagcatttaaaggattaatgattaatgcaaaagagggtgattaagaaacaatttgtgctgtgaaggtaaagccaaatcctttgcttctctttttctcttttctttttgatttggcatcctaggctttctcctttgagtgacagagagttaagaaatttgtttcataattagttgttgtcgtacataggtggtgtcaagggaatggaatccttgaaaatttatggcaccacttttttcagtcacattcaaataaagggaactgatggtttataatactccatatatttccaaaaaaaaagaaaaaaagtcacattctatattctgccttatctaattcttactattctaggtggtgttggttgaattggattgttaaagaggattaaacctgttgtttgataataatgcatgcagggtgttaggggagaaagaagtagcattttgtatcattaatctgacagcatgttctgctgccagctccttaagttgaaactgaagctcactatatcaattgctagtgcaagaacatgttccctatgcaccacatcatcgtatattgtcactccccccatcaatccatggccccagcgcctttaccctaagcgcttggtctccattattacctgccaacagaaccttgaccttgctctccagatcttccattatgctggtgactttcatcctggtttctctcacaactacgaaacctatcatgccattatccgtcgcttatctcgcgccaatgcttttccagctgttgagtccctt

SEQ ID NO: 184439 - DNA, 3095 bp, Cannabis indica
aataataataaaaaaaacaaaatccaaaacagagaataaaaagagagagtgctctgttttttggggttttctttaaattttgcaatcgaattcgaaccaatcatctataattaaaaaaaattacaatttcattttattgagtattaaattggagctttgtcttagaaagaatctaatcttgggtgagaagggtcttttgaatttagacaaaaaggaaaattcgaatcttcaatggcgaaactctacgtgaaggcggtgccacccccggatctgaaccggaatactgagtggttcacgtacccaggtgtatggaccacttatatcctcatcctcttcttcgcttggcttattgttctctccatcatcggttgctctcctggcatggcttggaccattgtcaatctcggtcactttcttgtatgtatctcccactctgcctctatatgaacgattttataggcaagcttgtggaaatatatgcgtttggttacgttgttgtttttgacgtttaactctactgtgtttatgtgttggctgggattttttggttagatattcgtgttactgtggacacataggatgttttgtttcttttttaatgaatggaatgaaactcatatgttattattattttttttttcggttctttagcttatgaacttgtaagtatggaaatttagaaagttaatttgtagtttgtagctattatacttggttttgccttgtttttcttttattggcattgttcagatggtttgatatagatgtttatattatttatgtgatggaaagattacctgaggtataatttttctcaatggaggtagaacttttgtcacagttgtttcttgggaaagaggttatatagctcattcagaatttgttttggagttaaagtcttaatatttcgaggggtttgtcaccgatacagcttatactattgtaaattctgtgtttgtgattgagcagctagttcaaagaagtaggtttttaccctcttttatttattgaaatatggaactatttgcacagcagtcaatgagaatgaagttaaaagtttaagggtcttgtaccacaattcctatagaaggttcggtcaagagagagcattccaaatttatttcataaccttcaggccttgctgcaccttctttgaaattgatatctgtttaaaaatgaggccaacagctccttttacaaatccctcatacagtatttttgtactatattcattatggcttcttgcagagcagagcctagaaggttaggagtcagttcagacattgtttgcggatagataaagcaaggatataaagtttgaaatccaatgtctgtaactgtttcttataaataattgactgattttgtgtgagatgagtctggtacagtttgtgcaatatgtgcattgtagccagattactcttgttgtcgttgtttgcagtaacatgcctttcaaccattaaatgcataatgtgaacattgtcaagaaagtgtttttgcttcaaattttcattttaaattttattaaagatggctataggctacgatcatgcacatatcaatatttgctagttcctctcttaaaggttggttaagtttcttcttttactaatttacgattttcatttgtcaggtcacatatcacttttttcactggaagaaaggaactccgtttcctgatgaccaggggatctacaatggattgacttggtgggagcagatagataatggaaagcagctaacacgcaacaggaaatttttaacagttgttcccgtggtgttgtaagttttcgacgacaagttctgatgtttttagtgcttcttgcttagaaatttgttttgtttgcattgtgcatttatgtttctgctattgttatgctgtttaattatttgaatgatgccaagttattggatatggtttcaatttctcagatattgattaatcaaaaaatttagttaatttttccagcataattaactagcatgttaaactttgatgagtagagcgttcgtttatgtatgtacacatcaaatcacatttattagaaatactaggcaacgcttttgctagaattcccactaataaaaagcagaacttaatatttctagttttgtttttaaggcttaaaccaagcctaacctgtttacaatttaagttgaacttttttgtaaaacttatttttctggtccaggcatgtaagttggtatgtttcttcttttttatgttatacggtgctccaatcctttttttcttctttttttgttccctttatccttagtacatccgaacatcattattctatagcacgcatgattacaattacaaacatatactttttgtgcaaccactcaattgtttaggtttccatcaatttaatcatgtggtcaacatctaatagttgtggtccttgtggaagccagtaatggactagaatatgccatggtcatgtctttcagctttgttgaaactttctactgttagacagacatcttagatatcataaatcatccctacagaatatgcttttttgaaaacattttttttcaaatcatcaaagagaacatgattatgctttttaatagaattcatctcaggttgtcttgtacatatttacatgttggtatctatttctcatatgaaaatagacttgcagctcaaaccacttcgatttttcctctgtttttctatttatgttaggtacctgattgcttcacacacaactgactatcaacatccaatgctcttcctcaacacgattgcggtggttatactagtcatagcaaagttccctaatatgcacaaggtccggatctttggaatcaatgcagataagtgagtttagctttgcataaaggcacactcctgtttgatttggttccatctttctttgattttggtagaaagttacaactttgtatagaagtttgaacatgaaggacatccacaaatatgtgctcttccttcttttcaagatatctccctagtgggtgaaagaataattgtatcgagttatcttttgtatagtagagaaattgtatgtgtttcttgagtatcaatgttattagacaacctgagatgaattctattaaaaagc

SEQ ID NO: 184440 - DNA, 1776 bp, Cannabis indica
atatccttcatggtcgacatttgtcaaaacaattcatgctccacatggtcacaaaaagaaacattttgcagcagctcaagaatcagcgagaaaagatatagaaagagcttttggagtgctttaagctcgatttgctattgtacgcggacctgcgcgatattatgatcaacaaatgctaaaagagattatgacggcatgcataattttgcataatatgatcgtagaagacgagcgtcatacttatcttcgagtggaagatttcgtttatgaacaaagtgatgaaataacccaagagcctgtgtcacatgagcatacgaatgaatttttaaattttgttcaacgccaccataatattcgagatcgaggacttcattttcaactccagtcggatcttatcgaacatttgtgggaaatatatagtcaatcttaagcacttgaattttatattttattgtatacctttatgctatggttatatttttattttgaaaatatataatcttaatgtactctttgacaattttgaaatttctttattaaattaatttatattttagtttagcttatgaattttgataattaaagttataatataattacatggtattgtacatgggtagatagtgtaaatattgaaagatgtaatggtattattgatggttaaagaaaatattttaaattgaataaaaatgtattaaaaaattaatatttaaatgagttagagtaaaaataaagaagctgttgtatgatgtaaggtaaaaatttgaggtaaaatagaaaaagtggagttttggtgatgtattttaaagaatggaataaagaagctgttgggagtgctctaaggtagggaaaatgtaagaaaaaataaatatatttgtttttttaaatttgaaatcaatatttacattgttttattgggattattactttcttgttcttattataagcttttctaccaacaatttgtaacagttgttgtggttggttggttgcttgctgctcggttgggctccaaaatttggcagcatagagtttctcccttcttaccttatcttcttctccaacaaacttggtcgcctcctttctctctttcattcccttctcctaactagtttctcttcacaagtttctcatactccacaagtaaagtttcagtttagcttatttcgtcggccatcttcgattttccatcttctctcataggtaaaattgtctatcttcttgcctgctatgttttttactggtttagggttttgattggttttatatgtatgttttgtaatcggagctcaagtaccggtttccgccatggatttttgttttgcatgtttgggttcatatggatataagtaattggtattttagattgatggtttttgggttttttttttccctccagttgattttattgaacactcatttctgtaaggggaaaattgattctattttgctgatgagtatttataatgtattgtttatctatatatatacgtacatgtattcttttatattttcatgtgtgcggcaacgacataaacgattcatatcatattctagggtttggaaagaaagactttgtttgctaggtacttacacggcttattagttcctggacgaattggctggtttgcctggacattgggaattgaatacagttaattaacactcatgcaatgtatggcgtagatgactttatgtaaatttcggctgtttttctctttaattaatgttggttgtggaaaatggaaatttcttactagaccacaaatgttttgt

SEQ ID NO: 184441 - DNA, 2072 bp, Cannabis indica
agagagagagagagctacagcccaccttgttcaagctagaaacatcacccataaacttgaactgccctgtatgcacttgtttctggattttcaatccttcagggctgtaactgtcataggagttgtcccttggatagcagttctgctgctgtctaaaagtttcagcagcactgtaagagttctgcataacattagagatattacccatctgataatgtttcactcctatgttttcattctcctcattgttcatagatattttaacttgtttcatgtaatcaatctgattaccatctgcaacttgttgactggtttcctgttgaggcttggctatgcgtgatgctgaaacagcagaagagttgaacagatgtgagctttctttgctcagcagagcattatcagattgtagttgtgtaaaccctccagttgatctaaaaactgaagttagctcactatcagtgccagccttccatggaaatccatccgaatcgcttttattgtacatggcttcattagtatgacctgtccaacaattatccacagtgtattactacaataaatatctgaattaaaagcaattccaatagatgatctggacataattacttaccttcaggtttggtagttggacttctatcagtcttgtatgatggtatactttgctgatgtgcattattttctgaaaccttattaatctggccagcccatgggtgcagaaatcgctgaacctgctcatttccttccttaggtaatgtgggttgaggattataatccaaccacaaccttgtgtctttgggagagttccgaatagattcatgtgagtcctcctgacaaagatcttccctctgattggtcatgaatttagtgcctgtgggatgaaatccagggaagctagtactaacactagagtcattgagcataatcggggatttagaactcagtgatgattcattctgcagattgttatcagtccaatctctctgttgcttatcattgtccaagatgttcgatgtccggttatcagtagagagttctgcattttcaatcgtcaatccactccactcttcctgcaacccagtatcgctacttgaagcttctacaacagcagattgcatgagagcactccaactgccactttgaattgaaggacatgcatttaaagtttctatttgttccaaagtgccaaagcctccagcatccatgtcactgtgcccactaaatgaatcgttccagacattatcatctgtgtcataaagtatcttctcttccattggatctagggaaaccaaatcatttgaagagtcatgctgcattgttttttgctgtaagggtgcaggccagccaactaggtcttgctttctggtaaggtcatgcagtgatgcatttgcttgtaaggatctttccagcagggaatttccaaaagtagcagtagtattactatgtaaatcctgtaaaaaaggggcttgcccaaacatatttttcccatgaagtccacttttggatataacctggtctggtgaaatagtacattgaccacttataaagggtttactgcctgctgttgattgaacaacaggtttttgtgtttcgccactgaccttgtttaacaaattagaagaatcatgtgacatcccctggacattagaataatggtttgttgtacctcttgcactagctacaggagtaccatataatgaaacatcaaactgctgagaaaccacaggcattgaccgcagattctgcccttgctcttgtgaaaaaacatctctgttagacataccttgtgctgcaggagatgcaccccgctgcacccagttcatatacatttgtgaagcatcattaaccagtgctccgttaatgagtgttgaatacggaactccagaagcctgctttgggagtgaagagtgctgatgtagagagttcagttgccttgcatcaccaaattgttgtagttgttgctgcctctgaagttcttgaagttttttcaacattatctgttgctgtaacaactgtgcatcattatacccagactgctgcactggggtaggttgatgaatacctggttgctggcc

SEQ ID NO: 184442 - DNA, 5624 bp, Cannabis indica
atctattgtctttgttcagcaacataacatttcacacattaaaattcaaattctatgctgctactgttacataagatattagtctttatatatatatatatacacatgaatttaagtgtattgtatagcatactaataatacaatagagatggtgccaatgtcaatgtcattattagagtaaaatggggctcaaattttctggtgcagcctgcctcacttgagccatcatttattattgcagagtgaaatcattgcagtctttagagtgagaaggctcaattatcatatggtatcagccttgttcttgtctctcctatttgactttcaacttcttcattttaaaaagaaaaagaaaacttctattcaattttttattttatttctttaataaaggaaaaagtagtaaagctttattgttatattaaaccttttttttttgtgaaatgagcgtggattgttatattaaagtaaactcaatatgtatgggataataataacatcagttttttttttttttaatctgaaataagtataacatcagttactatcaaataaatgggcaattctttctttttttcctaaaaacatattcagcaaaaaaaaaaatgtggctcttatttactttattattgcattatgtatgaatgatgaacctcatctcattggagaggaaaagaaaaatatcaagaagaccaattccaataagggcgaagttaaggtagccactcaaatccttgtatttgtgagaaacaaagagattaaatggtggggtcctccaaaatgtgtcattttcctaagccatcatccactttttacacataaagaaaataaatgaaatcactatcttcacttccactcctcgcttgtccatcactagttaattggtgtatatggagtgtgcatagtatagaccatctaaaacctctttgagtctttgtctaatctcttctattcaccccattgctttctgtctttgaactcatgcacatgtgcaacccacatgtgggcttttatttaactcaataatggtgttccccacaaacccttatcgtaaaaagattatattatatacatttatattcatatccaattgggatcaaggccataatcactttcaagcatgattaatttatttatgggcaaatgaagtatcatataatgcagaactgttattaactctatgttataatctattccaatcttaagtattgcttgttatcattgtctttgagacatccacaaagataaaacatatacgggtaagaggtgggaaaagggataatagacatatactataccaaataaagatgaattaacaaaacaaaagcccaaaaaatcacaaggtgtatgtggatatactcctttttctagtggtaatttttttttttacccttcttcttttcatcttacttggcttctctttcctcatcttctttgggttttgctgaagaagttgagcctgctgaggccataccaataacctggctgtgtgtgaacctttgtaactggatcattcttgcataacacccatcagggtaattttttaacaaatgggagtgggatccttgctccgctactttcccatcgtcgattactgcaataacattggcatttcggatagtggaaagtctgtgtgctacaacaattgtagttcttccggagcaggcacgctctaaagcctcttgaacagatctttcagactcagcatctagtgcactagttgcctcgtcaagcagcataagctctgccttcctcaataatgctcgagcgattgcgattctttgtttttgacccccggataactggactcctctttccccaacaaatgttttgtatccatcaggcaatgaagatacaaatttgtgagcattggccatagttgcagcttctatgatttcagcctcagttgctgactcatgaccataagctatgttctcatatatagttgtagcgaaaaggcatggctcctgcggcactacagctatgtgctttctgagggacttgagattgtattttctaatgtctttgccatcaatcataacccggcctgatgttgggtcgtagaaccgttgtaccaatgcaataaccgagctctttccacatccactaggaccaacaagtgcaagagttttgcctgctcgagcacgaagacttaagtcacggaagacagggatatcagggcgagaagggtaagagaagtctacatgctttaattcaacttcaccacgcagccgatcaggagctggtgtggcatctggatcatcaggttctatttcagttttacggtcaagaagttcaaatactgagcgcatagctcggccacctttgatgaagtcaggagctaaggtcaatgtttcagctgctccattggcagacaccataaggaccatgaaaactctgatagttttcgagaaatcagagatctcatgtttaacaagccacgaagcataccaaagaccaagggcataagaggcataaagtgcaaactgagctatcccaaatccacttccagcaatctgacccttccaaaagcagcgtcgtaatggagcctcgaggttggttgtgaatagaccaactatttttccctctgaattgaaggcagctacagttcttacattggctatggcctccccagctagttgggtggccttggaatgtgcagcttcaaggtctccagagaaaccagtcatgaacattttctgttgaaaagccagaaaaattattaaacaaagaatttttgataatttgattgcatatacttcatcttcacattgcctaattctttctgaaatagaaattctacatgctatgtttgagataaagacagaaaaacaaacctgtaagacagtggcagcaacaacgacagggaagacggctaccaggacaagggcaagacgccactgcagaacaaatccggctgtgcaggcaactaacatgagtgccgtgttctgtacaattactgatatcctgtctccaatggctgatctgacattgttagcatcaagagccagccttgcagctaccctaccactttcattttcctcctggtcaaaccatgccatttcatttttcagcactgctgccagcattttctccctcacacgttttgtcaagttttcgcccacaatatcccagaagaaatgttgtagtgtgttgaagagaagtgcagctgaagaaagtccaatcaacagataacaatacttaccgatttgtttaatcatgaaagcgtggtctggattgtagtagacactgagaacagcactcagaacatatgcaaagaaagcactaagtgatccacacacaatagaaccaattgaaccgactaaagcataaacccattctggagaattcatttttgcaagacgccagaaagagctagcttgctccttaaaaggaagcttttcaagccggtaatttggatatggggcatcaagggaaagactgaaatcagaagttgagaagtcagacagccggcgtgaatagggtgagcgaccatacgaggaatttcgagcaattattggtgagcttactgagttcctggcactagaaggtctgcaaatgaaaaacaagtttagtcagcatgaaatccttacagtgagtctctacgttcaaacttttagtacaatgcctttaccttgcactactctttctggcattgttgagagcagtttcatgtgctgcctcctgcattttgatgagcttcgcgtacataccattctctcctttagcaatgagttcatcatgggttccaatttcagaaacagacccctggtgcagtacagctacaaggtcagccttgcgaatggttgataggcgatgagcaatgacaagagttgtcctcccaatcataaaccgatctagggcctcttgaaccagcttctctgattcagaatctaatgcacttgttgcctcatctaacaataggattgctgggttttttagcatggcccttgctatagctatcctctgtttctgtcctccagagagctgcaaacctctttcccctacctgccatttacaagtccattgcttacatatttacctcatgtaatttaagatagctgtaattcaatcgttatagtatgcatctatacactaatacctcatcctataattattttcagaaaataataataataaacaattcaggtaatttctttcatttatttactcttccattgaattgcatggtaagtaaaataacgatattgacttaatgtggagtactattttgtttttcttcatattatttttaattttattgtcttataccaggaattatcagtggattcttccctccaatgccaatataatgtcggagtataaatataaatatatgtacccttatttatatgtccacatgcattgttgactgaggcatgttactttccacaaatgcatgcatggccaaacactccaaacattgacttctaaaaaaactaggcataaaataaggttaggtcttgtttgttgaccaaaccaactattccatcttaaatatatataaatatatttatatatataaaatataaaaaacagaaagcaattatcttctcttttttaaggataagataacagaagcagttatagccattaaaaatttgaacaacatgcttcgttcaggatccacattcaccatgacaactaaagacatgtccacttaaatgatcattttaaataaagattaactgctgtcaagaacttaaggtaattacatgtgaaaattttaattgaactgacctgagtatcaaagccatcgggaagtttgataatgaatgaatgagcatttgcaactctagcagcttcttcaatttcaactagatcagcatcaggcctacccaacagtatgttttctttaatggttgtagcaaatagagcaggttcttggctcacaagtccaatttgttgtctcagccacctgagttttagtgtctttatgtcatgcccatcaagcataacttgccctgtccaagtttaaaatatcataaaaaatttcagtctactgacaaacttcttaaccaaagaaacatataataaccaacatttataactacatgaaagtttacctgaggtagggtcatagaatctctcaataagggagaccactgtgctcttgccagagccactgcttccaactaaagcaatagtctttccggctggaacatttaggcagaagttgtttaaaatgcgaacatcgggccttgcagggtaggagaagtccacatttcttagttcaactagtcctgtaactgactctagttccaaccctgagtcgctgttgcggtcaatgcttggcttgtgatcaattacacgaaatattttagcagctgcaactttagcctttgcaaatgcacccatgctaggtgcagactgacctaaggccctgtgaggttaagaaaaaaaactttcaagtggctatctttttgaaaactatgttcgggaacagagcacaacaatatatgtaactgaacacttacagtccaccgatcatgacagcaaacatggtggctatggcgagtcctccattggtatagtgatgcctaacaagataaccaccataccatagcagaagtgcataacagcaaaacactacaaagtaagttgccccaagtcccattccctt

SEQ ID NO: 184443 - DNA, 6460 bp, Cannabis indica
tccctattaatagtgttcctttggagttgttgtctattcttacgggcgatagctcttgttaataaagaacacttttcttcaaaaaaaaaaaacttatctataaattttttatataaattttttataaaatttccaatagcttattggtggataaattatgttaaaatattttattgtgaccattattatattttcataattcatagtaaccaattgtttaaatttaatttttagtaatgtaaattttacaaaatttatttagaaaagtgctactattaattttttattataattttttacttaattttcgtgcttgaaaaatcatgttagaatttttttttaatttttttttataatggtatttgttatagttaaaatattctttttataaatttttgaataatttatactttatagtaccaaaaattaagtttaaagttttttaaatatgctcggtaaattagaattagaaattttatttttttagtactgtaaactatttagaattttttacaaatttaccaggataatattgtataatcttatgaaaaataattaaaataaatattttagtatgtaattttgaatgcaaaaattaatcaaaaaattataatataaaattatacttcttatttatttaaacttacaaaataaaaactttcttatttatttaaacttacaaaaaaaaaaaaaactttcttggaatgttaatttgaaacaaattaaaaatatactgaaacactcctttgtttactgcaattttttttttaatttgatcttattattagtattttttttttggaaaagatctcataaataaatacttattactattatttttaattttaattccataaaagctcttaatgggattctatttctcatcattagacatggtaatgaatagtgtcagtttttgagttaaactcgtttttagtaatcattcgttggaaataaaattaaagagtttcatcattaagaaatttaagatgatgaagtcattacgggtttttatgtataattaaatgacaatagtatccttctttagcgaaggagtaagaaaatgaacgggagggtattattggtaaacacagaaatatgagatcggacgggtagtgatctcgaggatgttttgatagggattgtgatagccgttggattgcataacgtaggcgtagataggcgtcacggtgtcgtcaaggaaaagattgtttgactcataataataataattaaaattaataataatgtttttttttctctatgtattattatatggtgtgacgtaggtacacagaagtaaccgtgtggacaccagatgaaccagttttaatgacggaagccttctgattattttttgtgaatgaaaggttgtgatcttttcagtcacaaatactgattagattagtttggtgggtcccattgaagtaaaagaagataaaaaaaaaacgaacttatctgattaaaacctttgtgatattgaaatatagctctgcatttgaaattgactatttaatatttatcgaaaataaataaataaatgttgagagggagggaggacctaaattagtgataacccttaattactattaatgttaatatttattgttgataaataagttatgcaatggtttaaattacaataaccatatgtttgtgattatgtaattgaagagtttggtcgtgtaatattttttaaataattgcacataatttatttatttatttatttcatgtagatatttttcttcttcttttgtaaaatacggatttgaatataaatcacgtgaaagtcacgtgaggaagaaatcaatagggaattgtccaaagctttcagtacctttggaaaactcacttcatgcaaacctaggtaatcttgtaattaataattaatattacacaataaaaaaagataagagtgtaataacttcaaataatgtgcctatataaaccattaatattatttattgttttaagataaatatggacaagaaaataggttagtgctccttgagacactttgattaaaaaggaaaaaaaaaaattgaacagagaagaagattgtcagtggtcatttgatagattattccatcattaggacaggttgaaaatctatttattaagtcaatattcctgaccccttttacaatccatgcaaaaatatataactttctcttccaaaatccaattttattaaattaacatagatacacacgcaaagcaaagactttgttcaagattttggagtttttttttgttgctttcgattataaacaaattattatttttttcaaagggggcaagtcccaagatagagatataaatttatttattactttggtaagaaacatttagtaagacaaaaaagaatgttggtctataaagaccttattttaacaaaaactgtatctatgttttagattgaagaaagtgaaaatatatatttttatgtgtatggctttcccaagggagggagatagtatatatttgtcaagttaaaagcacgccaaggttttttgtttgtgtatttttttactaagacactctttggactgagaaattttcttgtgtcatgggcattgggaactaaatatattaataggggtttggatagaatgaaagaaaagtaaaagttggtttctatagaaaatttgaacaaggaagatgacaaagaaagtgtggtattgtattatgatttatttttttttttttttggatataagggctgtttttgtgtagtgaacttcctctggatttgtgtaaaaaaccaaaatgttgtattgattttctcatctctgcaacttttcatgcattattattatgttggaactttcaaaatgcttaaattctgcaatctttgtgtgttctcttttggctcattttgtgaagcaagctttggaaattcttttcgttacttcttttcttttatttttggttttattatttagtttggtgtgtactaaatgagtactgtcatagttaatttagtcattattggttaccagtgccaaattcagctaagagtatagcacacttggtgtaattttcactttttccaatgcattaaaagaaacttgatttgggaattattttgtaaagaagccaaaccccttttattgtttcttcaacaaaagtctccaacaggaaccaatgcttagtttagaaggtagtttttttctaaaatgggtcatagttgatggagagaaatggagccataaagctatttcaatgactattttactccttttaagaaaaataaataaataaatggtagggagatgaattcctcaaattataatgtaggctaatactaatatagtgtgatgtgtgatcctgatatatcaacaaaccattcaccatactatctttccatcaatctaattaatacgctagtaaatagaaggaaccttatgttttgagattaattcatcagatagaattaatgtggtgaaaaaaacagagagaaataaatatatatcaattatattagtaaaaaaataaaatacgaaagaaattcccattggataccatagagactctagctatcaatggtcttttttttaatctcttcttgtcattcatgagttttgagtgttcataaagcttaaagacactcctcagatatttcaggattattttcaaagggaaactaaaataaaaatcaagagttgcaataatcaaataacccaagcaagtatttaccaccaacatctgtaattacttttattatatagtgaacaagattgaaacgtgtgtacaattcacaacaatgtgatattaagaaataactgtgaaaacaatacaacaagcaagctatatacaaagagagaaagcaatagtacacgttatactgataaaagaacaaatacaaagatagataactgtgtataaacataacttacagtatataataagctaggaagatattcaaaacatccaagacaggtcttgcctgaaagaaatggatcttgcagctcccaccatacccctctcagaaatttgaggacaatcttcgacagctaaaagttccagtttgtaagagccaagtagtggcttcaacccatcattggttacacctaaacatttgaataggcgcaagattcgtaatcgggaaaactggctcacaagatgcagcccttcatcagtaatctcttggcatctgacaagctctaatttttcaagatactgagccaagcaaagagcttgcataccaatatcgttgaaggaatagacttggtcaagggaaagttccttcactggacacttttgaatcagagaaacaatcccacataaggtaaatgaggaaaatgaagggaactctccatcagaaaaagatatcttgatggattcaagcattggacagttctgagccagagcttttagactttcatcacttagtcttaaagggttgttcagatatacaggaaaggagaaatcagaaggaattcgaagagatatgctgcggaggttttttgatttttgagccaagcttactatgtcacagtctcttaccccaacacacatgtccaagtgaatcttctctaagtttttgcattttcctaaaacacaagcaagccctctgcctgcgcttataatgcaattaaccaagctgagctctaacatattgtcacaaggcacacagttgcttttgccatctatcaacagctaaacggtcataaactttcatatatctgtaattagcatccacctcgaattgcaaacgtttaatttttcgccaactctggccaagtttaatcaaatctccttctccaatagccctacaattcttgattgtgagatcttcgagtgtttcaagcttgccaagatactcaagccattcaacactactgacattcaagcatcggataagatggagaatggtcaagtttttgcagccaacaacaagagataatataccacaaccggtaattctaggtgtgaaattcaatttcaaggctgaaagtttggagcaagaagacaagtaagagagaccctcatcagtgataacagtacagtagctcaaggcgaggtcactaagagaagggcagtaattagatagaatgaacagcccttggttatccaactgtttccaagtttggacatccaaccagaataggttatctccactcttgttaggttaggaaatctattacagagtgaagttaaagcttcattgggtggatctaatccacaaccaaccctaaggaattgcctctgttcattatccagattgtggaaatgcttacaagacaaagacacagagtttctatcagctgttcttttaattctattcaaaatctcccaaactaatgggtctggcagaccctccatcaatagtagaagcctctacttttgctcttattgaaaacaaattagctaatatagcatcaacctgaatttaaaatgacaatttcatgatgagaaaaggtaatttaatccaataagtttggttacgctaattattgattgatacataaacccaacactacaaagtacaaacatcagttatcaatgaacatagaaaaagaattgaaaaacttggcttgaaccatgaaatggaaattactgaattgaattgcacaaacaaagaatcgtacaaaatcaaaacttgatccagccacaataaataaataaaaaaacccaatcaatttttcaaaatttaaacatgaattatatttgtttcagataattaaaaataacacatgtattataattgaaaattaaacgaaataaaacaattacaggaagaagaaaaaaaattggtaagaaaatctataatccaagtgccgtacctgtggattggaaatgatgaatcttaggataatcaatcaatctgtgctccggttaatattttctatggtcacttcgtaaatttctttctttttttcttggaagaaactgccttcgctctttcgatttccctttcttcgtttgtcaatggaaaattttattcatttttcattatttaatacaaaattgcctagaaacgacacattttctgaaaacgacaacgtttccaaaaaaacgacatctttttctggaaaacgacaaagtttcttaaaaacgacatcatttcaggatacgaaatcattaacgagtaactaaaaaagacttcactgaacaataataattagatgatgacgtggcgctttttatgtatttcttaatggcacagtaattaaattgcctaaaaacgacacaatttccaaaaacgacataatttcgaaaaacgacatcatttcaggtttcaaaatcattaactattaattaagaacagtgactaaataataataattaaaatgatgacgtggcactttttatgtattccttaacggcacaataattaaattgcctagaaacgacacaatttcaaaaaacgacatcattttaggaaacgacatcatatttttttttatccgaagaaacgacattgttaacttgtaactgaaaacactgaccg

SEQ ID NO: 184444 - DNA, 3042 bp, Cannabis indica
caagaggtgtggttggagaggaacttacaggtgagtgactttgatgttgatgactgtgtggagtagaatccgtaggtgagtgtggagaaggagccacggggcttgaatagcaatcggatgtatcaacctcagcttgtggaacatcagtgggagttatgtgaggggtagacacaaatggtagccaatggtggtaattaatgacaggtgtgctgtgttcggcttgtgctgagggggggttggtgaagccagtagcaaaggggaattccaattcattgaacgtgacacttgctgctatgtagatgcgaccactagaatgtagacatttataacctttgtggtttggactatagcctaggaagacacacttagatgatctgaaatcaagtttgtggttgttgtagtctcttaggtaggggaaacaggcacttccgaatactttcagaaatttcaggttgggtgtcaccttaaacaatttttcaattggagattggtgtgatagagtgggtgtggacaggtggttgataagaaatgtggaggtgctgaatgcatcccaccaaaaccgtagtggcatagatgcttgagtgagtaaagtgaggcccatctcgataatatgctgatgttttctttcggattttccattttgagcatgtgtgtgaggacaagggtgttggaagtgaactcctatggaggcaaggaaaggggctaggttcctatactcgcctccccaatcggattgtagggttttgattttggtatcaaactttctctccacaaattgttgaaagttaatgaatatagacttgacatccgattttagttttaagggaaagatccatgtgaagttgctaaagtcatctatgaaatgtacatagtacctatatccttcttttgaaaggattggagagggtccccatacatccgaatggatgagttcaagtggagaatgagctttagtgtaagatttgctatagtgtttgtgcttagacttgcctatgtgacatgcattgcagaaattaggagtggatttgaaagagactttttcatttgctaacatatgtttcattacattgacatttgggtgaccaagtctcatgtgccacacattgatattggaattaaaaacattttcagcaaacaatgacagactcttgttgacagacactacatgactcggatgtttggcaatatttttgctcttggaggtattaaaagaactgttgtagcagtaggtttttggtttgacagatgtagttgctgatgtggctagttgaagttgatacaaaccattgctaagcactccccgaagaagttcctccttcgtgtttagatccttcacaacacagtaatcagcataaaattcaacaaaaacctgattatccttggttagttgcgaaatagataagagatttttagatattgcaggtacacatagcatttcatttagcagaagagaattgacagtattgtgtattttattcgaaccacgatgagtaacagaaagggggtatccattgccaacaagtaagtgagagataccttttggttcgactttgtgttgcaaatttgaagtctcagaggtgatatggttagtagcgccgctgtctatgtaccacgaactgtcatgtatgttgtctgtggatgaaaaataggcttgttggtcactttgtgagtggttggagttagtgtttggggtaagttgggactggtttggtccaggagcttggaaggatatgtcgaatcggtggtagcatttggaggcaatgtggccaggtttgttacagagttggcacacgggtcagctgttgttggttcggcccctaccacgtccacgaccacgagtggtattaaatctgccagagtgttgattatgattgtttggagaccctccgaagttgaggtttcttctcatttgagtggctaaatgagctgcagggatggatggatctccttgagttgagttcagctgttctagacgaatttcctgactttgcagcatatattggacttcttgaagagtgacttgatcttgtctagaagtcaagttaacaaccacagcctcatactcgtggccaagaccacctaaaatgtagagaatcaagtcatcatcagataatagttgtcctgcagaggataaaccatcagcaatatttttcattttcaaaatatagtcatgaattgagagatttccctttttgagggattgcagctgaaatctaagctgcagaattctggctttcgaactggtggtgtacaggcgttcaagagtggaccagagatcatgtgatgtgagacaatttatcacatgaccgaacattgtttcggcgattgagttgagaagccaactcaagattgactgatctgtgcgtctccatatggcgtagcccaagttgagttgtcgtggttcgcctggagtggctcctccgattgtgttgtcgacgtactgaggtggacagattttggtgccgagtatgtaaccttcaaggtcatgagctcgaagggctggaagggcttgcgatttccagtaagggtagttggttctgtcgagtttgatggtgaggggtgctaagctctgaaatggcgaaggagctatggctggagctggtgtaggttcgattatggaaggtgtggtattgtcgatgggagcatcgtttgggtttgaggctgtggatctctcgactgaagtgggtgattccatgtttttaggtcatacgaaagattggctctgataccaagctaaagtggagaaaaacagagaaaatgaaccttttactgctatatatttctattgcattcatctcaaatattacaaagccttacaggccatatatatacaatatgatggaagatactagaatgataaattgtaacaataagatattcttcatggggtccactgtcagagaatttgttaaaggagaatcctctccaaattctgtgtaacggtactgagggatatcctctgcctagtcagcagctggtgcattgttttcaacatgggcctcattctccaattgggctgcattcaatcctttcatttcaaca

SEQ ID NO: 184445 - DNA, 1911 bp, Cannabis indica
aacatgatctcttgggggaaggataaaaacaattttaataacagtattcagactctacaactgaacattgataaaatttactcctaatcctccatttcttcgagtgatgtcaaagtttccaaccaactccaagcctctctcgataaaattttttataaagaggaagttttttggaaacaaatgtcacatgctaattggcttcaagctggtgacaagaatacgaaatactttcacaatcgggcttctgcacgaaaaagaaacaacttcattaaggcgctcaccttggatgacaattcttctgtcaccagcctcagagatattactaacacctttgttcaattctattctgatctcttcacttccaaaggcatcgatcaggagtccattaacactgttcttaagggtgtcaccaagcatgttactagccaacagtatgattacctggcccatacttttaattttgctaaggtcaaacgggctcttttttaactcgcgggggataaagctcctggtcttaatgggctaaatcccttcttctatcaaaataattggcatactattggtaaatatatttgcaatgttgttcttcacattcttaactctgatgccaacatcgttcccatcaacgagactatccttgttcttattcctaagattaaggaggcctccagagttaaggacttctggcccattagcttctattccaccatatataaagtggtttctaacatggtggctaacagacttaaaaatgttttgaatgaactcacctctcataaccaagccgcttttctccataatcgtattattttttatctacatctatccttgttcttattactaagattaaggaggcctccagagttaaggacttctggcccattagcctctgttccaccatatacaaagtggtttctgaaatggtggctaacagacttaaaaatgttctgaatgaactcatctctcataaccaagccgcttttctccataatcgtattattttttatcacattatcattgccaatgaaattattcatgctatcactactaggaagtctggaaaggtgggctgggctgctcttaaattagatatggagaaagcctttgacaaagttgaatggggcttcattagtcaaatcatgcactagttaggttttcctcccaagctcatatctctaattcttagatgcatttcctctgtttcatttcggctctgcattaacaataatctgtctaaccctatccaaccttccaaagaaattagacgaggcgaccctctttcgcccaaccttttcctcttggtggctgaaggtctttcggctatcatcaaccacaaaacccaccataacttgttccatggcctttccatttgccattctgcttcgtccatttcccacatcctcttcgtggatgatagcttgcttttcactcaggtcaaagcttagaactgtgccaccatcaaggacattctccttctctataataaggccacgggccaaactgttaacttcactaaatcctccatactcttcttcccaaacataagtccttctaacaaatcccatttcctcacctctctcaacatgaaggtcaaaccgttcattgataaatatctaagtttttcccaatgcctttcccactctaaaaattccccttcctttttcattcttcagaaagctagcaatcttgaaccaaaagcttttctcctaagttggcaaagaagttctactcaaatcggttatccaagctattccctcttatgccatgtcctgttaccgacttcctatttctaccagtaagcactttagcagtctcatggttaatttctagtggggatctttggaaaataggcagaaagttcattggaaaagatgggatcaactgtgtaggtcaaaattctataggggtctt

SEQ ID NO: 184446 - DNA, 1182 bp, Cannabis indica
aaatagtaataaacgtgtttgtgaaattgtgcagggtaaaaagaacaagaaactattttggttgccggctattgcaccattgttatcagttatattatccactttaattgtatatgtagcaaaagctgataaaaatggagttaaaattgtaaaacatatcaaaggtggcatcaatcctagctcacttcatcaattacagcttcatagcccctttgtttgggaagtggcaaaaatcggactcattgtcgccgttgtcgcattaacagtactaataactactctttcattatttatttatatttattagaataatataataaaccttaagaaatttagaataatgttatgattattttaattaaatttattaattactgcaggaagcaattgcagtgggtcggtcttttgcaacaatgaaagggtaccaccttgatggaaacaaagagatggtggcaatgggatccatgaacataattggatcgttaacttcttgttatgtggccactggtaattattaaaatcatcattataaataataaatatttaatcggttatatatattataatacaaaatatgatgatgataatatgggggccggatggggcaggttcattttcccggactgcagtgaatttcagtgcaggttgtgaaacgctggtatcaaacatagtgatgggcattacagttctgatatctcttcaatttttgacaaagctgctgtattacacacccacagcaatactggcttccataattctgtcagcactgcctggacttatcaacctcaatgcagcctaccatatttggaagcttgataagcttgactttttagcttgtattggtgccttttttggggttctctttgcttctgttgagatcggtcttacagttgcggtaagccttttaagtaaattataaatacatatacatataaaaagacacggaacttttatttgatttgaggagtgaagttgatttagaggtaattaagattaaaaaaatggtaacgtacctaccttgagaaccggaatacattccgtaaaagtatatcatatgacaaaattatcttaagattttataaaatacacctagtgtagtggcttcagggacccattggcaaatttcttactaggtatgatgggcaaatcatgtgcgcgtttatctaattgttggacttttct

SEQ ID NO: 184447 - DNA, 2328 bp, Cannabis indica
gtccacattcttcattctccagccgaccctgtctcgaattggaccctccgaccccaattccggtatagccagatcttttcagggcagtctagggacgacccatgaccaggtttcggttacatcgttttcggtagcggtcaaggtggtggaccggggaaggtgggtggccgggttccggtggcactcaggcaacggaggttgaggattgtcgtcactggtggagctggtttcgtggggagccaccttgttgataaactcattgaccgaggtaatgatgtaattgtgatcgataatttctttaccgggaggaagcagaatgtggtgcaccattttgggaatgctcgattcgagctcattcgtcatgatgtggttgagcctatactcttggaggtggatcagatctatcatttggcttgcccagcatcaccagtccattataagtacaatcctgttaaaacgatcatatcctttgaaagccatatattgtttttctttttttggtttaaaagtatgatttcgttgatcactgatctgttttagtatatatgtttttcttgattcagtattgtttgaatttgtaatttgtgtatttttaatatttgatacccggtttacgaattgagcattttgagattgtttcattctggattatccttaactttgattattgattacaagaccaatgtgatgggtaccctaaacatgcttggtcttgcaaagaggattggggccaggtttctgctcacaagtacaagtgaggtttatggtgatccacttgagcatccacagaaagagacttattggggaaatgtaaatccaataggtaaggtgccaactaaaagattgagcatgaatgttatacataagtgtcgattgatatgacaattgattttatagagttgaaaaatgaataggtgagagaagctgctacgatgagggaaagaggactgccgagaccctggctatggattaccatcgaggtgcagatgttgaggtaacaaattttgatgttaagccttgatgagctattttaaattttgtggcaaactaaattttataatcttcttattaataacaagtggtacaagaactctcaacttcaaattgttcttctgcacagatacagtttacgtatactaattgctaagttatgacatttgcgtataataacttctaaaaaatgagatggagataaaagttggaacttttcatactgttcttcacatatggtaacataggaacctgaatccttgataaaagttcaaaagactttataattagactgcccaaattttgagttatgcttaagttgtgtttgtgtttgtttaattttggatcagaaatatatattctgatgatgtaatttaggttgacctagacagttggaggagctagcaataatacgaaatgataaaatggcttaaaactacttttacaccccaaacttacacttgtgctttcagatggttcacaatgctgccgtctttttggaagtactttagaagttcataagattagccatttaccttcacgaccttcccaatctacttgattttaagggtctctctcatgaagaagttatagttgatgtagttgaatgtaagataggattgggttacatattagataacacgagacttgttattgtgctttctgtttacaggtgcgcattgctcgcatctttaatacctatggccctcgtatgtgtttagatgatgggcgagtcgttagcaattttgttgcacaggttggttatggtgctctacttatcttttcatatgggatgctttctacattttctttttcaacattggcatattttgctgaatgtagtagctttctttgcaggctatccgcaaagaaccattgactgtttacggtgatggtaaacaaacacgaagcttccaatatgtgtctgacttggtatagtagaacatttacctcctttaatttctcaatggcagtatatatttcttttgttgaacactatcatattttataatgattctttacaatataattatgtaagatcttatatttgtcatatggctagcatgaaagcctgctccatctcatacaaaccaataaagtcagtggttgaatactttgaaacttgttctttcccatttcaaatttgctaacataaaagaagctggcaatttgaactgattaaggtgtagggagagatccttaacctttttttcccttgtgagtgacaggttgatggactggtggccttaatggaaggggaacatgtgggtcctttcaaccttggtaatcctggggagttcactatgctagagcttgcagaggtttgtctttctttcc

SEQ ID NO: 184448 - DNA, 3404 bp, Cannabis indica
ggaacaagaactttctcaatccattcctccaaactcgtccggccagtccaaacaccactcaagatcttttccgccgcgtcttcatccaattctaacgaaaacccatcaccgatcacggccgaaaatcgcttctcgatcgaggttctgatcccgccgcgcattgttctcgaatcagcagccttgaaaactatggtgtcatccactgcttcaagcaattcccttggcatcattgacgaggctgctccgccgagcaatgacgccggtcttctgaggccaccaccgccgcagtcgttatcttcgtgatcgattgttaaatcgcttgaattatgggatccatctgctttatcaacatcatcagcatcaccagctgccatttcgttaagatcaaaccccattgagtttgaataagtctctttccttggcttcctctgtctttgatcatcatcaagccaatgagctctgcgtttcggggttcttaccgaggccgaaagtctcagcttccatgcctttctagctattccagcaagcttttcttcgttaattgactccccatttgataagtacttgagattttcaggtaaccaatccgccgtgaggatgaagatcacatttccgaggctgatttcgcggccgtgagaatcaacaaggcggcctctttccaatgcccgcttaatgctgcctctaacaatcacatcagcttcgttaatgtcttccaaaacgataacagataaggggtttctcctaactgcctcagctactctgtccaatacagttttacccctaaaactcatgtcaatctccccatctcctcgcctcgaaccgaggctgatcgtcacaggattagacccagaaacgagctcagaaacagccgaagccatcttcttcttcgcgactctgtctggcccgatgaaaagcagccacatatcgcctttagaccctgcacctcggcgtttcccgttgcccaacctgcattcggttatggtagcagccacgctgaccgcagcctcgggctgccaccagattttctcggccaaactctttgatagtcttttaaacgagtctgcatctaatttacaagcaaccttgttatcttgttctgaagaaatacaaccaagaaagtcattgattctatctttatgagttaattgctggtctgttgtgacaccgttgacttttgtctgaccaagaactaaatcagtcctaacagggcttcctggtggagaaaatgttttctctaatgattggttgctgttagaaaccacaagtgaggagtttgtagtattcaattgaagagtttcacctaagcttttgttcatctgtagttgctttggttggaaaggttggcgtggcccaagcaagttctgatgattgttgtacaagcttgtcatcgaaagaggcgacaccaccaagggtgtcaccggccccaatctctccgacccgagtccttgatgattatgatgatgatgatggaaactaggatgaagattcaaacatgtgtcgttccatttcttctgtaactcttgagtcttttgcttcaagactaattcttgatcctttgtctacacacaaaacaaaaaagaacaaaaaccaaaaatgtcattaaagtttacaacttttgatcatcatcatcagcttgttcatgacataacatcttattatctcacctgtgtttgatcagatgttttagcattctgcagccattgaggaagcacaggccgcgcccccgtggcggttgtttcttccgatttgatctccgaggacgacgaagacgatttctccgattcctgggcaataagtttggacaactcttgttcataattcgaattgcattgaagacaacaatttcctcctcctcctcctcttcgagatggatccatgttttcagacaaacgccgaggtggaccaagctttgctgttgttggaaagtttttcaaaggggacaaagattccactgagctactcagaattccattggtcccaagcctgtgttttattgaacaagatcatcaattaaacatctttatatctaaatcaataatgttcataataaagatcacatttttatgtaaaacaaataccttgggaacaatccagaaacaggagctcttgaagcaattggcacagcttgtagatcccaatcattctccattgaagtatgataaacttgacaccttaaataagtctcacaagtggcagttccgatcaaccaaagccgtccggtaccaccgccaccgccgccatctccgaacatagctaaaagcttagccatctcagccacagcagcacgccctgcctcagacccagaactcggcggtggctgttccaccaaccatttcaagtcacccaaattgagaattactcctcccccattggatttcgccatccgggtctcaaccaaacccttcaaatccttaattttcccaactatttgagtcttatcacaagaaagttcatccaaatgaacaatctcaacattttgaagactcaaaccacccaacaattctctgttctcaattctcttaagaagctctttcataacagcttctggctcagaatcaccaaccaaaaccggattcctcttcttgctcctaacaagtatatccaaaaccctcttaacctcttcccctctctgtggaaccgccgcggtggcactcccctgttgttgctgcaaacgaggattcaaatacaaattcctactcggctgatgagctggccgaaatcccaatccaattggggaacaagatgaagaattattagaagctgctgctacagctgaagaagaattcaaagactgttctatggtggctttaacagctggactagagaaactagcctcacgcataactctactcacacttgggtcatccaaaatcgatatgatgagttgttcaagctcgactttaacggctaacaaaggctgttgttgttgttcagggcaaccacggcgctgatgagcctgagctcgttttagagccgccattagagcattggagattggtggttccattcctggactcatgttttgagcagttgggagtctttctagagctacgctgaaacagagctctaaagctcgacactgaagtgggtgagatgaatttgggtgtgattttatacatgcttgtcttaaatacccagaaggtgaagccaatagtgtcgccgccacatgaagcggcgtcgtttgaccatgattccgacgccggcttcagcgatcgagtgattcaaaaacgttgccgcttccggcgttagtgtctgttgaatcgtgctcagcccggctctcattgattaatatttactttactcttcttcttcttcttcttcttacacaaacccaaatcaacccacaaaaaaaaacgaaacttacctacttattatatgtgtatagatgtaagaacaaatacttc

SEQ ID NO: 184449 - DNA, 5009 bp, Cannabis indica
agattaacaccttgcagagaaagaaaaaggaatgataatgaattatcttttcagcatcgttcaaggttattcttagttactttaatgatatcaggtcaatgttaaccaaccattgcagaagcatgtcgcagaattaaaggaaaatgcttctcgagtgcctcgcaccatagcaaaattcctgactgaccagcattatattcatctttactaccttctgagatctcttgttcatacaatggagctgatgaaactttcttcatccttatgttgtcagaagtaaagggggtttccagtaatttatcttctaaaagatcctcagttcctttaaaccctgatattgcacgaagacattcatccagaacctgtaatttcacatacaaaatcagtagtctaacgaattacacggataaagtgcaagcataaaaccattagattatctctcatggttagaccaaaaaaaaaaaagatttgctgtagtactaagattgatcaaaatttgatatacatccaacactacatgttcgtccttaccacacaaacaatataataggtggcaaaatataaatcttgtcttcaggaggatatgacaaaaaagatgttttattacctcacctcaaatttgaatgtagtataacagacatattcgtataaacaataacataattcctccacgggaatacaaatccaaatgtgaaatgaaagcatacctttatagctgctataataatcttttcaccaaaaggtcccatagtactgccaacgtgtgccttccatggtcttgtgttagcttcaggtgttgcagccctcaaaaatccataaaccatagtggaaacttgttcccaacgggaaaacataatgactggataattgtgtgaaacagccctaagagtctgcaaccaaaaataatatatgcataagccttcctatagtacataaaaatttagtttgataaataaaagcttaagctgataccacccaaatcctctatttgcttctatttatctttcatgaattgaataactggatcaaataacaatggaagacatccactttctcaattaaagctaactaacagccacttggggctacctcaggtggatgtgtttgagtgtatatgggaggggggagggattcgattcccactaattaaagctaactaacaaaaacacatgccctaatactcgctcatggcctcacaacatgagatgataactacaattctaacaggagtatttattcagaattacgtaatatctacagcaaaaatggctaattccaacaatgaaaacatgaaacgtccagataggcaaacaatagtaaatccaagattgaagattccaaatattacttcaagcaatgcctagattcttgacaagcgaataatttctgacaaacataaagcatggtacttccaaacaaactaataggttacctggagagcctctaagcatactgtgtgattgtttactttttccaagtaataaaacaaagtaaaaagaacacctggcttcttttcagcctcaataaaacctgcaagaaagccaataatgaatttataatattaaatgaagaaattgacaaggatctagcaatttcaatgtcgtactgtcacagtactatactcagcaggataaggaatctgacaaaatgaaataacaacactcgaccatacatggcatgaaaataattctcaccttcattcatttctttaagaagcacttctttaacttgctttgaggacggtgagatagtgaaagctgctgtcaaacaactaaaagaagcagtctattgaaaaagcaaagtgtcactgacagatgcaatgaagttaataaaattatgaaatagttacaatcagggagggaaccataccagtagacctgtctgatcatttctgaaagggaaaccaacttcaatccttttctgtatagatgttataactgttggcaacagctccgcaggcattcttgaatatctgtagcacaaaatagcagtaagtaatgacaggttaggaagtcactttaagcaagcacatcctgaacctcacttttgagtgtttacaggtacaacatcattctaaatactattcagtggtgtctaattaaatttaaaagttgaccgtgttgtgaaatcccactttttataatagtataatgcatgtcctacatgacagtaataatagccaggtacccaggccacatgacacattttatttacagagctaaatagccaatacataatagtaaacctgtcattagagattaactgaaaaaagacatgtatttaaactaaacaatgtaaatagtaagagaatcatacggtgtggatgatatcaaaagcatgagaattttgaacaaggacaccagcaatctaccatggttttcccgtggaatcaagtaaagaatacctacaccagatatatgtggaaaacccaacttaaagaatctgaagatgatgttcattggaccaataaaaaaaactttacaaaaaggtgtatggccacgagcactttctttcaaacctgtatgcagctgcatcaagatatgccctaaggaaattgaaagtgctgtgaaagatccagattttgaaggttccttgaattctgctacctgcaaaaagactgaagaaggtccgtccaacatgactgccagagtagaggcagatgcaatccgtgcctagagagcatagattcaagagtcagcaaggatacactagaaaagaaaaatcataatagttcatgtttaggtcccaagagcagcaataccttcaaataagggtcaaatagcaagcatgtcatcaaactcgcctcaaacttcctgaaagttgaataaaataaaacgatattgtaaggaaattaaacattttgaaaatgctaaaaagaacattgatagtttggaagaataaatcttcaccttggttgcaatacatcataggttggcaagagcaatgtccattgagtagtaaaggatttagaatcagcttgacaaagatccttcccatcaaattcccaagacaaattcgtgagctttcagaggttcattccaaaccaaaaaataatagaggggttgggataagaacccaaaaaattaccttgatgcaatccaatgctgctattctaacccttagtttcagagcactgtcagcgtctttaactgatgcatcgctatcgctgaagtctgaatcatcagatgtaaagtcttgtctagaagattcatgatctgaggaactaggagaactccaagctgaaatgtcctttttacgcaagtgtggaggcctatatggagcacgatctgttcttttaggttcttccaacggtgacttgaattctgttatgctaagttccttctccttgtgaccatcaactggaattgtaaattggggtttaccattgagcccataagtaaagaacattcgcaatgcagccacaaaactcgacacctgaatacatataggttatacaaaacagacgttgactgatgctaatatagatatgcctacacgctgttgattgatgtcaagcctacaacacacttatattgtacacgggtaaaggtacacttacatggtcagaaagggaacccttaggatccataagaaccaaatgcaggcaatgcaaaagagctgcataatacctgcaaagacaagagcagtctattgattagtataaaagctctctctctctcttatatttacagtttttgctaatgcaaatttggtggtacctggacttgacactatcttccaaaagcgtggtcttagatgccaaaacatccatcattttcctaaacacctgatttgttcatgagaaactagcctaagcaacaacagactgtataattgtgcattatatatagtataggtaaacaaaaaaatattggtatgtgtacctcaatggttgatatccataaatgagcagaaaatgatgatccaagtctggagatggcttcctcaagcatggtgaaggcaaaggtctgaacttcccacaaggatgtctcagactggttgatgatcatcctcttagctgtcaactctgaatgagagactgcaattatgccaaccaagaattttaccaattgaatatcatctgaagatgacatttttctccggtatcctttcaagagacaccttacaattgaaaaaacaaaacaaattacatatatatatatatatatacacagattagatacaaaaagatgaatgaatggtaccttaacgtggcgaagcattggagaagagactcagtagcagactcaggtggagtggtgatgaaaaagtggatcaagatttggagagattgaagaaactgagtccaggacgatgagttgagctggagaggaacgcgatggcatatgtcgtggatctatgaagcaaatggcataatcatcatcaatattatcagtaaaaatatgaaatagtacgagtatcagaagaagaagagacttacaaggcgtgagaattgagggaaggcagagtgattgtgagaagtagaaagaagctccattagaaagagcaaatcggagatgagctcgtgaagaggaaggtcgggagcagcggagattagagtttgagaatgtgagaaaaggagttggtggagaagatgaggagtaggcggcggagtggttaggatttcgtcccgaagactgagaaaggccgtcctccatgctctgaccaagtcctccgccattgccaaccaccgctctgagctcagctcagcctcagtcgacttcactgtcatcacaagcacagacaatcctctttcccccattttcttcatttgggcttttcttgggccttccgcctcgatctatcattaggcccatcaaattttcataaataccacaaattgtttttacatataaaaaacgaaatttacacaaaatacttaaaatcatacttttcttatatctatgaatattttttatatatttttacggaaatttgatttttagatagaaaacaacattattttcattttcatgctacgacatggagatttcgattgagaatttaca

SEQ ID NO: 184450 - DNA, 2717 bp, Cannabis indica
agaagaattgaccaaaatatattcaaaagctcagagtataaagtggtaagttaaaatatgttgaaatgtatattttgtactgtttgataaaagatacagatacagccccaagataacgtttttgtttgcaaagttctgttgccttgttattgcttttctcttttagtcgttagatttccgtttgtaaaagttcacattgtcgtttctcaataattgtcgtttttctttgtgaatcagttatttgttatcttttaacgtattaatacacattcacagagtatttctagcagctctcccttgccaaaaccttcatcctttggagaaagaaaaattgtacattccagcatcaagagcaatggataaaatagattggattgaccaagagataaaaaaaaatgatcacattttctacccctacatatatctatagagtaggggatcgcttagatgatcccatggctaggggaggtagaagtctacagtacagttttgcacatttttctcttcgcctatcaccatcctattccgggtcaagcggcgaacacaaccaaaccagacgattatagccaaattcttggctttaacaacttctcccattcacgggtaagaatcactcccaggagggaaaatcaatgactgataccttgtatgattctgagctgtggctgcattgatactgaggagcaagaatgagttcttgggatgcctaacttcaagagtttcaagaatgagcactatcatctgtagttatttgcacagtacaggtctatgggaatatgggcgaaataagaggagggggttgtagctcaaagaatgcttttctcccttcagcaaggcttcctacgcatattgtatcaccacggccatgccaaatgccatcttggacattgttcatctccaacgttctggattcctgtcaacatttaactatttgtaagtttcctaggacaatgatgatttctaatgtcgacgacagtggaaaaatatacaagtaaaaaggctatcccagctccttgaggacctggaaacctcccaagagctcagtgctcaaaacattagtacattaatcatttcgtgccctatttccactcaaccatacactaggcatttctttgtttatacaggcattgcccatgctaacagactatcacataagctgccatttctcccagcttatatgaccttattaagctagtcctaacaaattcctatataatatcatctacttctaccatttgagaacattttcttcataaagtttcagctactcgtgcatatttgagtagtatgttttgtgagagactgacctgacatagcgtgcagcaggggcaaacaagatggtagatgcaattgtccaaattactatcgctaccctgcaacaacaaatatctcaaattttcagtactagtattaaagtagacccgaaaggaagtaaaggaatggatgaagatttttcgtatgaatagattaaacataaatcaaagaataaaataaaataaagatcattttgcatgtaacatatgttaacttgattcaaattattcaattcaaaagtgctggtctctaaaagctctcgttatacttacttaactgaaggaatttcctaaattctcctttaacttatattcttaacagtaatccccaaccctttagttccataacttttctttgtctgtaaagcttaacatgacatttcataatacctaatgatacagttcttgttgcaggataaacatttagaaattaaaaatatctatgaaaattgaggtgaaccccttatcttgctagccctcccaaatctctcaaaaacctcttaataaagttgttgaacacaattatataaaataataaaatttgcttgagaaataaggggagtaaattctatgacactgctaaacctcttgactcattaaataaatggagctttcacaaaccttaagaactaataagagaactgaaatttgtccaaaaaaaaaaaaaaaactcctcaaaaagttagaaagtaaaatgcaaacagagaaagaagcttaccctgatgttaaatttctttttcatctgggaacgaaagaaacccagatatgctcctattgaaatcgtgaaagcaattgacaaatataagaaacaactccgcttggtgacaatgagggcgacacaatttagaaaagcaccaagggcaagaatgaaataaatagttccctgcacatttatatgaaaaagcttagaattttcataggcagctatagaaaagtcaaattcaccagaaaccagagtcaacaaacattgaaaggacagagcttaatcaagtatatagagtagatattaaatttggggctaaatacctgtaaaaagcaagaactaaaaccagctcgtctcatgtttttgccaaatctgaagcaaggacagctgaaacaacaaataaaatgctttaagatttaactaaataagaagtgctcctcaattattaattataaaagcacgtaattatgtcacaaaatttgaaggaaaaaaaaaccactatttttatgctttacgcccactaaaattgaccatttaaaatagcctaataagaccaaatcaaaacatagaatgtatttctctacattaaaaaagccaaaacaaaaaaaaacattgaaacgtcttcgcagtttcaagcttgtcattaaacgctttcacaatttaaaaaagttcaaaccttgatttagaaaaaaaaaaaaaaa

SEQ ID NO: 184451 - DNA, 2126 bp, Cannabis indica
ttttgtttttttcccaaaattaattatgtactctaaacttatataggtataaataatatattatgccacggagaaatttcgttcttcaccatcataaatagtgtgaaatgtgaataatttttcatattagttattagactaaggagaagtagtttgtttcctccttaaattatgtactttagagatttttgtctcaaaatgtagtgagaatttcctctaaaatttatttgtattgctagaatcttctaaattatagaagtcattgtaaacttgtcaattttagttacttttattcatcttttgtacacaatttaataatgccacattatgatataattcaaaagtccaattaaaaatatatgtatagtgaccatcttaaatattttggaggtgttgttctaattttaggtccctacaaaaaaaatgtaatttataaatagaatttttaaatattatcattcagttatatatatcttacaaaacaccaaaaaacttcaactatttataaaaattgttattgatttcagtagaacaaaaaaaaaaaatataataataagaaaaaaagaatataaaaagttttaaaaaaataataaatagcaataatagatttttattttattgcttaaaatgtttaatagaattgaaaataaactttgagaattgagatgaaagtgactaataacaaattgttagtcccttaaaagttaggttcattaaaaaaaaattattcgacattaaagaaaaaatacattggatactttattttttttgaccctatacaataacccacgaccataatgaccggcttatgatttgatgacaattttttgaaatatgttatatgagctaacccctatgtttagtatcaataaactctttgtggcatttatatttagccttatcaacaagtcaatgtaagaaagagaacaaaatgcaattgaaagagcttctttacaatgatttttaaaattcaatagaaattttggccaaataaattaaaaaaaaaaccaagtgaatcaaaactctagaaggattatttaaatttaaatacttaaaattccatattgaattgaactaatacaattctattaaaaaatattcataaactaaaacttgttaaggacccataaattaaagttaaaggtactccagaaagacatttaattaaaccaaatatgtttctcgtattgtgtttgtctgttttaacaaattgtgtgtttttgttcacttttctcccccatgaatctctccaaggaagcaaagaataaaaataaataacaatacttactgaagaaaaactaataataataaaaaaaaagcttgaaataattaataataataattgttgcctattcataattactcgtccctatccatttagaaactactagaacaaactaaactaaactaaaacctacatactctttcttccacttaacaacaaactcactcgaatcataaccaaagctcgatcgccatggacgccgcgaacctaagccagttgaagcatttcatccagcagtgcaagtctgatccttctattctcaatgatccttctctctctttcttccgcgactacatcgagaggtaagacaaccctaaatcttccgctttgtttatttgcattttttttttgggtttaaaaattgaatctcattctagaataccgttttattcagtctcggcgggaacctgccttcttctgcttccgatcacggcggagattctaagtcggtatgttattaatgatatgctgtttctttttagggtttatctgaggtttatttatgtgtttgtaagaaagcatttaaccattgattgagcgagtgatttgtttcttttggcagaagagttatgtggtggatgagagcgatgatgatgtagaagaagaaagcggcacaaaggggagtgttgaggtggaagaagaagaggatgatgaaatagtcgaatctgatattgagcttgagggagatgttgttgagcctgataatgatcctccacaaaaggttagctaacttattcaagtttcattataatgatatctatttatttataactattcatatatttacatttatatatatttcaactctgtttctatagtttttgaattgtttttttttttt

SEQ ID NO: 184452 - DNA, 770 bp, Cannabis indica
aaaattagtagttttgtgattcataattaaatttaaaggtctaatgagtagcattaggcaaacaaaatgcatatgaaattgcaaccagagaatgaatcaatttaaaaatagtcactgctcaccttgaatagtgaatgcaatgtcatatgcaggaggattgagaagaagatctctaacataactgaaacaataaaagaataacaaataagcaagcaaaacattgtggtgctcaacagaaaaaagaggtgggaaaaaaaacagatacaatgtgagagcttttggaaaatgtttaacatactattcgagctatagtgaccttttcaacaataccattcttaaagagaggaacatgaataatgaatactcacatcagtggtagacctgtacaatttgatggaagtaacaccttcaacaaacaaggtattccctcggtcggaatggcacctgagagaacaaaaccaattaggattgtttgacacattattatatcaggattcttaaatgtgtatatgtggtacgttatgaaacaaaaccaaccaatctgagtcgctgttccaagggtcaaaggccggggcctattttccgaagaaatagtgacattcctaaatgtaacttcatcatcaagaccataaagttccttcacctaaaagttcatggaatgaccataacatccaaaacataaaatgacactgaaagttacgataaacaacaacatgccacaaatatgaaccttagacaagaggtcagtcacaggattgccatcaaaccat

SEQ ID NO: 184453 - DNA, 8176 bp, Cannabis indica
aaaaaaaaaaaaaaccaataaagaaatagaacatcagcttgtgatgaacataattgatacacaaaatcaaagagttgaaaatatatctcagttgggactatacgagaaaagagaaacaaaggaatggaaccaactgaactctccctatctgcaccttctgattacaatataacccaaaaagagttggcatcttctaagaatcagcaaactggatttttatcggtagcatcttcttcagcagaagcaagcactagctggggttgaggaacatagccttcccttcgggccttcttgcgttcacgttggagcctgaagttctctctctttctagctctgtagctgttagggttctcaggcaccacttctcttggatatacactcacctatcaattacaaaataaacacaccattgttatcagtttagaaatctaatcgactataagtaagtttcaccagcattataagagataagaaccttctttctgtcaggtccaaacttctcaaattttacaagtccatcaatcaatgagaatattgtatggtctttcccaaggcctacattctttcctgcatggaactgaatattcaaccagagcaatttagctatcataaaataaaatcatttcattttcataaaaattccagaatcaaagcacctcaagcaatggcctcatttcacaaacagttaaagataaattgttcatatgagcatgtaaattccaaccataaaaattccagaatcaaaccacaatatgtcagtgatgtggttggcttggctgaccccaaaacttcatttctaaagttgatttaatataaaagatacatttaaatgaggcgagggagagagaagtagattgattatactagttttatatatcaatgattaatatatgccaacttgaatttgaactgtgcaattccatcagtatttttgaaaccccataaggataaacaatccctgtcaaaaaaattcacctcaattttcttcaactaatccctaattagtggtaacaatgccacattcaaactagaaactatgcatttgtataatacattctcaatttcagtaacagttcactgattagcttctaaattacatagctgaataagcccacaatttaatccgcaattaaaatcgaacaaacataccttggtaccccgctggcgaattataatggcgcctggtttggcaacctgatcgccataaatcttgacaccgagcctctggcccttagaatcacggccattcttggtactcccggctcccttcttgtgagcattttcaatcgtcaaggggaacttttgcggacaggagaatgatagcttgggacccactttgatggaacccaaatcccctttgaagaaagacgatgaagagcttgaggtcatggatagtcctccgaaggctccgactaggttgaaactcatagatgcagctgccatctttgtgaaatttgagactagaagaaagtagaattcagatttctgcgaaggttgtgagcatgaatatggtgattttgggaaataggagttagggtttcgtggttacgttctgtgtagataaaagggaatgttacctttagctcggtctgtgtctggataaggaggaagatagagcgcgtgtaataaacggtctttctgggttgtgaatgaggccatgccacgttgcatctgggatggtccatgtcagcaaacatgtctcagcagcttttagcgattttctttaaaatttattttttttaaattatatgaaagattaaaacccgctatttaattatactaataatattatgacactaagaaaggtgctatgttttaaatatagaaggaagaatcctgaatgaacaactatccacaaatgtcgattcattcaaacaagagactggaaaatccttttctttgacactggtctcgtaaacgagtgaaaaatgccttatagtgatgacttttagcaattccttctatgttttaaatatagaaggaagaatcctgaatgaacaactatctacaaatatcgattcattcaaacaagagactggaaaatccttttctttgacactggtctcgtaaacgagtgaaaaatgccttgtttttcttttccttttccaccactccaagagctcactcgaaagcggctaataaatatttgatttgaaccggttctaccccaccccttctagtaagtactgggggaggaaaagaatagtgatgacttttagcaattctcttattgtatcgctcattccttgcattcaatttgagctttcatggaccgatttcatactattaaatcgagaacacaatttattaattatcaaaaaataattaagtaaactataataaaattttaacagttcacaacactttaagttttataataatcaaatactcggctcagttgctaagtttttttcactattctgctgcaattcatttttctcacagcacaattatatttactcttcctcaaagcacaatggtgccaaactggcattaaataggtattgaactaaggattttttttagtgttgataaaaatttaactttatttaagtataaatataactgaaatgctataatatattatgtatattagaccatctctaatagaagttgtatataatatattatatttgtcaaaaaagagtataatatatctgtataaatttttaatattataaaacttgatacaaatttattgttattattaaaagtgtaatagtaataatatctttaattttataataattttttttttattttgtatttttacagaattttacatagaaactcatattgcaactagcgctgcaacttaaatcgcaaacaaaaaatcgtatagcaacccacatagaaattgccagagaaaccactttagaaatccaaaccgtaaatttaaaattaaaaaaacaatatatagggtaattcttctaattttttttatgtaaggtaataaaaaatataatcaattcataaataatgatataacttaatttattaataaataataaaattatatatttatgataatgtaaataagcaatatatttttttccctatttaacattttctatctgccaaatttatattaccatttgacaccttattataacatattattattttaactatacatcacttacttgatcttcatacatattttaatgcctctacttactcttaccataaaaattaatatggaacataatgaaatataaatatactgtcggcatatatattaaagaaaaactattcaaaaccttacctcccatacgtacactagataagtgcccaaaaattaaatccacgtggacataatctcaatcctctattaatccacgtggacataaccaataattatataaatacaaatataacccaaaatcaattttccatgaaagaaagaagagtactatacacagacatgatgaagcttagtactactaacaacagtaatgccaacactcacactctcaggcttcaccaccgcttacggccatgcctactcgccctcataatcaccaccgccgcgtttatcacactcgccgccaccaaaacaatgaccaacatcaactacaacaaagtctcctcactcctcaaccgcaagccctgtcctccgccggaccccgttgcgatggccaaggcggccgagtacaaggcgaagccgactcagctcctcgccataatccactacgccacgtcatcaaccgttccacagcaatcgatcgacgagatccgcgtgtcgttcgacgttctacgcgccgtcggaccatgctaacttcctcgtcttcggcgtcggacgcgtactctctaatgtggacctccctaaatccacgtggcgctaccttattcctcgaggaagatccggtttgggtcaatacggtgctccgagatgctccgattctgagagcacacccggttaaatacaggactcgattatccgaagccgacgagctaatttcgagctacaaagccgagccggattgtttgccgtcttcggctcggctcagtcccggtagccggtgcagattggcgctgactgagctgcctagcgaggtgtacgatagggagtgggatttgataatgatcgacgcgccgagaggttattttgcgaaggcgccggggagaatggcggcgatttactcagcggcggttatggcacgtgcgagagttggggctgggctgacgcacgtgtttgttcacgacgtgaataggagagtggagaagatgtttgcggaggagttcctgtgtgggaagtacagggttagagccgtggggaggctctggcatttcgccattcctcccgctgctgctgacgtcagcaatgctactaccttctgttaatgtgaaaattaatatatggtataatttttcaattaggaaaaagaaaaatcaatgtattttttcaaaaagtttctatgatcagcatagtgataataagattataataataaaagaaggtgtactatcagattattaaaatggttaggtaaattatacaaagacttgtgtgctgtgtgttttagagaaaggtaattagtaacatttttttgttattattttttatttttaaagaaaatgttctaatgtcaattaatattattagtattgatcacattataatattttccttcgacgaactaaatatataacagggaaagaaattgattgaattgtttatgatataatgacaaaatgaaattaatttaaacttattttattgtttttatggtattattttaaatttgacatgtattttcgtttttttttctatttgcaaaatctttctgtctattttgactaaaacataattttagagaggttagagagttagttttctgttttctgttacagcttatcttggtttagtcttgtaatctctctctttcaatctaatgataaacaatcagtactctttccctttctgaaatattcttcacaggctatgtttaatttttaaggatatattttatttatttgaaatgtagagaggagtcttaaatacattttctgagtgcctttatctcaatataattatgggcacttgaaagcatttatgcatgaatatgatgagatagagaaaccaatgtcagtgtgcatcatggtgtgttataaagaagttatatctaccatttaataccaacaatttcttaggattttttttaccctctaattttatatcattcacttaaaagtgagttaattactacccaatgctacaccttaatataattaacactcagtacagaattgcaagatatttatttatttttacgtgtgggtaaagttacataatttagatgctataagttgtttaaaactcgtgcactatatttgcacagttcctgttttatattttctgcctaatttttgaatgaataaatatataataacaaaattaggtgaagaatggttagatgtcattcaatacactacgtagcacttggatgaaaatgatgtacattttatatcattaaaatcttaccctccaaaaagaaaaaatattacattacatcacataaaaactaaaaatagacattactatccaactaaaaaatgatgtgatatgagtcttgtgattcccaaaattatctaaaatcgaaagagcccctttttgtttagcctcaaaataaacatagctagttggtgataagtaccattttctttagagaaataatggaatagtgggaatcaaaaccaagtcattctttcttctacaagtaataccaaaagactcaacagcatcatcaataacatcttctccatgatactcccaatcaaaatgataaattaattgagaaagaacaagctcaaccacagccacaccaaaagaaatcccaggacaaattcttctacctcctccaaatgggaccaattcaaagctattccctttgaaatcaatattggcttttgtactactttcaaatctctctggcctaaatgactcaacatcttcaccccaatgactagtgtctctaccaattgcccatgtatttatgagtattttggttttattgggtattttgtaaccattgatttcacactcttctcttgactctcttgggattaaaggtactggagggtgaatccttagagtttctttaatgattaattttaaataagttagtttctctatatctttctcttctactttgcttttaccttgaaaaacttttctaacctcttcttgtgcctttttcatcactcttgggtttcttaacaactctgttattgcccattctattgttgtggctgaagtttcactccctgctgaaaatatatcctgaaaaatacattattgtgagctttaagatataatgattgaacttgatcatgtaggcctttaagaccaaaatcaatatgaatttttagagttctttgctttactagtttaatgcaacaacaatctaagaaactaaagtaaaacagtctaatttttgaagaagaaaagaaaaatgaagaccctttatattgaataatactaataatatcctaataatgttacttaccatggcaacagctttgatgtgagtagttgtaatatcaaagtcaatctcaccagattttccaagcttgagaagtaaatcaattatgtcttcttcatcctcatgatcatcactattgctaaaattagctttagctttgtgatcatttacaatgttgtcaagattcttatcaagtttcccatgaatctttttcaaagcaggtaccatcccagtcacaaacccaagaaaaaacttaagtgaaggaaacacatcaggaatatcaaatccaccagaaacttttctcacttcattcacaaacgacatcaactcgtcttgatctttacacttcttaccaaaagctgctctagctacgatgtcgtttgacaaagtgaacaacttctcacttagatttactccaacaccaaccccagatgtcaaaaagtcaacaaaatttcgtacctcttcttctcttattgatctaaacgacatcactcttttaccacttaataattccaacacacaaattttcctcatctgtctccaatagtcactataaggtgtgaagcctatgcctaaattaccatatgacatgatttcggctgcaaccccgtttggccggtttgcgaagctgaggtcgttggttttaaggacttgtttggctgattcgggggaagagattattatggctgatacttctcctagttgaagatgcataatgggaccatatttgtttgccaattttgataataattgatggggtaatggacctatcaattggtgtaagtttcctattatgggaagtttccatggtcctggaggtatattgtttctttgggtggctttgaatttgttcctgaaaaatgatatagtgatgatgatcagaatgattgaaatccatatgggaatgtaaggaaaattttggggtaagagagacataatttgattttaattagttggtaaacaagttctttagatttgaagtagatgttagatctaattatacacatggttgacatagtattatattaaggtaaatgcaagtgggaactcaagtaggattatgttaataagagagagaaagagagtacttgatttcaaagttgtatataaaacttgatcaccaaggtaaataatagactttgtctccttatattaaagtttcattttcctattatttgtagtttgtactactacaagataacaaaaatgttcatttatcatttttgttagaatggaatgaaaatgagtaatgaactggaatagaatgaaaaagaaactatttttattttattcatctatttggttacattttaaagtattagaatattattttaatgggatgtcttttacactattttagtggaatgactattctattttaaaatagaataaaagatcattctaatataacatgagaaaaaattaatgacttttttatacattttaaattttatttcatttcatttttatttttatgttttcatttctttcaaccaaacgccaccttagtgtcatgtatacaaaattagggcataacatgttttataacaagccacgagcacaaacaaactacttaaaaaatacaacttgacaaaaaatttgaattaattaaactcaatttaagtttaactttaagtgtttatattggagtccaacactttatacatattgacattaaaaaaataaataaa

SEQ ID NO: 184454 - DNA, 3066 bp, Cannabis indica
attatgttctttctgccgaggggtacttttttctccaaagcgttgcatagtgtcttgaggttctcggcgttgagttctttgaacctttgtgaatattctgtctccataacgacgtcgtttgaagaagccgaggtaggggtagagttggaattaatattattattattattggaagagctgaatagtaatgaagccttttggtttgggcttactactacttctgggataaacattctcaaactcggctgctgatcatgatgatgatgatgatgttgatgatcattatccacataattaggatgcctccatggatgttttgacacttctgatactgatggccatgatgattcgacattagggttttggttctgttgttgttgttgctgctgatgatgatgatgttgatgatcgtacgagaatccagaataagcaacagcagaggaagaagaagagaatgttataagggttttctctgaaatgttgttagaattcgaatactgacgatgttgatgagttgaatagcaaaatgagttccactttcggtaaaggtctgccattttggaacagttctatatagcaagaagaaaaaaatatatatataagtaataatgcatgtaaatatatatatatatatatatatcatataatgattaatatgaaaggtattgctaattaaaacctgctgatctttattattagatgtaagaagagctttggtatcgtttttgcattgttgtagccatggtggaaggttggagttatgatcggtggtggctcgcaagcttcgagcttcggcctcaaatttggctgagcactcggcgcagcaactcagttgttgtttttctccactttcaactctactcatcaagctgctttttgacgtaacagtcccattttttatgcttgactcgtcacttttcaattcactgatgaaaaaaaagaaacaaaagtagtgaagttgatcatttatatatattgatgatgatgatgatgatgatggtttaagatgagtaaaggcaaagaacagaaggaaaataaggaaagcttcaataatgcttcaaattttagaaatattccctctttattaacaaattacaattggagaaaacaaactaaaaagaaaggaaaaaaaaaaaagctataggcactgatattcatgcaactctcatttctacaggaaaaatacttattaattaagtagtgtgtcttcaatatatttgaaagttcaaataccttttctttttgcaacaaattataataatttctatatacatatactttgatctttctttatgaaaagagatcgaaaccaaaaattaaagaagaagaagaagtcactgttcctcacgatcactagctagctaatttaaaaccttgattaatatatattaattaaggattttaattataaatattacctgtgatgagtagtagtgaggagactgaagcgcagactacctgctggaactgtaagaggatgaataccccaaatagtctccaaggatggatgacctgatttacatctcatgtaagtctgaaaagtggcaatccccataagccaaaatctaccaatatgttctccaatcccacataccaatttcccaagctccataataatatgttccactggacaataataccccctcccttgttgtaattggctattattattattattactagccctatactcagttgcccacttgagatctcccaagtacaaaatcacccctttcgccatacaactcctcaaaaggctcttaagctccacaaacttttgctcaacttcaactcttgaataattcccaaaagatgatgttgatgatgatgatgatgatgatgatgatgatgaaaagggtatgaatttaacctctcttaaaccctcaggaacatcatccttctcaactttttccatcactcctctaaccacaccttctatgctactaaggcactccccaacaactacaacactccttctcttgttgctcaccaagcactccaccacacttgccacgtcttccttttcgccactcgtcgtcaacggatccaataccgcctcgggtttgcccggtaatttcgacccgttgatggaagaagatgatgacttgttaacattagtagtagtaatagtagtagaagaggaattattagtattaggaggaggaggaggagttgtttgagaacaaatctctaaagaaacagcttgttcaacattgcttttcactaaagtactcgagaaaccggcttctctcatgactctactcacacttggatcatccaagattgagataataagctgttccaactcaatcttcacggctaagagtggttgctgctgattctcaatcgaaccgcgcctttggtgggcctgagcccttttaaaggcggcgatcaaagcgttagaaatagaagggttttgagagtgatggtgatgatgatggtggtgatggtgatggcctcccaacatgggactcgaatttgaagctgggagacgattgagggccacattgaagcaaagctctaaagctttgcactgaagaggatgacactgagcctgagattgtagacaagcttgcctcaacaacccagttgaggcagccaacatagtgtgagccacatgaagtggtgtcacttgcgcgtggcctcggcgacgagccaaggccaccgcttgtttcactactccagcagcctcggccgtgaggccttgctgcaacgagcaaccgccagctctcatagttgttattttttttccttcaaaacagtttttgtcaatctctcttggtggaaaggaagaagacttgaaattcctaggtagggtggagtagaagagatttagtaagtatcatattttttggattggaaggaaattgataagaggtttttgggggtggaactctagtactagttattgtgttgtgtttggaaaatgataagtggttttctgtgtaggtttatttttcaagacttatggtatataataattctgttagtttttgtgtcaagcttgtttgttatctagtctagatcttggtgaggtagctatagttggagagagagagagagaga

SEQ ID NO: 184455 - DNA, 1943 bp, Cannabis indica
aaaaataagaaaactcctaaaaaaattctaaataaaattaggaaagttgttagggagttaaagtaacaatccaataggattaatttgctacattttcaaaaaataaaatggatgttttaacttcttctctttcttcttctaaatagtgtggaactgtacattttaaaaggaaacttataaaataaaaattatatttatacagaaaaattatacaacgttaaaatatgaattattttttttctaaaacatgatgtttgttggatattattttagactttgtattacgtaaaaattattgtttgaaatctttattttcttaaatgataaatcaaattctatattttttagaacatagtacaaaataatacttgagtttaatttttttgccaaaatagaacatatattaataatttaatttgaaagtgttaatcaggaaattattttcgtcgaaaattgagttcagagtttattttatttaattttaaaaaatacaagtctaatttatcatttaataaaatagacgatacaattgacaacttttgcgaaacacaatgtgtaaaataatatctaacctaaaatatatacgattttgttattttacaatataggtgtttataaaatactcaatccaattcaatttacaaagtgcgaaaatctgtagttgcgcggattggattagtttggaaaatctaaaatttgcacttgtcaaaaatattaattgacatgtaaaagtaatcgattcaattaaatttacatatatgtatgtagatttaaatatatatatatagatttgatatttatttgtaaaaaataataatttagaatctaatatatatgatataattatattttaaaatttagtagataatattatattcttggaaaatataattaaaaaattatgtatttctttatactaatttttttttttttttgaattcgttattttttgttttaatttgcagttaaaaatataaaattataataatttattttattttattattagttattagttgtaaattagtttgaatttgagttattatataaattaaatttgatctaaaatatgcacatttaatgcagattagttattttataaacaaaataatgctaatttaattgaataaacaccctctcgacaattataatgtgggaaaggatgggtcgaggatcataacagttgagatgtcatgttttatattatatttatgaatttaatgtttggtcccattttcagaagcaaatgggtcaacccttattaattattaattagacaattatgtaaccaaaatataattaagaacattaatattaataatatgatgaagttctacaattattgttctagtacgcaaatggttatgaacttataatcatatctttacatttgctctatgatcctctttaattttttttttttttgtggtaaataaatttatttttttttacttgagaattgatgcatagtcaaagtatgcgaccatataactaagatagacttcacgaagtcactaaggttaatttagtaggtaagagagaaatgaaaaaaaaaaaaaaaagaaattcaaacccaaaatttttaattaattaattaattacaatactattacgctacactaaataaaaaaagataaactcaccatttcaagtgagtggcagtggcacactcttttagggagtttcaaagtcattgaagcacaaatagtagtggcgctgatgattggatacttttgcttgggcttcctattctctctattgagtctaattgtttgacataaatctctatatattctaagtgtctttctctatagtctttgtaatgaattaggctctttagtagaggatattgctagtttattctttaatttccttgatgcttccttaattagtttatattcgttgttcagctaataagattctgatgtgatcaaaccgatcac

SEQ ID NO: 184456 - DNA, 896 bp, Cannabis indica
tgttagctgaaatttctgtgtatttggctcgaccggttagaagacgttaaatgaagaataaaggggttacattgtagtatagcattgtgtttaaacatatactagatcatctgaaaatgtggtaataagatctatgaatggacttcaaagtatatgaacgtgtctcatcacagaatctaaagaaaccaatccaatactgcctgctactgttaagatccaacttgattatggctaggtaatacaaaggctattgtctttttagctggattaggcttgaggctatttgatctaacatagaaatgggaagaaacatgatttttcgcttggctatataaccacatattgtgaactataagagaaactaactattcaattcttatagtagtagcatgcaaaggtcagagcacattaatacataattaaattttgtcttattcaaataagtagtatccatttggtgtggcataataaaattggggtcacatctagcgtggaagagcactagaagtttattttcatgtaattttggacgaggatttctggaaggtttttttttttttttttgtaggatgaggatatctggaagttgcgcttttcctttttgaacgaaaaggaatatctcatagaaaggcaaacttgccaagagagtacaaactagggtcaaagtgcactaccatcacactagctagctttaacaagagagtgagttatagcctaaatatgtttgttagcaaggaaataaaataaggaaagaaagaaagtcttgaatggatagaaaagtgttttcacaaaatttggacagtacatgtggtgcttgagggttgtgccaggtggcaggaagaacttaagctcactaataatttaacttgctatcaacaataaaaaagattagctct

SEQ ID NO: 184457 - DNA, 2192 bp, Cannabis indica
aaaaattggtgcagaatgtaattttccatcttttatttcgttcaaagtttcatattttatcacttttattttatattttgcttcttttccctctttctaaaaaacagtatttctcattattttgtttaattatacacatataaaaacatatgtataaaattttcaaacaaatttatgtttcatttctattatttatgatgcaagcaaatttataacattttagaagtggccaaagaaagagttctataaaaataaatagatcttcataatactgagtctttttaaagagttcacccaacataaagctcttccatatacaaaaatctcttctgaaaaatattattcaaacagttactaaaaagttattttaatcttttcttcttccagtcaaaagccataaaagctgagccaaatggatccataattgtaaaatttcaaattatgtaattagtgtgaaatgaagatttgtaaaaactggtcatttcaaattaaatttacatcaaaagtaattgcattggatattatacggagatgcatgtaggaaaggattacactaaactgcttgtgttaatatgttctgctcgtttgtaatatgttcagctgagagtaatacatttatgcggattttttatttttacgcctcaaaacaattcttttttttgtatttttacggaattttacatagaattccttattgtaattagggctgcaagttaaatcgcaacaaaaaaatataacaactcacataaaaactaccagagaaaccactttagaaacccccaaaccgtaaattttttttacaaaaaaaatgttaaaaaagcagtatatggagtaatttccctattcattgtgaggtgggaccctaatgagactattaagtgattactaatatccttttaataattccttgtttacccatctgctgttgcaacactgaatatttttgttgatatagtgtctaatatgttcatcatgaactgtcataggatggactaattttgatcaagggacagggagtggatcactggtggggcattggtatgatgaactaccaaactctatgaaggaaagagtgcattccttaggattgcatcctttggtggaaggaattaatcaatcagcaatcgatactcctttaatgcaagctttggctgagaaatggtgagacactacagatacatttagttttgagcaatttggagaaatgacaatgacacctcttgatttcagtgcgatatctggattaccagtgagtgggaaaaatatcatatatgataaaataattcacaggaaggatgagaccatgaaccagattggtaggggagccactactttcatgtcacaacaccataacaacaactggaggcctatggaaagcgtgggaggtaagatgcataagacaattacgaggttcctctttatagaagggtgtcatactaatggcttcaggttatccaacagagtttgtttattgatatggtgactagttattttgtttgcagatctgggctatagaatacttcccctgtctccacgtaattaatgtattcccgaagatgattgtgtggaatgacacagcccctccaaggatggatcactcaaggctgattcatttttagaggaaaaaactaactgacatacctttccaacaggtatgcatcagttttgatgggcagaaatttggaacaacaaaaattttactaccattaataaatttcatgttttattttaaagtaacaatttattgttttctaacttcaaatggttggtgaattggaatccttggggtaaaattgagtacgaaccgagttacatcaaacaaagtaaatagccaaaatcgatgctgtcaagggggaagctaatgtggataacaacgccatggtctttcatggtaagccagctgcaagaccatggtgttgttagctgttaaaatcttcatggattcctatgaaatgatcaatgcttatgtgtcttaggaaacttggttggaccaggatagaggagagccacatctgaatggcaaaactgtgccagtataggtaggcttattagcttataaatagttactatatatattgctaaagtattttcagcttgtgtaaatgtttggttaaatatcttgtgtttggtaaaacactaaggacgtcaccaagaatattgctgcagtggcatgttaaagaaaaggactttta

SEQ ID NO: 184458 - DNA, 1165 bp, Cannabis indica
tactcatcaaatataggtatactaggaggacggagctagggggccggagagcaccatgcccccgggaaattttctataatttttttacaagtgttggcccccattaagttttgggctggcttggccccgagctggtgaattcactaccagtaaaattacatgataaagaactgcattttaccttggaagagagacgtgctttctctcaagtgggataactggaccacttttaccaccattttcttcaagatgtgcaaactgctttctgaattgatcaacggcactaagataaacaaacaccaaatgtcaatgaaaatgtagaagtaaaatccttatttcaaccaacgtaaataaagattaaacaataacaaaacaaatattcattagaaccttgggtagagaaaatttgtcctctcagttccattcatgtagtctttcagcaactgaggatgatactctaatatctcgcgaaagattagctcccgtatgtcttctttcgtgacccttcgcctctcaaactcaaattccatttttgtaattggttggcaggaaggttccctctctaccctcgaaagtcccttgaaatatggatcagccaatgcctgataaagcaacaaatccaattaatttgatacattgaagtggggaagggaggaataaaaaattgagtatggaccagaacagtgtgtacatcttatgcatcaatgtacactagaacaaacctcttcagcagttggtcggtccttcggatcaaaagcaagtaacctttctaatagccgcaatgctaaaggatctgcattaggaaatttctgagcaaaatgaacaggcaattttttcctcatagtagtcaagtatctccttgctttttcatttcggacctgttcaggtcattttaaaattcgttaagacaaattagaagcagaaaaactcgaaagggaaaactaacaaatttgcttacccgagatatagtatctagtgaaggtgtaccaagcagatctgtcatcaaatctaactgatgtacaacatttttaccagggaaaagtggcttcccagttaatacttcagcgaaaatgcagcctatactccatatgtcaattgcaggtgtgtactgaaattaaacattttttttcgaaagtaataagcaacaagtagaaaagaaaaaata

SEQ ID NO: 184459 - DNA, 4839 bp, Cannabis indica
aaaactataagcttctaattcatggctaatggctccctacgtttcattttttgcctcagttgctttaccttgtccctcactggcagagacaagtcatccagattctctgtctggggggattcgaataatttctgttgtatcatatcgtggtacatcggttgaaacctcgcctgaaaagccctgaatgaaaagtaaggtagcagagtgcaaaccactacgaaaagggtaactagccaatacagggcactaggagcgcatgcttcaacaagaaccttgtatgatgttgaagacgcaatcggtgggagagaaccgtatattactaagaacacataccaaaatgtgatgcttccccaaatgaagaaatgttggatccatgtgaagtagtttatagcaagtgccatttgacaattcacggcccacactatgcatgtatacattgtgactccgaggacttcaaagtcaacaacctgaccatctttccgaaaagcctgataaatggtggagttggtggtgaaaaagaaaatgattatagagctgacaactccattgaccatccaaccaattatccggagccagctgaagaggatgttctgtatcccctcttgatataaaattgggtactgcaaacagaattagtgaactcgtgttgtcatatagcaatcaagatgacatttattaagcacagtttgtcaaagtagttttatgttaggccttttaatgcgattacaaatttctacaaggatatcaaactgttaccttaaggcagagtcttgcagaaacgtcctggtcaaagacaccaagagcaattacaggaagcgaagtgaagaagacgttgtaaaatgacatgtaccaatcattgtaagcagattgaccagagaatgaagcataggcctcaaaccaaaatagagtaaatccaaatgttatgttcttgtaaaagaagtagcatatctgcattcataaaagaacaaagtgcacatcttagcaaagggtgagaggcttttataatcaggctccctaaacacccacaccgacttttacaaattgaacagatcattttactaaggaagataaaaattatgcagttcatgaacttcatccccattgtgcctcacttatttactctcctagggaaactgaaaaaatataagggaacgatgaaggcaagtttcatttttgtgttaaaaagtaaaggcaatgtgaacataaaggcctggctttaccatcatagatatgcgcctatagcaccaatgcccgtgtaccagcaaaagacgctctaaaaatcggaactgagctattgaaaaatcacttgccatcactgcctgcaacaaaagaattgatgggcatcagagctggtatactattaatgcggaaaggatcaccaacaacaacaatagtttaatgaacagaaaaacaagttgagatggacactgcagaaatcaacgatcgcataaacaaaaatataatgacctgcattccttcaacaccacttatgccaactccaatatcagcctcttgaagcataccaacatcattcgccccgtcaccaactgatagtgttgttttacctgtttccattttaaccagtcttgtaacctgcaaatcttctatatttcagtcagattattctgtagatgaacactaaaaactccaaatgaacaaaacttaattaattatcatagaatagtgaatgccagcaagcaagaacaattaacttacaagagccttttgcttgggtgtagagcgacagcatatgactgaagcacaattgatagcaagctcaaaaaatgacttctcaacattcttgttgagtgaatattccaaggaccttccatcaattattaagccaaatgtgatagagttgcaactctctttagcagaacgaatttgtaaaattccatctacaatttgtttctttatgctgtccatagaagcctgaaacagtcaaggattcaggaaaaaataaataaatcaaaatttgttctctaatgtaattcagaaaattctacctctgcaacggcctctttatccccttgtttctctattgcaataatatctggtgaatcaagtgtaatgacaatttgcttcatatcttgtcttagtaagctacatgcatacctgtaaatgtaaaatttaaattagttgtggactgcgacttcttggaaaaaaaaatacataatccaccactagaattgcttccgtaccctatgttaattgctgtctccattttatcacctgttaatacccatatcttaattccagccaggtgaagcttattaatacactcaggaacctgcacaaaaacaacaataaagttaaacctctaaggcacataaaaatgttttctaaacattacaaagggcatccagtaacagttcccaaattcaacaagtgtgttctaaatattggaaatggcataaatgttcccatattcaagaagtaatgcatgggagtttttaagttgaataatcacccccttttgcagtttgtcctcaacagctgtggctccaagaagaatcaaatttctttcgatctcatcagcagctgcatcaaccaatacattgcgatcttcagagacagaagttttggcctttctaaacttttcttcccaatttatatatacttcttcatcaagctcacgaaatgcaatcaccaaggttctcagacccgcttcagcgtacttattaatatgatccttggtttgagcctcaaactctctcccattttccgcaagcctttcaaacattacactgcatatattcggataaataaatacttggaaaatgatagaccaactagcaaattcttgtaaataacaataaactaatgatgtcaagagtctcacttgtcagcacccttgcaaagaagaagatactgattttccatgtttcttacaatcactgacattctcttacgggcactactgaactccaagacttgaagtagctcgtatactctggcacacaaaaagacaaaaattagatgtactgaattgcaatggaaaactaaagcaaaaaatagagtaaaagagtctaacttacgattaaatatcaaatttagcaaaccaacatatacaaccacattcataaatgatgagaaaaacagcttaattttatgatgatgggttgtagtaccaagaaaacgattgtctcagatatacataacaaagggtgggggcagaggttagaggaagttgaaaactttgaaaagtaaaagttaggataaacaattctagccaaatgttctagtgacaacagataaaatcatgtttcaagttaaaatttgagataaaatagctaaaagtagttgaaaaggtaaacctatgaaatgagaaagaactaacctgtcaaccttttttccactcttatagtccaactcatgcacatgtatgcttgtctgtgacctgtcaaaaaactcaaagccaagctcccttgcagcaatgacaaaagctgcctcatctggtgactcggcctcgtaagaaatgtctcctgattctttatctccatcgggaatggctgtgtgacagattgctagaacccgaaagaacttctgtatgacatcagaatgaggttcattaacccacatcccattcattatccgctcatctctaaaattgaaacccttgattgattgttcagtgcctgcaacatcatcgttatgacttggattatcagatatcatatcattagtttcaggcagtccaccccttctcctggatgccagtgctacctccacttctgtcataccacgaccatatgtagtgccagctattgaacatttcacaaactccattgaattacatgtcaatgtaccagttttatcagaaagtatagtatcaacctgaccaagttcctcatttaaatttgatgtgcgagcatgagctcgcctatctgtttcttcatcaaacatgtctcgatcatgattaatgaaaacactctgtaacaccttcacaatctcaatggaaacatacagtgatattggtatcaaatatccatacaacataagagccgtcaagaaatgtagaaaggaagcaagcaatggtcttttggggtcgtagaacacaagagtattatctggacggagataccacctaatatactttccatctttaagatctttttcagtttcaacaccaaaaaacactgatccaacaaaagagataaaaataagagaactgaagagaatgtagatgatcttatccattctcctctcaattttacttctcttggaaggaggatcagttgcattttgcatcacttttgtatcatgcccagtaaaaatgacagcaccaaaaacgtaatcggtgtttttaagcttcgaatctcttaagagaatctgttccaaagatagtggatgttgtctaccatcatagtgcagcgttccaacaaacgaataaaggttctcattgggatcctcacacttgattactgctgatgtgaagtctttgaatgatttttcatcgtggagattggatgtcacctccaaagaatgctttaacttcaaattagtttctccatcaaggttcatagtttcaacatagcaaattccatcttcatagcttgatgaaagcaaaagcagatcagcaggaaagtactgatctttatgcaccttcacaatgtcaccaactcgaagtttcttccatctagtctcgtggaaggcataattcttatacactttcacctttcggttactttgactctatatcctgaaaccattccaaggttcagatgagaaatgaacaatcaataaaatagtaaataccactaaacgtaattcctctttttctttttctatttttctttttttttctaggtagctatgggttaagttttagtgggtaga

SEQ ID NO: 184460 - DNA, 1673 bp, Cannabis indica
ttgtataatttattgtcgtttgttcatgtatgaaaacgacaaaatttttaaaagaacaagaaaaaaactatgggaaagtgaattaatattacttcaaagagagagagagagaaatgttatattacttcaagaaataataataataataaaataataataataataataataataataataataataataatagaaaatataaatatcttattgtgtgcaaaagaaatgtgttacctaatactagatggttgtttgttagaccaataaaaataaaataaatgttaaaccaaacttgaaggcaaaggcaaaagaccatactttttctataccaatttttaaagtgtgaattaatattttattttgtatattaattgaaccatctcattagtcattccaaattcgaattatttgtcaccacgtaagtaatcatgacttgtaaaaaattattttacaaaagagtattactaaaaagataacacttttcttagtgtcatactgatattagtgtaattaaatattatgttctatataagtataacttaagaaaagaacttttaaagaatatcactaaccaattgtgatgtgctacttatagaaagttctactgtctagataccactgatatccaataacaatactttttacaaaaccctaattattcacgtggtaatacatgctctcgatgcctatttgtaccgagatataaccctagtttttatttttatattaatttattatgattggtttgtagttggactagacctagagtacttctagttgtgacttgtgaacgtgtgggatcaagtgtgactaatatactctaatcgtaaccattcattatttgatgcatcattttcatggtggaataagtaaaaagaatgtaagactaatgtggcgcactattttgacactaacaccaactccttcttcattaatcatcatatctgaaatttctaaaggataaactttaacttgattctagcttttacactacactgcaaaaaatttaaaagacaagtcaatttcttacaattttttaacgagaaatataattatttttttttcatatgaattaaaattaatttttataatttattagaagtttttttataatcacagtacatatcaccataaaagaattttttttttaaaaatgatcgtatgtatttttgagaataaggaatatttatgaattatgtaattatgtaattgaatgtaattaaagagttttatttacattcttcaattgtcatgacttcataaaaattgagaaattatattgtataacttacaagttttttttatttaaaacattaaattactaaaaaaattattatttttcatataattactaactattttactgataaaaatattagaaattcatatataattaaattgtataattatactacttaatacttacacagttattttagaatttagaaacaccctagaaatttagaaaaataaaataaaataaaataagaagttgcatgacccacaattttggaaaaataaaataaaattgtataatgattgattaatccaataaatttattaaaagaagaaacatttatatacataatgtgataaatttttttttcaactaattatatttattgaaactaaatctcattattttacatgttcttttttaataaaaaaaacaa

SEQ ID NO: 184461 - DNA, 1867 bp, Cannabis indica
gaggaacagaagaaaaggaactttggcaatcaattagagaggctacaccaacaagatcattgaaaagtttgttatgaaaggctctaaaccaaccaagtagcctatgacaacatagtaccaagtcacaagcaaacagagtctgaaactatgaaagaaaagaaagagatggagaagataccctatgctattgcagtaggatcaatcatatatttgatggtatgtttaagacctgttttggctcatagtatcaaccgcactagtagatatatggcaaatccaagaaatgattattggcaagcaatgaaatggttaatgagatatttggtaggaacaacaaattagggaccggtgtacaaacatcaagatagagaaatcactattgaaagattcagtgattcagattaattatacaggagataagtatactcaaagatcaatatctgcatatcaatttttagtatgtggcaactgtgttaattgaaaaatgcagttacaacccgtggctgctctactagatggaagttgaatttatggcagctattgaggccataaaataagagagtgtttggattcagggatactgaaagaattaaaaatatttaaagacaatgtaatcaattaattagatagccaaagtgccatatacttgtgcaagaatcccatataccatgacagatgcaaacacatagatatcaaatactttttcataagggaaaaagcatcttaagggcaagtcaaagtaaaaaaaggtgcatacagatgacaatccaccaaatatgggaatcaaggttgtaactctaggcaagtttgatcattgcaaagacttgtttagaattagaattgactaatgcaacgttagataactctgaactccctagtggcatttgaggcttgttttagttctagtaagaaccgaggtaaaatttgttggattagctctcactagaactagtgccacatatgttcatccaaaccttatattcagttggtatttagttagacgtatagttagatctttagtttattagctgtcattttgcacttaagtttgttactaagcttctcaagccatgttggctatatatatatttgtactctcaccatatttagtaagttagagagaccaagattgagaaagtaaaaagctagagagagagggagtagtagatcagaagagaaagaaataggatttgttataaaactctgagtttgttcaaagaggtttggaacactttctaaggtatggtcattgatttgtaacagagctactaccaagtatcaaaattaataatggatgaattgaaccaatccaagggagttcagtaaaagagaaataggctcttcacaattgtgagggaaattatgcaatttgaggtatgtaattcgtatctagcattactactctttaattgttaagttgacacttttttttttgttatttaaaacatacatggatacaggtatatattacacaaataatattatattcactattaacgtcaatctagtaagctttaattgacaatttgtaattaatgtacattattagatgtcttgaacatagtttctaattaatttatggtgccattaattcgaccacaattattgaagcacagcaaaactgtaatttattgataagtctttggatcgataaagcatacataatgtagtaataataagttactatgttcccttcttttaatataatatttgttttcacaatacgaaacacaataacataacatatgcacttattactttgatatttcaaatgagacacactcacataataattaataaaggccactcttcactgtttgctaatcataatttcatgtaaatattaagaagagagaaaactatatat

SEQ ID NO: 184462 - DNA, 2973 bp, Cannabis indica
aaaattttaaaagccctctactttcctcacggcacctttttggaagcaagtataggccactttggttcatcggtttggagaagcattctttggggtagggatgtcttaatgaaagggtcgcgttggtgtgttggagatggctcttctattagaattaatgaagacccttggcttcctagaggcactcctttctctctccgatgtaaagtatctcttcccgaaggagtcaccatagacaaactaattaatgaagagggaacttggaaaaattctgaagtttgcagctgtattcatgttgatgatataccttgggtgcttggtattactccaatcacatcaagatccgattggttcacttggaacctaaacaatcatggtcaatacacggttgcaagtggctataaactaagatttacacatctggacattgctgaatgctcgaacaaagcaacattgaaggcttggtggaagtttgtttggggatccaagctaactcctaaaatgaaaaatttcatttggagagtctttaatcaatggctcccaacgaaagtggaactcacaaagcgaggtatggctattgatcctatttgtgcttggtgtaagaaggaaaaggaagatatttgtcatgccctttggtggtgtccaaagactcaaaggttatggaaattatttggggtcaaatatctggtttgtgaaggttatccctcagctccagatgtccttttttctctgtggggcaagttatccaagtctgaaatgctatacttcattggcttctcctggctcctttggcatcgcagaaataagtttctcttccaacataaagtgcaagaggaccatgcttgggtgaattgggtgcaagagttgttggatgagcactttggggaagtgtttcagattcggtctgagcaggaagtttgccccaaaaggtcgtggcaacctcctccccctgaccatgtattaatcaacacagatgcttcagttgttcaaggcaaacctgggtgtgtttaagtgcagtaataagagaccatgatggtaacttgattgttgctgaatctttcttcatactaggtctgttatctgtccaattggctgaggtttatgctattcgaatggggctgatgttgggtcaaagatggtctttaaagaaggttcatgttgctgcggactgtttgggagttgtctcagctttgcaatcttctcctacatctctttcggactggggaatgatggctcgggagattcaaatgctgcagaaacactttacttttgtacaattttcctttgttcatagagagtgtaatgatgtggctaatgccttagcaatttggagtcgaaagactcattcctgtaatttgtggacagttgatttgcccgactgtgctgctgccattttgttggtagagaagcctcttgtggctgtttaataaaagcatttttctcaacaaaaaaaaataaagaattattttattaacgttctggagagaataattcgaaatggtaaaaaataatttttattttattatttattaagttttattttaaaatatttgagtatcatttttattttagttatattttttcattctttctaacaaaaattcacttaatagggtgcttattatctgagtattagttgaaaatagtagacttttaaatgctaaatgcgttagaggggattaacattaatactatttcaatttaaaaagtgatattattgtgaaatttttttacctagaaattcgagatcggactcttatgaaaatgacgcctatacttactctcctcgagaaaagcggagatgtcagtgagagacctcttgagtatgaacctcgcctgaaccagactcggcgagatgatgtgaccatgacagagtctagttgtattcgtatggctcgcatagaataggaccaaggaacggtttaagactcacgtgtaccgagatatatgcgatgactctcgagatcctcctgcgagttttaaagatcgattctttactttgcgagctagttcaggtgacccaataatctcggtaacccaataagggcttgcatgccttagctaggttgccaactcattaccagatgtctgtgtaagcgacttaaataggacgcagacatcctagattcgattggtcttgtatgcatcttaagcttgcgagcttatgcaagaatatgaacagccaactcacactatagaagtcgcatacgttgttatatttagtgaattaagctgaaactgtccttcatttattgtatttacatttttattaatttaattgttgtaatttaatgtataaacggattgataatgaattcaatctctgtgtaatcaaatgacacttgctttgtatataaaggagtgatcctacatgaaatggacgagacagaaatccttgcaatagtggactaagcagaccgtgatcttactgaaccactatattctcttgtgttcttcgtatttccagtttatttccaatattttgtgttcttagttcgaatactcaccactctaggttgagtactcgcatattttctccctatattattactatatcatttattttagtgttgtctaaattccttaaacaacatttggggccgtctgtgggaacgaaatactttattgattttgaaggaaaatcactatggttggaaatgagacgacaagagataataacaatggatcaatcaatatcggaacaataaatgttccactcccgagggaatggaacggcccccgtcgacactatcaacggaggaggtgggacgaacaaacatcactcctcttaatctattccctgaaaccaccgttcaccctggagaaacatctacgaccggcagccacagtggggtagttcccgcctataaccaccgtcgccgtggtatctgaaggtattatccaagttgaccaccgcccaatataccgcattacaagatcaaatgtggctttgcaggttgaggtcgatggacg

SEQ ID NO: 184463 - DNA, 1966 bp, Cannabis indica
tttttcccttttctgacagaacaaagttatagacaaccttaactttaggaatttcttggagttagtgcctgaggtcagggagcttatcaatgatttctactcaaggtaatgtagtgctatcttgtaaaagtttaactatttactttcacctttcattaaacatgttgttattgtgagtcttgaacttgttacttcaaagttgctctgacatgtagagtattttaaattaagtttatgttatgtatgaatcaatgattcatgtaatgttttgtgtacaatatggttaagtgtatgatatgtaatgctataaagaatttgataaatcttatgtatgcatttgtgtatgtgtttagtggagattcttcaccagtgtaaacctagttactcaacaaggaaaagcaatttgttgtttagggtgtgtgtgcgcgcgcgcgtttagtggagattcgtgaccagtgtaaacctagttactccccacatggaaaaacaatttgttgtgggattctattcttataacatcctttttgccatccttgtaattcttcttctaatctggcatgaagaattgtttattgctgattttagtattgtggtttcactactattctaattccccctccccctctcaatgtagtcgttatgcatcatgtttggattaccttggcaatctcaaagcaaatctattacttgatatccatttgcacgaccatgttgacacactatatgatcaaatccggaacaaggctcttatccagtatacgcacccttttgtgtctgttgatttgcaaatgatggcaaatgctttcaagacaagcatttcaggattacagaaagagctggaagctttaatcactgataatcaaatccaggtaattttataaaaatttcagacttgtccccttttttgggcctgtctataccaatagctgctcttgttcctacttggcaatatgctagagttttctgcctagttaactaaagtggttcccatttgtaaaatgttcgattttcttagggctgaacatgaaacttaggaacctttacagtttgtttaaaaatatatagtattcaaatttgcttcgatcacagcagatttttggggccttgtgctcctaatggattgatacttcactcctactttatgttttgctaagatgtgagctcaattatcccataatatgctcctgcaggctcggattgattcccacaacaaaattttatatgctagacatgcggatcagagaaatgcaactttccaacgggttttacagacaggcggtgaatttgatcgagatgttagatcaatgttgctcagagcaaaccttatcaaacatgatttcaatcttagggcatcttcaaggaaactataaatttaagtttcatttgcaagaacgtagtttgaaagtacagaatatcattttgatatgaaagaggtgatacattcatttggtgggtcaagttatggagcccaatacttttttagggtacccaaagatggattttgcacattcagaacaacacagatcaaaggcaacagtaacttgtatccaatggttggatattggtttttatttcatcaatttcatcctaattcttaactgtactggtttttgcttatttttatggtacttgatgctgatatgatttcgaatcctaaactataggtgagtgcggtcaattatgagctcctctggggtttgttgtgtgtatatatttaaaaggtaggagttttgctttctcattaaaaaacaaagtcagcgatgtgattatgaagtacccgggaaagaaaaaaattaattatggattatgatctttttagtttcttttgtaaaatgttcatgtatagctaacttcacttaaagacaggatagtaacgtcattaattgcatacttttgtggaatgttgagtatccttttcaacttcaatcacattaggttaggttaagccaaaaaaaaaaaggaaaaa

SEQ ID NO: 184464 - DNA, 2567 bp, Cannabis indica
aaaaaaagactcacttatttaattacgaaaataccctcgttggacctttcttcacttcgtctctttctcctcttctgcaattgtgttaacctacccaccaccacccccaaaatcttcgtgtgtaatagagaaggagaaagctatggcggtgtctggagatttgagggtctctgcaacaatctcttcttatcctttcaagcaccacaatttcggaaactctcttattcccccttctaaggttttgctttcttctccttttttcatttggatttactgcttcaattctccaagttcttacgcattttattaaaatgggcttcgtattttggcattaatttcttccaccataattgggtatttttcaaattttgtttaaaatttgtgtggtgtggtacatgatttgcttgattgtttcccggtaaaaacccagactttactgatacagtatcatctaatgcaaatctaaaatcgagagggaaataagtgaaattgtagaagatgggttgaactttcttaaaatgggttagtaaagttactctctcatttgtagagaaatagaaaattttgtgtgcatttgctttcccaaatgctgtttgtttcttcttaaaatcccaatcttttattattattattattatatacaatactaataattaaatatggaaaattatactttaatgcaataaattttagattttgagaaaaagggtagttgttgaattccataatcttaatagttcgcaaaaattatggagtgtttgaaaaagttcgcacgtcaacaaagttagggaacaaaaattctaattaaacttgtttaaattttgaggaataatgcaataaattttacattttgagaaaaagggttttatttttcattgtaaaattggagaaaattcattgaatctaacaatttgtttagggagaattttttaggaactgaaaagttcagagcatgatttggtacatgacaaaattcgagtgcaataatcttaattagccttgcttttgtatgtagaactgtcccaattatttttttttccctccaacgttgggaatgtttgaatgtttaccatattatgcaggtagcatttaaaggtttaaatggtggattatccactaattccaaagtccttttcaaatggccatgtttagatctagaagggaacaatttaaagtgcaattatcaccagtcatttggtgtttccagaaacaataatctttcacctgaacctgcaacacaagaaaccgaaaatcttatcctcaatgctgtgaatatgaactttcttgagcgtttgaatttggcatggaggatcttgttcccatcaccaactacaaaaaggaaaagcgttgcaaacattgctaagcaacggttgaagatgatactcttctcagatcgatgcgctgtaagcgatgaggcgaagcagaagattgttagcaacattgtgggagcactgtctgattttgtggaaatagattcacaagataaagttcagcttagtgtctcaacagatactgatttgggcactgtgtactcagttacagtcccagttaagcgtgttaaacccgagtatcaagctgtggatgagtatgagaatgggaccataacaaatgttgattacaaagacaatggagaagcatctggttctgttgatgttacctttgatttcttcattcctgatgaaaattctagtaggtattaagagtcaaatctctcttattattacttgtttgttgtgttagtaggtgaatgagtttcattgtatgccaagccaaaaaagaagaaacttcctgagatgtcattgtttgtttagcttcctgagttttgagactagctttttgtaaatataaattttccttgttattttttattgagaatatatttctgaaaaaaatctacaatacaccacttaaaataggtttactgccctttatatattttggtatatgggtgaattttttagtttaatttttttatggtcttttatgttataattatttttcgatattttataaaattttgagaaattcaaaaaaatgtatcatgccgaaaataaggtttaaaccgtttatttaacatgcgtataaaataaaagagtttcgtatacaatagactgtttgaatcttgtttttgaatttttcaaaattttacaagatgtcttaaatagttacaatgtagatgatcaataattataaatagtgtgtactaaaataattggtggaacgaaaaaagtatattaatttggagatagtagatttttctttttgtttatcgacaagttccttttcaagggtgcattagaaaagcattgttatttttttgtggtttaatgtagcaccaaaactagaagaacaattttattaataacaaaaaaaattggggatagattttgagatatttgtaaagtattgctaacttagtaattaaaagttagtccaaaagtaggtattatataatacctaatatgtatgtatatagaatagatatatatatttgtttttttcttttccttctttacaaccctcgaacctttggcctcaaggcaaagtgtcaaagactctaccgtcaa

SEQ ID NO: 184465 - DNA, 3643 bp, Cannabis indica
aaaaatatcaccatacctccaacaaaaaaaaaatgtttgccaaaaatgctctttctcaactatttaaagctaccatgtatagcaaagcatctgtttatagggaaatgtgctacatatggctcttcctatagtatacatccctctccttatgtacattatttcaacatctatatgtctctctgttttttctgtgtcaggatatacgcctttgtctctgcgcacttttacccatatacaaattaacatgtactcgtgtgtgttcaatatttaatagttatacgtatttcttagttgtatgtatatatatttctttttcagataacagaaacatatacttataattagtaggatacatactgtatacattatttttaatattttccaccatcgaaatttcatttttagcataaacacgtgtacgtttatgaaagcatttatagggtaaatttgactgaaaatttaactatttcttgacttatatcatcattctatctaatatatatgaaagaatcctatgtacaattatatttggctagtaattaaaaaagacatataattgaaagggcaaacatacatacccccactcttccatatactgtcaacaaagtctgcaagttcatacataatcccttacaattacattaggttgcaaatcaaacgcattctaagatatgttgcaggcacttttgactttggtttgcatcttcaacaagctccttccttggacattgaagctttctgggatacattacatacatagttttctagaataattatctttcataaaatatttataagcatttcgagctaagctaagaattaataatgtgtgcatgcagcaaatactcaactatttcacgtacaaggctgtgaggacagttatgaaccaactttatgagatgaatccgacacagtataggtggttttacgagtaagtaaactttagctggtttcattttacctttttattgtaatctgtttttagaacaacatgtaatgtaggttatatatggtaagaatgatatattatatttatatatatataataaatataatgtcttttattgcttgaactctcaatattttgaacagttttgttttaacaaacaagcctggtggagatggtaagagattccttcgcacccttggcaaggtaactttcctattcttcaagactgtaataaaatgtacaataatatgccatatcatttttataacgtgagtttataataataataatgttaaattatttacatatatatatattaatgtctcaggagaggcatgagctcgctgaaagggtgatggtcacaaggcttcatctctatggaagatggatcaaggtatgaatacttgattgaaagcttttctatatgtatttattgatcaacaattttggctaattagttaaattaaactacaatattttgtttgtttgattgtgatatgtagaaatgtgatcatgctgaaatatacaaagagatatctgaccaaaacttggagttgatgcgtgaacgtcttattgagactgtgatatggccctcagacgataccaacacagaaaagattggataaaagaggaagaagaaaaaaaaaggcttatcaacttcaacgtattttaaacctttcttttctttaattgttccttaattagttttaggtaatttttgcttcaagagtttggccctccatgtatccacattgtctatcaattaatacaaaagtgttcctacttttaatgttattattgtactaattcgtaacttgtatatatgcatatgatgttaatatgtgtttacaatcattttaaagctgtgcatatttaattaacttgcgagtttgaccacactaattaattatgatgttaatagataatgggaagtttaaaatatggtcaaaattgatcaagagcttttgcttttggtgcaatggttgattattttacttttttgcatgatgattaaaatttgtaaagaaaacaaacaggtgtgaagtcagagtatttgatttgaatagtattgaacatgcattcaacgtaataataatttgatgtagaaaagttgctaaaagatgttcctttgtgatgtttatattacatttaacaactatcaagctatcaaggcttgatagaattttagtaactagaatgccacgtttagagtaattttatcaaaaaaaataaataaataacttgtgtgtttgatgtgattttttcagatatatatatttatatatatactctaagtgagactagcacatatattgcacgtgcctaactcttcttctaccattttatttatatttttgtttgcttaattttcattttgtatataattacagctaaatttatattatttcatttttacatcttaattgtaacaaaaaaaatgacaaaaataagttcattttagtaaaaatatttttttcgttaaaataataaacaacttttttttttgtagttgttatgagtttgtatttttctttgtttttagtttatttatagctgatttataattgtcgcgagattgatttctcgttaaatttttagttgttttcttacttttgctaaacaaattttatttttgtaattttaaaactttacaagtgtattttcgcaaataaaaattttaggccgtaaaattgtaaataaaacgtaaaaaaatcatattcttaaaaattacccttatgataatctcgacaatttgatcattttgccaaataaataaagggaaattatagtaaatgaccccaaatcatagcactatataagttagtttatgtcctcatttcaaaaaaatatagtgaatgaccctaaatcataagactatgttagtaaatattctcatttaaaaatcattaattttttttttttggaattaaaaacaaattatttaaacattaatttataaatacttaaaatgaaaagaatttcaaaaatatggatttacaatttttttaatatttttgcgaatttattttatttattttttttttttacaaaagtacctgaggttatttttcaagttgacttttcataaaaaaaaaaaatgatatttgttgttacattatattattgtagcatgttcattaaatctcgtagtttgggtattcaattattgtgtaaggtacgtgactgcaaaattaacaatctcttcagtcgcaaagaacttgatattaccaactactaacaatgatatgatggcgagccatcgaaaaataaagaagaaccaagaacgaatcaaaacaaaataaaagcatgtcatatagacatgactaaaacactcaaaatcatgtcacagagacaagattaaaacactcaaaagtatgtcacatagacaaaactaatagtaaaagcaaaacccagacccggacccaaacttggacccgaacccggacccagacctcgactcgaaccccggacctcagacttggacctcagaccccaaacccttgactccgaatcccggaccccgaccccaaccctgtccccgacttagaccctagacccgaaccttgaaacctggaccggacccggacctcgacctcaacttggacccgaactctgaccccaacctggacttgaaccccgaccccgacctggacccctgacccaaaccccgaaacccaaactcggacctggact

SEQ ID NO: 184466 - DNA, 6879 bp, Cannabis indica
ttttaattttgttttgttttttcattctacttttgaataatttgtagctttctggtttgtatcaacaggaggctgcccctagtacggacatttgtgtacatggtcggcatttggacagtggcgtgaacactatggatccagtcaatggaggcaacagtcttaacaatcctagtcttgcctccaaacaaaggttacgttggacgcatgagcttcatgaacgatttgttgatgctgtggcacaacttggaggacctgatcgtgagtcacactcctatttgcttcaaggctgaatttttacaatattccccctctgatattctagtaatgtcatttgtttgctggtttttagaattcattcagttatgcaacatttaccaagatgatttgtatttgatatatgcttgagcaccatggtttagaaagaaggggagggggaattgtttatatagtatggtagagatcagtgtcaataattatgaacaaaatggtattaataattttattagatggactaaatctctctcttttccttattctttccaggtgccactccaaaaggggttcttagagtaatgggtgtacagggtttgacaatttatcatgtcaaaagccatttacaggtaaatatagtcaagtgagccattgttttttgtgaaatacttgatttgttagacttagcatttatgtcttcttctcattgtttatttgatttcatttcacttttgtgatgcatccagaaataccggcttgcaaaatacttacctgagtcgtcatctgatggtatgtgttttttattcagttgtttccttttatttccccccatccctggtagctgatagattctattaattattacatcatgtcctaaatttttatgcattactgcaagggaaaaaagctgacaagaaggagccgggggatactctttctaatatggagggttcatcgtaagtgtagttttattttttgctatataatatttctgttactagtcgatattatggatctatcaagccttgcctttttatttagagtttatgatgaagaatcatctgattaaatatgtggtcatgctattgcctggtctcacagataatgacgtgtaactgagctaggaacatgaaaccatgaatgatgaaaatgtattgtttgatatttccaaattatcagttgacagattatgtgagaatgtatttgctgttcttagcagtgggatgcaaattactgaagcattgaagctgcagatggaggtccagaagcgcttgcatgaacaattagaggtttgttttcacttttcaattaatcaatagtacactgaaattgttgatttattggctttttttttattattattattgcctatataaatatttataacaacctcagatgaaagcatataagtttatgtcaatgcacaacaacaggtacagagacagcttcagttacgtatagaggcccaaggcaagtacttgaaaaagattattgaagagcaacaaagactaagtggagttctttcagatgggcctggtgtgggtgataatggcccagaatctgacaagacagaaccagcgacccctgctccaacatctgagacacccctcgaactcctagacaagactgtcaaggaacataccccagctaagagtctttctgttgatgaatccctatcatctcaccaagaaccatcaaccccagattctggctgccatgatggttccccagccgagagccctgaaggtgagagattagtgaagaagcaaagggttagcatgggtggagcgtttgctaatccagatttagtgcttacacaccaaatattggagtcaagtttaaattcttcttatcagcaaccacaatctgctttcctggctggagagcagtttgaatcatcaagaaatactgttgggaatagtgatcaactggaaaatgtcacagccggcaatctgtaatccactgtcctgagtagcgctgccttgtatgagtgtgttaattatgtagagatgtcaatgatcagatcaaatgatgctgttaatcatagatgttttgggttaactaggttcaaccaatgcacattcataaaatgtaaccaaggttattacatgggagagttgttactgtgaacaagggtaagaactagttcagttatctactaacattatataacgttagatcttatgcttaattgttgtccaaaattcttgatattcttcggtggatgatgtttgactttgaaacacgtttgagttttctgtttctgtgctgagttacaatctcaatttaagtcattgttggccatcccattgcagtagattctctcaaaaatctcatctatgctttacaaccctcaagagaagattgccagccataataatatctcagctgattcaatttttttttccttttaaatttattctaaaaggtgtgcacacgaaggaggaatgcacccacgtctcagccgattgtagaactgcatctgatactaaatgggacatcaggagttaaaaccccaaatccatataccttaaaacaagaccaatttgaaataattaaacccaaggtgggcaatacaattacattgatgacattgacaagacagaagataaaacattagtaaagtaagaaccctcttctcctacacaaacagtcatgttaaagactcttctactacacaaacaatcatgaagaacgatgtctccgatggttaactctcttaagaatgcaatgacgtagtcgtctactaagtgcctctaatttctcgagtttttcactcttaggcttctttggaatggttggtgctttcttcttcttctcctcttttgcaggtactgacttctgctgcgtggtacttcgaagtggcgttgcaaaaaccttaacggtcttcaacagtataagaagttcattagaaaattaaaccaataaagtgagaaaaagctaatatattcagagaaagaagagaaatacctgatcaccattttctgcagttgtggtgcaatctgcagaagattcttcatcactgcctcccaatgatgagcatctcccccaactttctctatttgagctcgtatatgaacaacattcttcattttgggagtctatcttttcctgtaaattcataatgagggaaatcataagaagcaataacatggtgagactgagacctacagctcactattagcctccttccatggtcatcaagagtccaataaccattccctattttagaggaattaatatttacatgaaactaattatacacagcttatttttagctttactcaagtacaattcataatttcctaggttagaaaaagaaaagaaaagctctagagctgtgaatcttgaactcaacaatattgaatccatgaacatttggatttggagggtgaaaagaacgtaatataacctgcgattgtgatgattcatgtctgctaagagcattaatctcatcaagtgcagagtcctgtatgaatcatgatagcatgatatttcagcataatgtaaccataatggcatatagtaaatgaaccagaagagaagattcatacagtagacactggagcgatattagaaagaagtttatccaccgattctacagttgatatgatgggaggagcagaagaagaactggctgcatcagtaccaactgaacgaacaccagtgattatctcgtatagcaaaccctgaaagcaaagggaagaacaatcatgcaataatccaaaacttccacacatgaaattcaacatttgtggtcactgtgcccaccctcaaaatatgacacacaaatagataccagagtttcccaactgagggttttcaagtattattgtggaactttatgaagagaaatattagctaacaactcacattaaacataattgacaagcagaagcagttcaaattattttagtaacaaatgacataaaatgggaattacctcatccataccaacaccaactttcaaatcccccaaatcgtaatatttctcaggcttacatgtaacagaaggtatttgtggtgggtgaagaacattgtaaaaaaaaatggatactgaatcatagaagaactgaggtcgagaggagttgtgatcaccatcaaagtaaataacgtttttatcaccctgcataatatcagaaatacaattaaatcttccaaattattccaactgaaagtgttcacttaatgaaaaattaaaggattcaaattaacggagtaccgaatatgaattatgtatgatagtcgaatgtcgggattggatgaatttgtcatcctttgcatgtccaaataatgcaggaatgaacgtcttcggtgccacctgctagccgcaacaaataaccacaattagttatctagtttaattaaattataatgaattaaattcagggatttcatgtttttaggaggcatttcgcatagacatacctgtaagcaattaagatccataatatcaaactttgccttcttctcaattacccgcctcatgtactgcactgccattttaatctaataaaggagaaaagaaaaagcagattaacaaggattggaacatgaacagaaattgaacaattttccaagacacaaaatccgtgtcttgcttgctagcttaatatattgagaagatatgaataaacagctgcaaataaatagttttagaattttgaggtgagaggaagagatatttacagtaaatttaggaagccggattttgtacacatctacaagttccatcatcagattgtataaatttgaaaatgcactatccaacaccattccagcaatggaagggtcttctgctccataaagaaggctgcatcacattccataaaaaccaattatcacacccaaaaaataaaaaatagatggtttaaaatgggaaaaataattattaatcaatgagtaaaatgaagataatttctgaaaaagaaatatatctagagatatttgaccatcaatcttgaaaaccaagaacaagcaagtaaaaatatattacttaaaaatcaattctatataccaagatgggaaacaaatgaaatggtacatgtcaggctgtcagaaaccaattattatttttcttttttgtgaatttccgtaagttcgcctaaaaaacacgatgttgagaataaagtaccaggtaactgcacccatggatcgcccccatagacctattcgtgaaatttgtttgttgcttcttaaatgcgatacaacaattttgagatcatctctctgcagagagtagtgaaaatttagataatcaatagacaagaaactgagaaatgaaaaaacaaccaaaaaggaagaaagttttatacctcatgccaaccgaggctgacataatcaccatccgataagcctgaacccgaaaaatcaagagtgaaaacagtgatatttgaaggaagaagaattacagcagcctcatttgcatctgcccggcatccactgcattgtttatgagaaacataataaggttctaaattgtctatataagacaatgattaaacagttcacaacaaatagaagtttgatttcttttacaaaaagctgcctaaaaacacacctgtttccatggcagtatataacacaaggaagagaagcatcttcaggtaaatccaaaggcaaataatgactacatcgcaacacatggccccttgcattcctgagctgcaaatttcgaaaaataaataaccttttacgctcagaacatactacaatagaaatgcacattgatgaaattcaacaaagacaacaaaagactccaaaacaatggcaactagtccatacttgcctccaagtcttgccgtttatatgttcttcctgcaagagaaaaattattttcccaaagatactgatctggattatactctgccctgtacataaacaacccggatgaagttaaaattaacatccaaatcaccaaagaaaagtttaaattgttaagaaaaaatataacttaatgttagaggccaaataattgactaattgtcctttacatggttcatagttgagacttttaaattaattagtgtgcattaaagaacaattacaattgccttaagaaaaaaattaaaatcttgccttttatgggaaatgctttagtggggaactaaatttccttattttctctttctgagtgaaattatcattcaatattacgcgtggaaaaacagtagtaatatttgcaatccgaattgggtaaaactagataactcttaagtatttctctgtcacaactctaaaaatcatttgatgctaagcacataaaataaatacttaaaaacatccaaattatatgaaaacgattaatctcttatgaaaatttacttttggcttgaaaaaaaaagtacatagaagaagtggaagaataaaagagcagaacaaaatgggtacctgggcgggcgaatcacaaagttgatgaattgatcgatcatttttctttagaaattcgtctcatgaaaattttaataagaagaaaaggaagaaaaaagaaattccagaaaaatcttctgtttcaactccaattatctgccattttcacaaattaggaaccttttttttatccccagtccaaatttccaacagtaaaacaccaagaaaagcttttagctttgagcttgagttagcaacaccatacatagaaaaaaagtggaaatttttgtgtaggtctacaagcaagatccaataccctgaaaaggaccatactaaaaagctgcaacccttttttaagaagaaaattatagagaagagaagacctttagaactcaaaacaggtggcccccactaccactacttgcatatccaaaatttcccagatctccaaaactttcacagctaatttcttgattctgggtttccttctccattttcagagaaaacagaaaaatggga

SEQ ID NO: 184467 - DNA, 1790 bp, Cannabis indica
ccttaaatttgttataagttaataatttggaggtttttccacgaaaatttgagttgagttaaatgatagtagaataattgttgaaaagatttatttgaaaaaatctcttttataaaagcaaaatgaaacaaaaagacagacacactaattaatcgaaactacgtcgtttacttgtaacagagtcagatccagcagcaatcaattgaataagatggaaaacagctcactcttcctctcgtcttcaccaaattcattgtctctgtcacccaccaaaaccactcctgccgctgactgtattcgaatcggagctccgcgcacaacaacggttctagcttcttctagggtcgaattcccctccattcgcttgcatcactcccgatccccactctcccctctgtgctgcaccggtaaaatttcgattttaaccgttgaaataacttatacctatttctgtattcttttgccctacaaatcacgaaccagatttgagagactaaactaatgtacagaccagggctattattgtcaataacaataaggtgacgtttttttagggcatgggcaatctggtcataacagtccatatataatatatatgtctgaactagcaaagagaaagcacacacccccgcctcttttttgttttgtttttgttttccatccatagcttctaaaagtcaatctgagctagtgaggggattttgatttgcgcagcgagcgagtctgtgaaggaagaacaagaaatggctttgaaagatggtcaggacgatcgcatagctagaatttcctctgccattcgagtaatccccaactttcctaagccaggtattttcctactccactgttatcgttctcgtactcctttttatttatttgttcttgcctgccttcgcaaatccgtatttaggcttattttgtttctcgggtggatgtgtgttggggggattgtcgatttgtaatctgggggcattgggtagttcttgttttggtgtttaatagtctgtgtgagtagttatgtttcgtactagtatgagttgtggcctgacttgttgttttcagggattttgttccaagacatcactacgttgcttctggataccaaggctttcaaagacaccattgatttgtttgttgaaaggtacaaagacaaacgcatctccgtcgttgcaggtagttttaataccgtactactttccattaggacttttacaaagcttgaactattaatactttcgcttaccttttatttccacacttctcattattggttcctttcccccaagtggttttatgctcatagaaaagataatgttctttttttttcatgataaagaagaaatgataactttctttacattgtcatataatgcatatcatagctattaccatacgtggcatcaagtaacttaagagaaaatattgcactaacttgtaaacccctgggtctggtttagacgatgctattggtaaatttgagcttctatgcttttctaatatgcctttgcctgctgaataaacatgccaaccttaataatttttgaaaaaatatgtttttgttttaaacattagacaaaagtgcctcacccattaatagcctcacgactttctcaaactctttttctctacaccaccttcccacgatggcagagcaccacttcatcgctatcaccctcattaacattgtcctggcctttgatgccaccacctcccatcaccgttgaagcaccctatcaaaacaccaatatgtttgtttttgtttttaatcaatcaaaatcaaatccaaaacttaa

SEQ ID NO: 184468 - DNA, 7888 bp, Cannabis indica
ttatttattttaaataataaaaataaagtatttaaggtaaaactctcttatattttttatacactttaattcttttatttttttttgtagcaaaattcctttaagtttattttttaaaaaaaaatttagaggcgtcgactaaatattactgttaaatattaacgggataaccactgcgtacacctttatatatacgtgacagtaaaacttcaaagtcaatacagtggtaattaagttaatatttaacagttatatttaactagcgtcttaaatttacaaaaaaaaataaataaataaataaacataagaaggttttactactaaaaaaagagaaataagagagttaagtgtataaaaataaaaacataagggctcgtttgatacgccgtatggtaatgtattgtattgtattgtgcgtggattgtgttgtattgtattgcattagtattatttaatacaatacaatgtttggtattgacttgtattaattgattgtgtaaagttataatatatttttaatacactcgatcccaacaccaactacgggtctgagtccacgtcctaggttccgggtctggggtccaagtccgggtctgggtccgtatccgaggtcggggtcggggtccgggtccgtgttcgggtccgtgtccgggtcccgagaccgggtctgtgtccgggtcccgagaccgggtccgtgtccgggtcccgagactgggtccgtgtccgagtctgggtctgggtccgtggtctggggtccgggtccgggtccgtgtctgggttcggggtccggggtcggggtccgagtccagggtccgaagtccgagtccgggttggagattggtgttgaccccaaatcctttgtaaatattataaaacaagctaatacagaccatttattatgtataaaataatacaacatacattgtataaaaaatttagtcataataattaatacaatacattgcttaatctaaacatagtgttatttattatttaatacaatacgatccttatacggtgtaccaaacgagtcctaaaagaattaagtatataaaatcaaaacataagagagattccccaccaataatcctaagaaattccacttctttctttccttcctatttataccaaacaaaatatcaaatccatcctctctctctcttcttacttatcctccctcctacataatcaatctctttccatttccatcctttcttaccaaacagagccttaaatctaactaagactcggacacactctctctcttctcttatcactcccaaattgaatcaaacccaatttcttcctctcacagggctctaatggcttcactttcaactcttcaatggtttcaggtaagctcaatattattattaacacaaagggtcgtccccaaaatctctcattgatctcgttttggcttttcaatgtagccctcgatttctggttcaaacttttatctagtggtgttcagacctgaatttaggtcaagtaatgctcgaatcacctgcaactcatctccatctttctcacccaagtttgtattgagagccattgatggctcagcaacctctgccagtgctccccgagatgaggtggtgaagaagaacaagattttcaccaacaccattgccaaattcccaattttggtaaaaaagaagcctttttttttttcttgtttttgtttctctttcttatttttaattttgtgaaagaaaagttttgtgcttttggttggggtttatgtgtagatgagacaacaacaacaagtagtgggagaatccaattttgctatcattgggttttgtgttgctactacatttttggttttggctgtgaaaatctttatggttatgaagtcaagaagagaaaatcatcatcatgctggctctgtagctgatcttgtcagacgtggtcagctgaggtctgatagaagaggcatgtatgaaatttcaatcctttgataccttaatatatttagtcctaatgtgaaaaattaaaaccccaagtagaataagaagttataatatcatatgctcaatgatacaagtttagggtcacttgtcttagactgaacccccctcgaatttattgaaaagctacccatcaatgttttccactctacgtaaatctagaaaacagaatttctgaaaattcttagggcgtgtttggaaagccgaggaggaattagatttgggtgtaattagtgataattacacagttttgcatgtttgtctgactatgtaattaccctgttacagtgtaattggagataattgagaggtttcaattacactctctaatttttatggcttcctatgagaatttgtgcaattactaactttctattttaaataatagttactaaaaatgttatttttatgaataatatctcatattcaaacacacattaaaatatagttgtaattactagcccgtgtagttactatcttaataattacacgactaagtaattacatagtgacttccaaacacgtccttagtcttaaagacacacttagctgtcccgaatcctatttttcccacaaatcttctgctggagattcaatgcttacttaccatcatttctgatactaagttctgtttttgctcttgttattgtcaatgcttgtttttgtttttgtcaaaacagaacaaggcctctcaagtatgatgaccctttcaataatccaatggttaaagttggcaagagcaattcaactgtagaaatgtgtggaaaagtgtaccgcttagccccagttacccttacagaagagcaacaatcggttcatcagaggaggagatctcgagcataccagtggaagagaccaactatatttctcaaagaaggcgattcaatacctcctgatgttgaccctgatacggttcggtggattccctctaatcatccttttgcaaccactgcaagcgacattgatgaagatcgagcacaaaacaatgtgagacaaaagcgtggtgttccatttcgtattcaagctgagcacgaagcgctgcagagaaagcttgaagcattgcagggtgtaagtatagtaatctcatcatctgtagtttgatgattagtatgaaaattggtcatgaaatggctgaaatctgtttctttttccatgttaggaacaaaaactgaacaaattaacaatcgatccaagcaacgctaaagatttcgagagagcattcaagtcacatccgaagtcatcggaaggtggagaggaaagctcgttgaatgaacatacaggaaactcacaagaacggtcctcaaattcatcgccatcttcagaagaaatgcaaaaaccatgagttgtcatatcttttttctggcgaaacttttaatctttatcgctatctgtcaattttgatctttataaggcgggtggttcgaatatgtcaagggtagatttgtaaatagggtgtcgtcgtagttcatatttgagacgttgtcatgtacatttccttgtgtttcttatttccttttcccaaagacaacttgtaataatagtctttttccatctgtttgaatctccaaatctttttgtttcccttatagctatgtctatatgtatatttaggcaagttaaaagtgtaaaaccagattgattaacacttacaagaaaagaaagctactttgatggattatttagtaactactttgatctccataagcagcaacaaaattcatgaagttgaagttgaattatttattagcttagctgagttgggtagatcctgcaataagcctctctcgacccttcctttctcatgcgtctttatgaaagcctctcacctttcatgattcggtccatcatcatctactcaatcagatctttgcttggcgtttagtggctgcagaattcgaccttttagtggcgcttttttggctgccaaagctgaaattttggctgttttttttggttaggattttggatttggatgacagaattgtaatttgaagtccattttgtcaattgttttttacattcaatggttttggtttcaacatcaataccaattaatatgccatttagaagaagcagtacaatttggcaaaatcaaaatgacatcaatcaaatttgtctcatcaagaaataaatattatgtatacaaaaataatagaacattgaggaaatgagtttcttaattaagaacatctagctagctagtattctaccttagtcatcatcatcatcctttaactcttaattaactaagatcaattagtatcatcatcatttcatgttgctggtttctgcagcagcattcgaagcgagattggattgcttcatggcatcaagaacgagtttcggaaacttgttcacacagcttggagatacattttttgttgctgatgacttagtggacaagtttcacaagaagttaattaaatttattggattaaacccggataatccgagttaatagatatacaaataaaagagggaaatgatgcttttccaatctctctaaacatctttttctctatggaatttgagctgagccactttaagatggtgggaagaatctgttgaggttgaatgggagagtgtaaaactcttcatttcggctgtctcctttaaacgttctgaacttatcccaccatggcattcccctatctctagctccgtccttgtaatcaagtgtgttgtctaagaaaaccgaaacgatcaaagccacagttggtgatgagaagaagatggtgttgaggaaatcattccactgcatttgacaaacacaacacataacacaatacaacaacttaatttcgaaccatagatgagaaaaaggaaagtactcgaaagaaagagatgtttgttctcacccatccagctcgtgtgtgagaagggccgtgaagagcctttgcagtgtattccctgaagtactcgggaatagacagccctaagaagagagaaacgcctgtgatgaaaaggttcctcatcgagttcatgtttgtgaattgtaaaaacgatagccccaccgaagctggatgagagtgacaaaaacaaaacagcgagttagttcaaattcatcaagctgagacaggaaagaagcggggaaaagccttttctacgtaccaacaagaccgaacaaaacacagtaagcagcagcaaacatggtgaagggtattgatgcaaacaatgctccaaattttcctgccatagatggacaatgtaatacatgaagttagaaaaggcgtcatcagaattgtaaattcaacgcctttttttgcacgaggactaaccgagcattgagaaaaatatcataaacccagctgagatttgaataaccctgcgacttccaacacgagtacttccaagaaggcctacattttctctgttgttttaccgaaagaattagtctcaattgcattatacaagacttaaaaataaaggaaagaattagtcatgctcacatggagaccgatgagccagtcaacgtcccaaagagaccgttaagaaggattcctattccttgccagccaataccgcggctaaggacatgagctggtggcggtgtggcacttgctagacgcgatgcagctttgtatgctccggttgactgtcaaaacaaagattattagtcattattgcctccaaaaagtattcttctttactacatttgtgaacttttagttattaactacctcaactaatgagactagaacagcagccatcattccgaaagcatgaccagcatcaaatgtaggagctccccattgaagagggtatggtatctttatcctgaaaatgaatatgtcaaacataggtattcaccgaaaagaggctattttcgaatgtcatgtctctactactaaccatggcgctgaagaaattagattggctcggtcagttctgcagttgagttgggttagttcgggatgatgtttgtatgcaccactagctgtcaagaggtgtgcatacgcccatatcactatgatcgatataagaaaggcgaatctttcgagtaatggtagatctctcacgtgaaagttcttcaaatactgtaatgtattgacagcaaaagcaaacggttagaaatgggattcaatctcaaaatcaattgggaataagaaaagtatgctcatgtccaacatattgtcaatgtgggactctgtaacacaaactgaacaatatacgcgcgacaacaagtgaaataaccgacacatcttcaatgtgctactctgtaacacaaactaaacaatatacgcgtgacaagtgaaataagcgcacctgagagaaagctacaaataggagaagcatggggataccgatttccacacaccttccaacctgaaaggaattaagagaaaccaatataagaagccttaagacataaatttaagcactaattgagaagtaatgtgaaggagtattttgttaagtattcgctactaaccactgggaaccctctatcgaacaaaccaaaacccgtcaatgcaatcacaggggccattccaagcggactaaagaatctgtagacagattataatatgcccacattcatcaaccaaacaaaaatcaaaacttaccacccatgtaatttcaagatagataaaatcttacctggaacagatagcccaaatctgactatatccaaggataatttggatgcttgaagctactatcaaagcaccttgtactgctctcattgtgttgagaaatctctagaataaaataatacactagaaaagtaagtacgcttccttacaacatagatagcatagctaagaattaattactacaaaagcatagtttagtgatcaaggaaaaggaaatgccttattcaagtataccaaaaattttacttactacaaaatgtactagaaaatttagcttccttagaacacatagatagcatagcaaagaattactacaacaaaaagaatactttagtattgatcaaggaaaagggaaagaatacttacaatatgagggtcctcaatactagccaatgatgaatcatgaatgatagatataataggtaccatgaatgcatatgatcctccaataacagtaggcaatctagttccaaatagagtttgaagaagtgtattaattccttctacaaacagtagagtttgcactactctcactttatcaccctgctcaaatcattaaccaagttttaatttcgatacatcaaacttaaaaagagtaatttgcagcataaatacccaactttaactctcggttgcagataagtacttaagtttaaagtattgatatgcaaccaagagagttaaacttacatattttacaccacaaattactctaaaacttaactttaaaacttaaaagggaataatattaactcacatcattaccacccatgtaaggaacaagaaaagaagggatcataactgcagttcccaaagccaaaatatagtgttgaaaacccagaaaaacagcctcccctaattttcacaaaacaaaataaagatcacatttttattagcaacaaacaaaaagccatcaaaactccataactttcataaaaaacaaacataccccatgatggatttgagtcaatacaatactccaaaccttgaagctgatccattggtggatgaataacctcttctggtttaggagctgccattgcttatcttttttcactaaatatacccaaaagggtatcaagtaaatgaatcaaagaacagaatagagctaagatagatacagattcagagcttttcttttcttagtacagtgaccaaatctaaaagtatcaacaacaaaaaaagtgaaagaaaaaagtgtatgagagagagagagagaaacacacaaacactagtctagtcagtctagtgtgaacacaagcttaaaaattaggacttgccgcccactaaataagctgtgtctttttttttttcttttta

SEQ ID NO: 184469 - DNA, 5318 bp, Cannabis indica
ctccctccccttgatacaaaacatcttgaatgctagaaactctagcatttttagcaacaccatccgtaaaggaattaaaagtacgactgagaaagaaaaatctataccgcctgaggataaggccttcactgccaactgagagtccgagagaataagaatctcttgccatccattcgaaatagcccattctaaagccatctgaatggctttgaattcagcttccaaagcagagctcgcttgagacttctgagcttttacaaaccatcttttctgagctttatcgacacaaactgcttgaagacctgctgcttcttttttccacgatgcatccgtgtagataaggcaattaactctagcctgatgaggatatactagagaattttgttctgcactaatatcaggatcatgagaaacaataatcccagcctcaccattacttagcacagcattcttgatctccaaaacagccttatcgatcttcaaaagtgttgtggatggatcagcagcagcacccctgatgcaagaggcattcctttggaaccatatctcagaacaaagacaaccaacataattgataagatcattcctgttaaaatctgacagatcagcaagcaaattttccaggaaagatatcatatcttcgcctggaatgagatcaattctcaatggaaaatagcctcccaatcagacagctttagtgaacccacaatctttaaagctatgaatggcattttccccttctttcccacacaggctgcattccttgtctgaaacaaaaggcaatctattcattgttggaattgcctcatttagaattctccacagaaaaacagagtttcgaggatgaactcccttatcccaaatccatttccaaatggattttgcttgtgcaaatcgccactcttgatctacataataagcctccttaaccgaaaattggcccttttgattatgcttccaaaaaatctgatctgtgaatggactaggaattctcggaatttgaagaattcgacctcccatctcttggccaaaaatctgaaggatcatttcctcattccaagcattccctatgaaacatccgccaaggtattgacagtgaacctccgactccgaagatgctgcattaactccacaaaatccttgtagtccaaccatggtatccacggctgcctccagaagttaatgagatttccagaggcagcagtagccatagatcctttgagaattacctctctcaactgtaaaatacttttccattaatacgaatcgctattcttttgatccacacaccaaaaactatcaaacttgcagtattttcccagcaggcaagagacccacggtctttccttgttagtagccaaactccacgccaacttggctaacagggctcgattcatatcttcacatcttcttaaacccaaaccccccatagctttcggagtgcagatgttatcccaagcttttaaagccagtccttttcaacattcccaagccactaatattttctcattaaggtgtctaactcccggcaactcgaaataggaatcctattggttgacatagcatacacaggcatcgaagaagccacagatttgagaagagttaaatgcccagcataggagagaagcttcagtttccaactctccaacttcttgagcatgctctccttgagtcttttatagtcttcttttttccttcttttaaaaataaaagggttgcccaagtgcttctcattcccacttcctggattgattttgagtatgtttaggatactctgtttcttggccgaactcaaattcttggaaaacagaacaccagatttagacttgctacacatttgacccgaccaattttcgtaagttgtcaaacactcaagcaatttccttgcatcagtttcattggctcgagaaaacaatattgtatcatccgcaaacatgagatgcgaaatcggaggagttgaatgagcaatgctaataccatgaagagaaccaaccgattcagccttaactattaacttgtacaagacatcctgacaaagaagagaaagaaaaggagacaaaggatctccttgtcttagacctctttgcgggattatctttttcaaagggcaaccatttaaaagcaccgaataggagacactagtcacacatgccatcaaaagtcttctactactttcattgagcccattcttaaggagaaccttctcgaggaaattccattccatcttggcatatgcttttatgcatatccaatttgattgccataagaccacctctaccccttttgtgttgaattttgtgaatcaactcttgagttaggatagaagattcagcaatccaacgacccgggacaaatgccgattgaaatggagtaataagatcctccataagaggacttagcctgttagccaagagctttgcaattaccttataggaaaagttacaaagactacttggtcgaaactgatccacgcttaaagggaactcaacttttggaattaaacagatgaaagttctgttaagtctgctatcaactactctagtgcggaaggcttccctaaccatcgagcaaagacacgaacctactatgtcccaatactttctgtaaaagcaacctgagaagccatcgggtcccggagccttaagaggatgaagactaaaaacaaccttcttgatttcctcatcagaggggatcctagtcaattcctcattcgcttgagcactaatagtctttccttgaagttcctcaaaaagatcatcaaatgaatgctgggaagaggaatataaatccaaaaagtaggaattaaaaacctttgaaatactcctcctatccttccaaatccttccatcattatctttaatcgcccaaatactatttcttcttcttctaatatttgcagctgtgtggaaatacttggtattacgatcgcctaaagctagccaagtttcccttgatttttgtctccacatactttcccgtttggaccaaaagagcaaaataagagactgaagcttggattcttcttcctttaaagcatcggaaatgggttgttgttgaatccattgaattcttttttccatagaattgatatccacttcattaactccttaagttcttttcttccacacttgcaaggccttcctggtattgctcacattttgaattaacgacttagaagcctcattacttgaacaacaccaagctttagcgatttccaatttacacgaaggctcctaagaccacgcttcaaagaaacggaaaggaatgaaccccctggctgagaagagatgagtatccaagattataggagcatgatctgagattgatatgggcaaatttagaacacccaaataatcataatcgttcaactaatctgcagaacaaagggccctgtctaatctttctctaataagaccaccattaaatcttttgttttgccaagtgaacttgcttccaatgaaacgctatccacacaacccgaactatcttgaacattcctaagccaacgtgtttctgcagaagtaacaaggtttcccccaatcttttcctcttggcagctaatacaattgaggtcaccaattaaaacccaaggcaaagaacaactattaacttcaacttccaaccccctccaaaaactgtccttggtattagcataaggagtcccatatacaacaaatagcttccacatcttctggatttggaagtccccgaccgaagccacaaaaaaaccatcagccgaatattcgactgttaaattagtgttacgattccaaaacaaacaagaaccacccgccaatcctttcgcactaatacacatcatcccagaaaatcccaaacaacgagccaaattctccatcctactcttagtaaccttcgtttccatcaagaaaatacaatccaaattgtattttctaacccaaaccgataaggcttggggagtcgggtccctcgcgaggccccgacaattccacgaaaagcacttcatggggctgggggggcttgataagggccgcctcctcgcctgggataaaattttgagagcaatcaacatgaacttctaccaaatttagggaatcaatcaaatttttactagactcattcaaggacatacccgaattctccagtgagcttttctttgctgaagctcctttagtgcgagacccttttcttcttcttttgtcattcttcacagaagaagatgaggcacccaaacccatcctaaaaggagtgtctaaagattgagaaaaacttggtagatcaggaatctcctgagaaaattccatggtgttttcgggagtgtgttggacgaatggcactaaggtcagactagctttcctctttcttggttgtggacattgatgaattaaattagaaacatcaatagggtcatggaaaatagtgggctgaggttcaaactcgtctatgggtgcagggcccattagttcctctaccagcccaatctcttcagcatagatgggccatggaaaatgagtgggctcaggatgtttgtggggctgtctagaaacacacacctcagcatgagttttctccaccatttgatcgtaagtgggcccaatttgggccataatggtagtgagaataccattatctgcaggattaggtggaggtctagaagagaaattatttataatatccttctcagatatagtactcgaaataccttgtttatgtatcctccttagacctggtgatactgaacgtgtttgcctccctctgaaattactccttatagattgagaggaagacaccccatcctccttgcgattatcctttggtccaagagcctttccctccactactttcaaattcttccccaaaatggcacctgggctattatcattgactctgattaccttccttcattactttcattttgcttgcatttaattttcaaaactcaaatttttgtggcaaaatattaatacttttgttatgttagcagtttactacttccttccttccattcatagttgttaactgtcatgttacattaatgtgacacaattttattagttcatgtaattacattacttaaaaaaagaaaataatattttaaaatgaaaaaaataaaaataaatcatattaaaatgagttaattgtggcataatttccaatacttttatttttcttacacttaactcttaaaattcaaattttaacggtaaattttcaaaattagtaaacagttagcaatttattgtttccatccattttaagtgttaagtatcatgttggattattcatgtgtacatctatgtggacacggtatatatatgacacaattttattagttcacg

SEQ ID NO: 184470 - DNA, 756 bp, Cannabis indica
ctttctttatatagccaagtagtatcaaacattaacatccgagacccgagagctgaccatcagtttcaactcatcaatggcggctacacaacccctctctcacccccaactcctccctacaactctaactcgctcccatctccacaacccactttctcacttgtcatttctacctcaaagatcttcctttaaaactctaactgttagagctgccgtctcccaaaaccccaccaaaacctcacctctaaagcccgaaacagcctcatttaaccattgcttcactaaatcctctgatgggtttctttactgtgagggtatcaaagttcaggacgtcatggattctgtcgagagaagacctttctacctttacagtaagcctcaaatcaccaggaatgttaaggcctataaagaggctttagagggcttgaactccattattggatatgccattaaggccaacaataatttgaagattttggagcatttaaggcaacagggttgtggtgctgttcttgtcagcgggaatgagctgaggttggctcttctagctgggttcgatcctactaggtaaaatgtgctccccatgtgtttgtgtttatgcaagctgataattattttgtactttccttagttccttgcgtgaaagcttccacattacctatcatttcttgttctctttagtgtcaaattcaatttcatctgatgttgtgtttatactttatactctgttgagcagatgtatctttaatgggaatg

SEQ ID NO: 184471 - DNA, 2191 bp, Cannabis indica
ttttttttttttttataatttgtaaataatgtaagacttctacccacatacaatagatatatatacatacgaaaaaaaacaataaattcactacaactttaataaaataaataaatatatagtaccaaaaaacttagagcatgtttaatagggtagcttgggaggaagcttgaaagaatgtgcggcttgcattggtgatggccttataagatgctacgtgatttgtactttcacaatcaaagcccattattaggtagtcctaatatcactttcaaccttggagtacaaactcttccattattaattacttcaaattggtatgtaatatatagtacttgaagtattctaaataataaatattatattgactggtttcttttatgtatgattagatcaaaatcaactgtgatgtgaaagttgttagtgatttcatgtgtgtagtgactctagctagggattacacagagactgttttgtgggtagctacaaacatgctctatttctctgattctcttattagagaagttccgacctgtctgttggttgtggagatagccgtttcgttgaaacatacttttgttattattgagagtgattctgagacagttatcaagacgctgaaggaagcctgttccagttggggtatcggtaactatatgcatcaatgaaaacatctttctaatattttgttaagctgttaattttcgtttagtttcagaatttgtaattttgcggcccataatatcgctaaatgagctttcaccaaaactgttactagcatggttgaattgacttctataccagacaacatcttttataataactgcgaggtctaactcttattttattgattttaatctataaacgttttttttaaaaaaatatattctaacctttatatttcatttctcctcttacaaaaaaaaaataataaataaataaaataaaaaataaaaaataaaaacctttctatttctccaattagatttagctaatttttaatatatgtatttatcactaaattattatgactaaagcattataatgtgtcatgattgaatttttcattttgataatttgcaatttaatgatcattgaaaggttaataacctatactaactattgggcatatatattatatgctaacaaatgactatcataaataatttatatacaattagtatagaataataataaaaaaaaacaaaataatcatgttaattctacaacactttgccaaaaaaatgatataatagtctacaatagttaatattaaaatatattgattttacaaaattataccgtataacaaaattataaaataaatataataattaaaatattatttttaactcaaaaattcgttaacattaaatgaattttttgacaattaattaacaccgtggtatcgaatgaaacttaataatattagatgcaaacaaaaaatctttaacatcactttgtagttaaaattctacatacttcacgaattattattattttttttatgagtttttatttacaggatataagattggacaaaattttctaagagataaaaaaattggtggttcgatatgacaattattctttttgtaatcttatctacatgacgggttttcttatgaaacatgagcatttttcatgtgggaattaaatgaatatataacaacttaaatttaaatgatatatttagtaattgctacttttaatctcataatggacggttattgaccgagccatccttctgttcaatatttgtgctcctcgcaaataacacatataagttagcgcgtacctcgttcaaaatgtttttcacgaagagggggctcgttgaacattcttcctgtagagcttgctttaaacgaggtttggatcatttttgtacaatcattgcaagtaagtttttttaaattgcatctcttgtacttcttgcgattaaaatattttgcaactaatttagctttcttcttctcgatcgctacattcaaattataataatatgcatgagtttttggagttcaaattttattttcagtatttatcgagatagtataagcctttggtcatgctttccaaaacgcattaaatatcacattaatttgtttaacataggagtatatttatattttaattcttataatataggtgtcttaaccatatttattattgagtatgaatgtatgtatat

SEQ ID NO: 184472 - DNA, 3587 bp, Cannabis indica
ttgcagttggaagaaacatcagactctgcaggtggtggtgaagacatttacgcctgaggaggttagagagattgctactgaactggcgagattaactggagggattgtgcttgatattcacgaagaaaacactataattatgtacagagggaagaactattctcagccaccaactgaaataatgtcacctagggtcgctctttctaggaggaaggtatcttcttgtttctctttgtcgacattgctacattaagcttagcttatcctatcaaatcctagaaaggaacaaacttttgttttctttagcttcctgccttttgataaagctcttggtctgaatgcatttgttaatgttgagttttgctgaataggcttagatttagttatgtttgttattaccactagttgtattgtaccatggagatttgtgtttggctttgaacttgcgcagctaatacttttcactggctgttatctcatctgtttaggctttggataaatccaagtatagagatggcctccgtgctgtgaggaagtatcttcccaagctccagcaggatcttgtattgttgcagtctcaggctaaaagcaagcctgcaaatatcactgatgttgttgaaaaaaccgatgaaactgttttacagagtacagactctgaaagttattcaaaactccagtgggagaaaatggcagatgagagcaaacaatgttcagcgcgtgatcttgtgatgaaagctgcactggcttccgattctgaagatctatcagatattttcgaaactgactccgagagggaggctgaggagaaaggagaacgaccactttatttggaagagttcgaaaagtttccagtgaaaaactatgaagaacctgaagattttcaggatcacttgcgtcaaatatcacaagattccaagaatgctaaatcatccagtgaagatgtggatttgcagaatttcgacgaggttgataagttgtttattcgtgctgcttttcgtttgaagaatagaagatagttttgtaaagtatttagctaccataatcaatttcattgatattttttcaacaaaggttcagtttttgtttcaaccagtatttcctttcagctcctgcttaaatcagccctatacttcttgaaagtagatgcctgctttaaatgcaattgcacataaaattaattgcatcttctgatgtcatattgcatggcctcttgttttccattcccactactcaaaatttacatctaatccttccacaaatttgagtagttgaacatagaaatgtcaagcaacttgaacggaagatttacattcttggtttaaagctcataacacccaaaattaacatgtagaagatggagccctgtcttgtattgtgtgtatcttactaaattagtattgataactttgaaaatagtacattatcaaaagtaaaatggaacttgtagacagagaactaaaattatgaatcttcattctcaaactcctgtatgttttgaacaatatcttgaactcttttggacaagtgatcagtatggtgctctatgtctttcaagatcatatgcaattgttcccggtaaactgcacatctacgtttacatctctgtctttctttgcttagttcaagtgtcagttcgcctattctccgatccttctcatcctgcaaacaggtacaaaaatggtgaaacataacaaaaacattagacacagatgaagacttttgattttggtataaaagtttttcctttctcaatcaacagataacaagtcttgagtagcctaattttgaattatgaagtaaatctcaacttaacgccagttaaacagaacaagaaaacaaacctcagtgatcatgtgcttgctagaccctcgccatggaactttacttggagacattaacgtgtgattatgcttttttataaatttggtgacggcccacttctctccatctcttaaagccaccctcagcattacaggacatccttctctggtaacaggtggaggaggaagaactctatctttcctgctcgcatatttcttttcacgaaaaccttctttcgaacaaacaaaatcctgacctatcaccatgttgtttatccgtgaccgcctgttatgatgaatacgtacagtaaatccagtatgccttccataaacaataaaaaattctcgagcatcgtcccttgatttgaactccatgccaatgtacggctctataacattgcctgtcatgggtaaactttcttcaaactggtcaacatgttctgcaatctcatcatcagccatgtgttcggtttcaccatggctttcgatgggcagacactgttctccttcgtctgaatcaaatgactggctggatgcaatttccattacaagtctgcaatgcaggaaagagtacttcagatttcttcatcttctaagaagtttacatatgacttacaaacgaatcaaaagtgaaaacaatatcaataaaacatgtatgttatgtttacttgcacaactgagaaattagttttaccattcattttttttttattcattctcattctttcctaaccttaaaaagtgtaatttcttccaattccgtctaataagaaccctttgcaaaggaatctccatactcaaatcaccaaaaaaaactcataggctttgatgaatttcagcttgctaaaatcccaaagatgaaattaattacaataattttgaacaagatcgttagatggagaacgaaagtgcctccattaatgatcagtatcttgtttcattctcattcacatatataattatccaactagtcagtttaaacagttcaaaaatacacatacagaaatatcttcttgctacaagaatcctaatccaattcacaatacaatactcatactccatacctgactctcactgatttggtaataaaaaccaatgcaactgagaagatggtacagaaacagctacaccattgaactggaagctcgctcctcaaaagagatctgattgtgaaaaatgattactactaatccaatttcaatattaacaacagcgaaaatctagctttcgttgattttcctaccgagacggattcgaacataaaaatatttagaatgttagagaaacccctaaccctaagcttgaagaggaacagtttggcgtaggattacagcacagtccgaagaagaagaagactgacagagacgtcaaatctgccacgagaggccatttttggaccttgagacttgagttagcagcgagaaagaattaaatttaaaaaaaaaaaacccaaaaaaatataaacaaataattttgcttaattacacttttcctgtgctaatagaaattaattgaagtacaaaaaaaaattaattgaaaattatttatcgtccaaaaggttgcatgtattttattttaatttgtttggaaaagtttatgtatctcattatatattttctttaaaacaaaaaaaatggttcctaattattttttttttaatttgggttaaaaataatatttttttcaactaaatcttaaattgttaagaaaaaatatatttttttaataaaaaggtatattacgtggtgttagatccttttctcattt

SEQ ID NO: 184473 - DNA, 1306 bp, Cannabis indica
tattttattttttaaataaaaaacaaatttttagaattttgccccaaaccctataaaactatagatgaccctgtatagtgtatagtactatcatgatcatgtttggttagaattttttaatttttaggaagatcttctcaagcaaagtattaaagttgagttatgttaaaaattactttttagaatcaaaaattgaaattatttggttaccaaaggaaaagtgtttttggaacttcaaaagcttaaaattgaaatattttttagaactaaaaattgaaactacttaaacttgtttgtgttaaaaataattttttttttaaagaaaaatgtacgaaagctgagttaagttaaaaatactttttacagttagaaactgaaactaattggttactaaaccaacaataaaaatgttttcagaacttcacaagcttaatagtaacttttaaaactccagccaactattacttattattagtatagttataattgtgtttagtttagttttctgattttgaattttttaattgtatgaacaataattaactttgatagtagctacatttctctagactaggtcctatgaacaattaactttgtcagtagatttgttaagtaactaaagccaacatcttcatacattatttttatggggacagttttcaaatattcatctggacttcatagcgtggtggaattggccgatgaaaaggcttacaagcaatgtgacactggaagttcactagactctaaaagtagtgggaatgatgttgtgaaattgaccaagcctggaaccagatactttgcttgtggtactttaggccattgtgatcaaggaatgaagctcaaaattacaacagtggccggaaatgcgccttcaacgccaacatccccctcgtcgtcatcttcatcgtcatcatcttctccttcgtctacttctactactacttcaacttccacatcttcttctacaaaatctctttcttctttggctgcaatttttgctctggtggccacccttttctgctttatgttttgaacatatttgttgcatatgtaatatgatttgaattaatattcttttgtatgattatatgaatacatgtatttgtgatgttaatgagggagaaaataaagttgagaatcagagaatgtaaccttttatgttttattattattattttttttgtgttacaatttgtgataaatttattggtgctatatattcattataatttgttgtataaatattaatggaataatgatttgtacacccttaaattataaaaaatgttaaggggtatttatg

SEQ ID NO: 184474 - DNA, 922 bp, Cannabis indica
taaacaatgtcagtttatttttttttacttttttttggacatttaaacaatgcagttcaatatatcttagattttaccagactcttttccaacaccaatttgacggccaacagcagcaaaaaccccacgattgaccaaagtcttaattgcgagaaaatcataaccaagataagtgaggcggaatccatcatctaaatatggacaagagcaaaaaaaaaaaacttaagaaataattaatggcaatgtaagaattcaacaactgcacaacgaaagtaaatgctgacattttgaagagtcgtggtgcaacaatttatgcttgagcaaattcttcataactttataagtacctccatgcctatggtttaaaagtgtccaaataaatacaacataagtataaaagggcatacattttagtaaacaaagagaaaagcaagaagcgtagaaaaaaaaaaaaaaaaaacggtagtacttgaagggcagctatgcgcctgatgagctcagaaggaactatttcatgctgaaagaaaatcatgacaaggtgcatcattaacacaaataaagagtgaaagcaaagacaaagcaattgacaaaagtaaaatcacaattacatgaagtacatacattcctcattcccatctcaacagcagtgagaaccctgaaatcttctttcgacaaatatctgagcatgttcacatcgagcttcattgttgacttcttatttaaagcttaccttttagcactagtacaaaaaaaaaacttacaaacacagaatagaatactattacttcaaatataatacatatccatgttccctaacccaatcccattcaaactcactacagactataaacatagaaagaaaaacgaaaaaaaaacacctaatctttaatcaaaattcattgtcgtgaagctaaggcataat

SEQ ID NO: 184475 - DNA, 7603 bp, Cannabis indica
ttttaaaaaaaaaagaataaacagaaaaatatataatatataattttttgaaaaggacgaccctaaatgccgaatatataaaccaaactaaagtcaggttataatttgctctaatatacaatataccatatgatatgattatggagcctagttgtttgtggtgaaatcaacacagcctggttccatcatttcattaaactttggactggtctttggtacaaacttctacattattctaaaataatactagtgctcacaaagtgtaaatcataatcaaataatgtccattattaattttttctttaccctaataaattatttatattatatgaatagtagttaaataatgtcttcagtggctgattcaatacagcctttgtaacttgaataattgtaatatgtagtatgtaacgcattgaccaataggaaaataattatctatgtgattaggcacattttgcacaatattccattccatgcccttttaggctttttcacacataaaataaaataaagtaatttaattttaataaatatgaaattcattctatattccccttttaaaaaaaaaaacatgtcatgtccttgcatgttcatataatatccctaaaaattacaattattaaggctaacaacaacacccaacaataatagttttacttatttattcacaataattatttggacaaaatttaatctcataaaaacataattattattttgctaattaaaaagttgtcctttgggtttgggtgcatttaatcagcttatcttttatatttatatatgttttttttttatgaaagtcataaatcttggtagaacaaaacaaacaaagagggcccagagaaattgttcaaaaaaaaaaaagaagggcccagaaaaacaaaaccatggcagaaacttcagagtgctttacagagcagagaaggaccaggctcactataatttaaccattttcttacttaccccattttgacaactgaaacatatttttagaaaaatagttttattcattttttttaaaaaaataatataaatgttccttcaaagaaagtgatttgacatattagttagaataaaaataatgcatatactgtagctgtacagattctcttttatagtcaaggtttttgttggaagctgtacctttttcatttacaataataatattttatgtataagccggttggttagctagaccaaatttctgttaattcagctaaaacgcaccgtttaatctctgctttatagagtaagaaaagaatcaaatcctcgtaggaagggcctaagtatatataaaataaatgagaattattgtcagcctatagtatagactatagatatgaccatatgatatgagtaagacttccacagctaaagaagtaagaaaaatcaaagtctcccatggccatgaagctcgatgctttaacttgcccttttctacattaaagtatttcttatttctttttcctttttctctttttttgactttaacatatgaattgttttcatatgcaaattaagcctaggtagcatattggaagctcaaatatttaccaccccaagtttttactttaattctatcaaaacaaagaagtttttattttaatttaacttatttgggtagacaaagttttcgtatgatttaagcaaacatgtgtgcatttcgaaaacaaaaaccaaaacaacctaacatgtgccaagaaaaattacagcaatttaaataaaggttaaaatgaatcaatacattgaaaacaacagcgtcacaagttcataactgaaaaaataccaaaccaatggaacacgtgtcaacaatctaacgatcaattaagtcaaatgtagatgaatcctagggtggttattaagaaaagaaaaagaagactaaattccaaactttctttatgaactataagaaccgccactgtaactccttactgggcgaacccagaaagaaaattaaaaaattaaataggacaaagaccaaaaagtaaataataattaaaaaaaaggagaaatgggtaataattatgacgccaccattgataaacctctcaaataaacggaaaaagtgcttcgttttcgttctctttctctttcttcgagctttagctttagaagaagctacacattttccgatgagagccggagaatatagttattcgtcggagaagtgagttttttctttaggggattccggcatgaccgaaaaggacgttgttccgaggacgtttcgggcgttggtggagagcgcggaccggaagttcgctagggttcgtgacgtgcctgcgtacggacgggtccataaccagcactacttccagaaagtgttcaaggcgtacatgcggctatggaagtaccaacaggagaaccggtccagactcgttgagacagggcttaaccgatgggaaatcggtgagatcgctagccggatcggccagctctacttcggtcagtacatgaggaccagcgaggctaggtttctcgtcgaggcttacgttttctatgaggcaattctcaaccggaggatactttgagggatcaaaaggcttgggtaaggatctgggtgtgaggttcaaggaattgaggttctacgccaggtttttgatggtttctttcatcttgagccgtacggatatggtgaaccatcttttggaccggttcaaagctctcgttgatgagtgtaaagccaattacagggtacttaattttattcaaatatttatttattttgttttattgttgaatgaatatcaattgtttgtgttgatacttaaattttcgaatttcgattcctccgtcttcttctttcttctcctaaattcacagtcagagcatagttctgataccaaagttcttgtagtgatagttactgtaattagatcggtataattttgtgtttgtctataaacatttcctggttgatagttaacagcattttattttattttacatttttctactaacttatttctttttacgggtaattgtgatttttttttttttttttttttttttttttttttgaaaaatttgatattggtcaatttggtatatagtgatcgttgaataaagttagttccaattgtgaagagttttcatgaatttacaatgctattattaaactggtggactcagctagttaggtgtggagtcattatgcagacataaaaaggaaagaaactgaagagaccctaatcaatgtactgactcagttggttaatttggtgacctgaaagaaacagtcgaacactcagttggttcgagtgtaatttacatatccctggttaagtcgagtgatatagtttcatacttaccaaagactgtaaagtttagtaggagggcaagaataaaaattgtgattctttaaacagttgacattatgatgaagtcgtaggccatttaagtgccattaggtttgctttactgccagagagattggtttaggagttaatttatagagagacagcttttgcttttatgtgtgttggggataaggaaaacgtgtcaagctggtccaaagcactgtgttgattctattgtttcttaatccttctcaattatcttgatgtggcaattttaatctgctaattaatttgtatctgtgagactatctgatgatgtttgcaatataattttcttagcgttatgtgctgtgttgtgcaatttatgtgacttaaattacgtatttaataataaaagtaatatatgtttgtattttgaaaagacttggcttcttctttgcttgttgaattttaagtatctcttgatatttataaattagcccctgtatgctttcatagtttctcttaatttttatttttttgctttcatagtttctcttacttgatttaggacatttaaactatcccattgcaggatactaatttcaaagaatggaggcaagtggtgcaagaaattgttagatttattaaagttgatacgtcctttatgaatgctcgacctttgcgttattgtgctacttatgattctcatccagcatctctcccgtatgtgactcgatttcatgcaaagaaggtcttgaaatttaaagatgcgttactaacaagctatcaccggaatgaggtgagatatttatttcattatgatgggcaattttagtttgcctggggttctatcatcgttagaaatgctttgagaaaaaaaataatgtaaatatactcttacatgcaggttaaattcgctgaacttacattagacacatttagaatgctacaatctttagaatgggagcccactggatccttttaccagaagcgtccactagaatcaaaggataatggttcttttactgatcattctggggcttctggattaatcgatataaacttggcagcagacatgactgatccatctttacctccaaatccaaggaaagctattctctatcgtccttctgtgacccatttaatagcggtgagttagaaaatatggttttcttaagtcaatgatcaatggtgtttaatgcagttccatgtttgtttccattgggctaatgtttccatcaagctaaggggcccatcttccaaactgtttcctctgattgaggctttgttgagaattgtttatgaaacataaattttaatatgcctatgcccgtcttactcttctgttatttatctgctgtttgcaaagcttatgtttatctccatgatgtgctggcaggttatggcaacaatttctgaggagctacctccagatagtgttatgctggtgtacctttcagcctcaggttaggttgcttttatgttgctaaaaactagattgtcttgtgtagttatccaggataagtaaccttggagttcacttttgcagggaaggttggtcgtaatgttgccccaacggaatacatgggagggtctcaaaaattatcaagaaacaaagtccaggagcttagcagtactctatctcattcttgtgtaattgacaagggagagtcttcaagtggatattatgataaatatttatggttcgggcctagaggacatggtggtaggtacccttcaaatcatatcatataagcaagaattattcttatatgagcatttttcagttttagtctactatttcagagtgtcttattgctctactaatgttaggtcttttgttgaatttcaggttcaaataatttatatcctggagatattattccatttacacgtagacctcttttcttgattattgacagcgacaatagccatgcattcaaggcaggtttgtcaaaacttgggcattgctttttacaggctacagcaaaaagaactttgtaaagcggattttgttcaattttcactatactttttccttcttcttttttttttttcaaaaaaatatttattattattatggtttacagttctcatgcgactcatgtctactcgagtaacttctgtgacatactcacatgagcaaggaaaagaaaaaattagatgtagctaactacatttgcctaaggttttgtcatataagttgttggtacacatcttttatgtggctacaataatcatatttagatttttgtaattcaagtgcttttaaaagcgcgtggttgtgttgatgcttttctaggaagctcaatacctcaataagctatttagtttagacaaaatgattttctggagattgtttggctgtcttgatgctccctaatttaggtgataaatcattagctagatttcagtgtggagcgttggttcgtctgaatgtgaattctttgtaaagctacttacatcgaaaatgtatgtatttcaggttatacatggtgcagaaagaggggagccagctgcactacttctttcacctttgagaccatcgtttaaaaacccgtctgatgcggatatagcacaaaatggaagtcaatttacatttttcttgactgctcccctgccagcattttgccaattgattggcttctcaaatccagcagctgaaaatgtaagtttatacaataacaatgtttctgtacttcctgaaacttaaagagtgtctacaaggatctaatttgtttcactctgtaggatgtttataatgaggctgaggaaatactctcctccgctttctctgattgggaagttattctactgagatctacaaatctggatttggtttgggcacaagttttgtctgatccattcatccgacgacttattttgaggtacttaagctttcttatcaagaaaaacaacaaacattttggtaaaataattcataatttatatattctgataaataaattggatctataagctaatagcacacttttattgtaagattacttatcacatccagactgcattatttactgaacacatcatagaatttcttttccccctttgtgatgggaaaatgacatcattagatatcataaggttacagtcaggcttgatatattttgaatactttaacataaatggcaacaattgtttccgagctttactttagtgtttgaagtttgaacattattgtttagaacaaatggaagtgttgatgatatacttctatttccagattcatattctgcagatcagtgctctcttacttctgttctcctgaagataacgagcaatgtttaccaacgtgcctaccctcatttcccaattcagtctccccagattctaaagttgttcagagtgctgttattcggcttgcaaagcatttaaaagttgctgactactttcactttagcgactcgtgataagaacccagaaaatgcaaatccatggaccatgggtattattgacagtgcatcagaacaaaaaaaatgcaaattcatggaccatggttatagttgacagtgcatcttttctggggtgaatatttcttcagttcaagcacgatctatatccccgatcaacaattcaggaaatgccattggttgttgatggaggagattattaggccatcaactgagcagggttggtcctgcttgttttatatttactgcatacatacatccctgctgtttcttcactctgcaactcttggtatctcatattttgataggctttgacgcctttcttcaggcatttctttcttttctttttttttttaatttattaattaaaattgttaatacactctgtaaaagaaaatcaggtagttaaaaccaatttatgtttttctgctttttgagttgtatttcacgtttttctcttgaaatgttgcgtgtaatcttaggtcagattttttttttttggataaattaggtcccaaactcttgagttgtaacaccaaaattagacggactgctgtaggtctttctcgtgtatattttggattttgcaattaaattttttttagagcttcttaagtaattaatgaagcttactctatttgttgttgtcgagggtaattgcttggaattatgatgcttgcgtttacaattacctaatcttttaataacttactctatgaggaacattcttccatttgtgctttattattttctaaaccattatgggcttataaaatgcagctataattcttctttagaacggtaagttctttaaaactagaagaagagcttgagattcagggaaaaaatcccttcccaaggacattcgtaagaattgaaacaccagtt

SEQ ID NO: 184476 - DNA, 4732 bp, Cannabis indica
ctaggagtataatctatcattttctagattaaatttatcatctgactgtagttttgcctggttttggagatattttgataattatggcatcattcgtgatataatgcaaaaatcacctaatacaaattctagcattgtttgcaatggaaacgccagtcagcttagatgctgaggatgtcagaaatgaaaaggttcaaaaatctttcttttaatatctcttcagctcaataatttccgcactccactaaaattctaacagagtgcttgaactctcttcatttgtcattctttaaattgtaacaagtagtaattgctttgtttcaggtaaaggttctaaaatcaatgagaccgctgctgcttgaagatgtcgttgttggtcaatacaagggtcatagcaagggtggtaaatcttatcctgcttatacagatgatccaacagttccaaatggaagtcttacaccaacatttgcagcagccgctctctttattgataacgccagatgggatggagttccattcctaatgaaggctggcaaggctcttcataccaggcggtataatatcatgaactcaagcaccagttcttttgatctgtcctcattattgattgtattccaacatgttaaacactacacataattgagttcttacaattgtaattcagggcagagattagagttcagttcagacatgttccaggtaacttgtacaagcggaactttggaactgatttagacaaggctacaaatgaacttgtgcttcgtgtacaacctgatgaggctatatatttgaagatcaataacaaagttcctggtcttggcatgagattagaccgtagtgacctgaatttgctctaccgtgcaaggtacaatgactcatgagacataacgtaaaaaaaaaagtaattgtgcagttgtagaatgttctaagtttttcatttctcgacctttagacaatgaagtcaactttaaggtaacattttactttttatgtatcgtgtaataatgttctcaaggcattatagttaagcacttttggttctttttgtgaaggtatccaagagaaataccagatgcttatgagagactagtgttggatgcaattgaaggtgaacgaagactgttcatcagaagtgatgagcttgatgcggcttggacacttttcacaccgttattgaatgagcttgaagtaaaaaagattgctcctgagctctacccctacggcagtcgaggaccagtgggagcgcattatcttgctgcaaagcataatgttcgatggggagatcttagtggtgatgactgatacattgcattcattttctgctactgattcttttaccaaatgtatagtaaataaatgttttcttatatcaactccccttttgttaaaatgggtataatatgttttcttaattttgttatgaaacctatagggtatgctatatacaatcaaatgaatgagattagggcctaagcccatatataatacactaaagaaagcccatatttgattaatcttaataccccctcaagttggagcattgagatcacaaatgcccaacttccaaaataaagacaaaagcttgtgctcaccaagagtcttggtgaagatgttagcaacttgatcattagtagacacatgagagctatcacgaatgacattacgaataaaatgacaatcaacttcaatatgttttgtacactcttgaaagacaaaattttaaataatgtagaaagtcaattgactatcgcagtataaatgtgtggctggcaaatgtgtgacacccaaatttacaagtaaagctttgagccacatcaactcggaagtgacaacaaccatggaccaatactcgacctcagtagaagacagggacatcgtatgctatttctttgtcttcaaagaaattagagaatcgccatgaaacactatccatccagtaagagatcatctagtcacaaggcacgcagctcaatctgaatcacaccaacctgttagagataactcaaaatcaatgcgaagaagaatgccctgacctaaacacccttttaagtagcaaattatacgaagtgtcgcatcctaatgatcttgacgaggttgttgcataaattgagccaataactgaactgtataaaccaagtcaggacgtgtgaaggataagtaaatgagacgacccacaagttatctatacctttcaagattggtgagcaaagagcctttggcgagagccaatgtatgatttcggtcaataggaaagctaacgaaatgagaccctaacaagccaacttcaacaataatataaagagtatatattcatcgacacaagaagatgccctctgaattacaagcaaccttaataccaagaaaatattttagaacacccaaatctttcatatgaacacacttatgcaaatatgccttgaaatgatcaacaacggaagcatcattactagaaataattagatcatcggtatacacaaggacatgaagttggactgatccctaatgtagagtaaaaaaggaataatctgaataagactaaaggaaatcataaagaagcaactaacttagcaaaccaacatcgcaaagcctataataagccatataaatacttcttgagatgacacactaaaccaggattacgaacgttgaagccaagaggaagtttcatgtaaacttcttcatcaaaaatcaccaggtaagaaagtattatgaacatccatctgatgcaagacctaattttttactactggaaatgctaagaaggcacgaacaatgaccatttttgtaactggagcaaaggtttcattataatcaaccccttcaatttgatgattgccaaaaattacaagatgagccttaaggcgctcaacctgaccatcaacatgatatctaattttgtatacccattttgagccaagagcctttttatgtgaaagtaagacaaccatttcccaagttgcattagcttctaaagcaataatttctttttgcatagccttacaccaaccttcatctagcatagcttcattaaaagaacgaggctcaatgcctacagtgatagctgtaaggaaagcacactattttggagaaaacttattacaattcaaataatgtgccataggataagaagtatctaaggagatagaggaaggtgatgagcacgtaaatgtactcaaagattgtacaatggtgttaacaaaatcacaaagaagcacagcagaattcttatcttgcaatccacgaccatagtcatccatgggcacagaagttgtaggcgcagaaggcagagctaatacaatattagtcccaatttaatagctatttggtcatcaatcaaagcagactccaagtcatctaaaaactcaacatcaacccccactcaagaatcaggaaacaaagaagaagaagcaagcttgtgagaattagacacattctcatacgaaaattcatttttatgaaacttgacgttgagtgatacaaaaatgtcacatgtctgaagatcatacaatttccaacacttcttcccaagtggataaccaataaaaacacacttcctactccgaggaaaaaatttataacctttggctttttgattatgagcaaatgctaaacaaccaaaaaccttaagttcattaaagttaagggactgtccaaagagaatttcaaagggagttttattgtggagcaaaccagaaggagttttattaatgagatacaatacaccaagcacacattcccccaaaaagtaataggaaggttgtcttgaaacataaagcactgcttgcattaagaatatgttgatgttttctacgtgaccattttgttcaggaatcccaacacaagaagtttgaaaaatattgctattaccatcaaaacaatacaacatacatttaaactccataccattatcactttgtactaattttaaaattattttaaactgacattaatcatagcaaatgaacaaaaaactttataaacttttatttttgaacgcaagaaattaacccatataactcttgaaaaataatctaccaatctaataaaataatgtgatccacacgaagaatgtatcttatttggtccccataaatcacaatgaataagttcaaaatcctactagctttagtaccactcataggaatactatcatgttttatgttttgcctggacaaacatcacatgctttagtaaatatcttgccagaagtattggaagaaatatcaggaactaacttgatgaattaatctgacggataccccatacgacgatgccacaactcaaaattaaaaatatctggaactgttaccacacacattgtaggaattcgtcaaaaataatagagtccatccttaggtcaccagctccaatcatactcctccataggtctcgtacaacacataaagaatcagtgaattgaaaagacatttggagtcatcaattaactgtcatatcgagattaggaatgtaaatgaggcgggctagtctcgacccgataccgtcccgccctaccccattaatattttgacttgtcctgccttgactcattaaccttcatgaaccagggcgggttagtcccaacatggattaaccgggtcgggcttcatccggtgcaattctctctaggtttttttttaagaaaaagactaattacaattttttattattattattattaatagaaaaaaaactaactgcaataaaattatttttcgttagcctattttttttt

SEQ ID NO: 184477 - DNA, 2113 bp, Cannabis indica
aagtatacattgtaatttcctcttaattaatataagctcacagaaacttgaaagaatattgtcatatttggcaagcaagatgcaaaatatttatatctttattgatgatgataagtataatataacctataaatgtgactaaaacacctacaagaattctcatgttatgtataaaaatagattggaagacaatactcaaaatctaaataaaattgtcatttcaaccgcaaaaacttggttttgacaactagaagcaatgtgttcctatgtcaaaatttcgaaacaaaataaataaataaataaagaactcgtggcaaagaaaagaaagttcaatttcggttcggtttcgatgattgtacttcattgaaactcaacctaactgaaacaactagcaagatggcacacaccataatagtccaatatggcaagagtaggaagaaggtagtatacaagtgtaccaaaaatgaagatgactcatgaccacacaaaaaaattgagaagtaaagtaaccaatgatgcattggaggtgaatctctgggatccctcagcaagcacaaccaccgccaccacctctttgctcggtctctgtaacaacggtctctgggatgccctggaaatatctgcaaaaaataatgcatacaaagagaattaaatttcaggggctctacaacgggctaggtttgaaaagtacaaaactaattttcagtcttgtaatttatcataactatgcttctctttcgggttgaagagcagcgtcagaaatattaaatcacagtaacactcttaattagtactaaaggcactttcagctatacattaataatactaggtcatttgctgcagaatgtttaagcttccccgttgaacaccgcaaacaaaactatgcaccatcagcacaattgattaaagtttattaaagattctctactgtatcaattgccaaataagatcttcaagaaacagataaatatagtatggaccgcagttgagaataagctaaaacttgatattcatacaaaactatcaggttgtatcaaccacatcttaaggttgaaaaggcaaaaggaaaccaacttttaaactgtagtaacaactaagaagggaagggaagaaaggtggttgagattgaaaaaaaaaaaaactaattatacaattcctctcaaaatttgagttacaatgcaagaatcttctcttggcacaatcaaggaaaacacatttcttttttaataaaaatgcacttcattaatcaaattgaatcagctcttaaaacagagatgtaagtaaagatacaagggttgctgtgcaaactatggcagggatcagtgggtacacaacctaatcaaatgcacaaaaaaatgatgtttcaaagatattcatgagaccatatgttaatcattctggattatacatctacataatgaaaatattttcacctattttagatgattaatgccagagcaacacaatttgaaaagcctgcgatgctaattttgaaaataaaaataaaagtaatagcatatcaagaaaaggtacgaacaaatttatgtaagatagccaatggtccaatctgatacacatttcaagatctgatacacatctcaagttctaatattatcatgctcatgtgcagtataaaatagtgctgctattttcttacctttaatgggaataataagatgcttaaagtcaaaatagtgtgttcatatgaacaactgagtgctgctgccaatggcatcagcaaaatagataaattcatatcagaaatatgattgcttaccacttctacaatcatcatagagtgcctaataagtttttttaattcttttacatttttattactccatgtgaatgtgatttaactgttaaaagaagtaaacattgcatctctgaaggtcaacttacatgtcctgttcatgttcattggctaaagcggtctttgcaatacacaagaatgcagcatcaacattgtaatcttctttagctgatgtctcaaagtaacctatgttccctttggaagcacaccagtcctttgctttcttctcagaaacctgtgtgaacagtagttagaccagcatcttaacaaagaaactaaaaaaaaatgaataatttataa

SEQ ID NO: 184478 - DNA, 1755 bp, Cannabis indica
cagtccttatcttctgttcgaagctagttgcacgcatcaggggtatttacgtcatattaactgtaactacctgttacaaattagtttgttttaaaaattaattaacaaaaaggaaaacctcaacaaattggcagggcattcatatcataggtaatgaaatggtgtggtcatcattttggtcaattccaatattgcccttccaaacctcatttctttcattagtctcctgcccctctcctctccttttgatctcgcggatcagccggagacctgccactctcatctccaccgctgcttatcgaaggagagctcgtcgtcgtaagctttccgaaaacgacatgtcgttttctgttcctttgtcttcgacgacgcccaacagtggggattcgaacgacgagacccttttcaattgcaggcctggtaacccctttatgagaaattctcaccatagtatcaatatttgcttttatttctttcgattgggggactcttaattatggaaattgagatgtttggtcgccgagataatttattaaaaaaaaaaaaaaaaggaactttgttaatagttaccctagtttgtttattacaagtggttataagattttggagttctgggtgttaactcaatggattttattgagctcggtgtagggtataagttttgattgagacaattaacaataacaaactaactgtttgatgggatttgagaaaatttaggaataaaaaaaatgagctttatataaatttcaggtttaatattaactgtcatgaagtgggtcctattgatcctaaaccaatattttctttagtatgagatacttgttcctcaaaatgaaaaaagaaaattcaaatatttagcaaaagaatcaaacttgccacttcaggctaaaagctttgtttttgccgttatactactcatcaagctttgagcaactaaacttaaagtagagatatgcattgggggtaacctaaaagcatcttttcaaggttcagtggggcataattgttattattaatcccaatcctttgtattatcaatgtaggtgccagaaatggtgatatcttgacaaaagatgaggcagcagaaataccatccattagcaaaactgccatgcgcaagaataaacaccgcggaagtggggtgaaatgctttggggtggatttgacccctgataatattgctgtggctatggtgtattttgtgcaaggtgttttaggactttcaagacttgctgttagtttttacttaaaagatgatttgcatttagatcctgcagaggtatgtgagcttttctcataaacttttcaaacatgctaatccaattgctggtttgtgtcttgtggactgataaaaattcctggttgactagacagctgtgataacaggcttttctgcattgccatggctcattaaaccagtatatggatttattaggtgagacttggtattctaacttacttatttcctatgattctcgttttatggttatcttctgttttcattattttgagtatgttgttgttgttttttgttttggttttcaaagtgattctctcccactatttggctatcgaagaagatcgtatttgattttatcagggcttcttggtgcattctcatggaccttgatggctagtcttgttgacagcaagtatagtgctgctttttgcatacttcttgggtctctctccgttgccttctcagatgttgtgagtatcttctaatttatgacttctttcagtattgttcag

SEQ ID NO: 184479 - DNA, 1905 bp, Cannabis indica
aaaataaataaataaccaaagaagaagaagccgctcctaaataaaaaataattttatcaacaatttactaaaggttatttctactgcctccgatagttcttgcagcaaaggtccaaagccagcatcacttgttaataatgcttccttttagcccaaaccatgacaagagtgaaacccatcaatgacattattacagtctgcaaataagaggaaacaaataccttcaaatataacaatccataatatggactcagaattgtaagttgtattacaaaattaagttgagttgtttcaacaccaaataaccgtttcttcattcttatttttaatttttttttctatttccaaattgaaccatttaaggtaccaacccctcttaccacaatatgaaacaacttttaagtaatatcagatcatacactacagaaagaccaaagtataaacttactgagattgctggaggcacaccaactagtggatcctgaaaaaacctattagcaagagcaaggcccagaagactgctttgcattcctgaaacaatataaaacaagaattttaaaatcaaatatggattgtttaatattctactacaaacagaataaaagacaaaagaaaaagagaaaaaacctgtctcgtaggacagtgttctttgaagcgcttttacatcagattcctcgtgaaagaccactccggtgagcatatagccaattataaatgccgataaatgaaaggcaatgatgagcaacaaaacagttaatccaaaaggagacagtacagactctatgttaagagcaagtggtgctcccacacagagagctgtcacaaatactgatagcggaggtaaaattggacgaatagcatcgcagagtcgaggaaagaacctaaacatcaatcagataacaagttaagacctaacaaagagaatgttggataaagaaatatatgtttatatgtaactattgtggtgaaaaagtatcacctattcagaagcaagcctgaaacaattggagtaataacaatttgcagtatactagaaatcattcctttaacatcaacaggcaatctctttccaataagcaagaatgacagcaatggtgtgacaactactgctgtagccgttgataacgatgtcatgacaatgcttagaggagccattttggggtcagtcagaaaagtagcatagttggagagttgtgcaccactaacacaggataccaacataatcccagcacctgaaacagatttagaagagagtttagagccagcgcaccacaaatacttataagaccaagtcggttgatcctaacctataggagttggtagaccaaagactagaaccgagattaagccaaaaaaatatccaagaagtggcttgattacgaattgaccaacataaccagcaaaaataggtaatggtctcttaaacgcttgaagaaaatccttttcactggaattaactcctactgcaaacatcaaaaagcctaaagcaggtgcatagtacctgaaaatataagcacaagacattcaatactaattcttcatttctcaaatgataaaactataagaaaattccacaaccttgtggtaaaccatgtaaaggaaggtggatagattaaagccaggagtgtactagctaggacaacatgaggtagaaacgaatttgatttcttcagaatctgcaggattgaaaactccttttgctgaaccatctgaaacaagagatcatttatttaaactacaatcagtgagactcaaaatcatttcgaatcgttataataataagttggcatgaagttcagtagcacaaaattaacaacaccagcttcaacatataaactccaacaagtgtatttgaaaataacaagactttggaggtcaactgtagataatggttaaatattaaaa

SEQ ID NO: 184480 - DNA, 2238 bp, Cannabis indica
tagctgtataatgaagttgaataataacaagtctgtagtagcttttcacagcccagctgtgttattttttttctgcatatggctgaggattgtagagtagatgcttatttaactggcttatggacaaagtggatgctaatcacaaagaacttaaaaaaaatatacattttttgtgctttccaatctacgaaagacataaacaaagagatttcatgtaaaacctaatgaaattagaaaccgattgccttggtttcttcttcatggattctaactgtcgatgctgtttctagtagggtttttgttccacatctataattggtaaaaggaacaaatgtagcttgctgtctttatctgtttctccacttccacttccatatccattttttctgctcacttgacttgaattgatcaacaagctgttcttaaatatgtgcagctagaccagcaaagcttgttagagatactgagatgatagcaccctgtccagcgacaatactttatccaacaagtggaggtaacatacattgtttcagagcgttgactccctgtgccatattcgacatcctatccccaccatactcgtcagaaaatggacgacattgcacttatttccgaacatccccaagaaaagatttgccaggtaatgaaatctttactttttttttcttttaacgagtaatgccgtcagtttctatttttcagagatctattagaagtaggagttctttcaacttgaaagattaagtgaattataattcacacaagtctatattcttttttggaataaaggtagccttgagttggatggagttacaatccctgaagtgacttggttagaggaacatcaacctcctgacaactttgtgattcggagagggctgtacaagggtcctgttattagaacttgagaatttcttattttgatgttccttacattttagtcaaatttggtttacttgataggaaacattgaggggaactatggtatatgagtggttgaaatggccatggcaataatgtttttggctatgtaagttgggcatttggttttgtacataataaaacagccgtacactcgttgatttacttactgacctcacattaaacttgtagagtagtctctgaaagttgggaaacacttgttgttgaaggactattcatctcagaattggtttgtttaattatgcaataatgatattagcttattacagccttgtcttcttgccccacccccccaaaaatatatctttggttcacaaaaccaagtatttatgcatttccaaagcaattctgattcaccaagtttggctttgcagtctccctagcattttcatatgtttaatgaaataatcaatattattcgttcaatttggtttctgttcttatctaaccatttaaagttattgatttcctaatttagttttctagcatagatttttcgaggttacacatgaaacgaactcgtatggtctttaaacatatatacattttaattctttgctgttcaagtattatgcgctaatttcatatgttgagattaatatactactatgctgcgccttcactttattaaagttccagggcagagccaccaattaggcccaagccgtgaaagtgccccattttgatatccatatctttaactttgaataagattaacgaaagtaggttcttaattttgtcattttaaataagttaatacataatccaagtattcaaattcctgctaggggaaattctgagcttgaaataatatatattattcgacttattctcacaaattatgtagagaatttagttatgttagtgttttgttcttattagaaatgtaaaaaagacaaatccacaatgtaacagagagagaatagacatgtgatggttgtgttgatataatatgatcatccaatacaatacaacagttcttctgtgtgtgtgtatgtgtgtctccaaggtagtcagatctgatagggtgcctatgttcgcggcgactcttttgccaacgcaccacttgagtgagtgaccatctttaccaatatattcttcagcatgatgacatatacaaatataaatagtatattcccttcatttctatatataaaatccatttctaattaccaaacactataatttaacgacattttaatattatcgaatcgaccatctcttttccatcactataggcatgactcgcgaatacaatacattttttttttcatttgaaaggataatgcattcttt

SEQ ID NO: 184481 - DNA, 1602 bp, Cannabis indica
aaaaaaaaaacagtggaagcggaattcaaactcgtaacctctcttttgttaagaaaaatataaaccatcattaggctatgtctatcatcacaaagtgttcatattttgtaagtagaaaatgctatgtagtcaaaacaatgttgttgccaagtttctgtgagtaatatgataacatggaaaatacaaaagttctgctgaaaagtaatttggttctaagtaacaaaaagttgcgtcttgccaaacttttactttggaacaaaataatacaaccaaaattgtagcccattcagaagtagaagtctaccattgctaggtgttatacatgaaaagtgtttcaaggcaatctattatacagcaactaaactattttggtttggaggattcacgggagcagattcacaagattaagatcactctcccttccaagaacaccaataaccttaaaaaaatgtgttaattgtgccaatgacccctgcaaatggtgccacgacacgtgatgctttgtgttcagctccagtgtccacgcaaacgagattcaaactcttactcttcagctccctagaagtgtctaaacagacccagtgcagtgcagaggtggaagttacaatagcagattcttaaatctgcaagactgccacattctatactatgtctatacattattatatctcatcaacaaaatattttgacactcaaagctttccattggcttgggactaccatgatatgatgactacagcacgaacggcatagtactttagccagacttggttcttctggtttatttgaaattaaactgctttgtggtgaggaatattgtttgccttgcattaacaagacattatttattaaaataggttaccctaacaacaaataaacaataagtaaaaattcagagttcgtgtatctaaatagctatgcacaacaagaagccatatagagggtattgaagtgtgtgtgggggggttcatgggatagaaaaaaatagctatacccaaccagttgttaataggccataaaagctagtaactacaccaactgaccaacacgattatggaagctgatcattatacttcagtcatcttctatgtcagtagtaggttgccaatctataatctacatggggtttggtttgctgggcttttagaagccacttttgggtttctgaaagtctaaaagcagttactttaactgctgtttaggtttctattttttagctctgaaaaactcaattgaaagaagccagctttaacaaagagagattcttcataagctaaaagcagaagtgaaaaaccagcaaactagtcccataaactagcagtgagaagactccaggcactgtctattgtctttactctaattatgtaactttaacctttggtagtatctcatatgggaatttcgtagtaatacatatctatattaacaactaagaagtagtaatctcacactcatgcacaatgaaatcataaaaactgaaaccatgcatgtattagttcttataaacagaatctacagatatattttctgaccataaatatagatatataatttcatcaaataggtttaaccatgttcaaacaaagtctttgaaagtagtca

SEQ ID NO: 184482 - DNA, 4871 bp, Cannabis indica
ttgttgttgttgttgtttctttaacttgttattggtaatgacgtcttcaattagaacgtggagtgtaataatattcctctcttttgtattccagaaactgaaaagggaatctttgatgccatattggaaggggaaattgattttgaaagtcaaccatggccttcaatctctaccactgctaaagatctaatcaaaaggatgctgacccaagaccccaaaaagagaattacttctttacaagttcttggtatttaaccattttcatttatttttatggaaatgtgcttaaatatttccttcacgtcataatcaatttttaaagcttttttttttcgaaagaagaaaaaaaagaaaattgaaaatgctttgaaaagcaatcttgagacaggaaagagacatccttgtttttttttttaaaaaataaaaatctatttctcttgttatttggtatattatccaatagtaattgcacataagtctacatttgatatcatttggttatattgtgcctattacacctaccttgtgaattgtcctatgtgcttatattctaactagtgaacaatgttccttttctgaatggttagatcatccttggctgagagagggtgaagcatcagatgaccctatagatagtgcggttctgtccagaatgaagcagttcagggcaatgaataagctcaaacaacttgctttaaaggtatgatgtacatatatgtaacccttatttcaaagcctctatttttacttaatttaatcttcaaggtttccatttgaagtcatttatattagctgggctaattgaggttttatctcaggaaatggtattctttaactttgaagcttgggcaggtctagaattattttgtttcctattagtaacatttgtcgttgcgcatttgaaaaattggctataggtaattgctgagaatctgtctgaggagaaattaaaggccttaaaagcattgttcaccaacatggatactgataagagtggtacaataacgtatgaagaactgaaatcgggtttggctcgtactggttcaaggctgtctgagactgaagtcaagcaacttatggacgctgtaagcaattgacattttgggagctttaactttattgttgaaaattatcatttcctttcaatttgcaactggaacattttgtaattaactatggtttcatatcaggctgatgtggatggaaatggaacaatcgactacattgaatttatatctgctacaatgcatagacacagactagaaagagacgagcagctgtacaaagtatttcagtatttcgataaggataacagtgggtgagtacaatttttatgttgatgctggctatatgaactatactaacacttgcacttcataaagagttgtgaaagctaactaattattgcattttcatgacaggttcataacaagagatgaattagagaatgccatgaaagagcatggaataggtgacgaagccaatatcaaagaaataatctcagaggttgatactgataatgtaagttttttcttttccttctccctaccttttgaaactgtatgcaactctcttgtcgtcattttgatactggtaccctatcgaaacaggatggtagaattaactactcggaattttgtgcaatgatgagaagtgggcacccagcgaagcagttttagtcttattagttagtgtttgagcacaaagagatgcatgctatgttcaaagtaagctgctaggaggggtttggctgtgtcaagctgaatcagagctgaaacctttttcaacataggttgttggattctgtgatataggttggaccatttattgaaaattgagatgattttctttaggaaccctttttgccatcctgaacctcacaatgagcagttttggaaatgcaaagcttgagagttttggcttagatcctttgttgattaaagttgagtttatatgcacacgtgtgacaattacactttgtgaattatgcatgagatcatttgtcttgctccttaacctggatagatatcttaaaattaccatgtattgagtgagagaagatttagtttgtatttttgggatactctaccaatatccatatttgtaaaatgtttactaaatttattgtgattaccagtccaaaaagaattaaataaataagtgaattcaacagcattaaaggaaagtatttggcaaactaaaggcattcattggagattcattttcccttcttttttacccttgtagattctctattgctgtaactaaataaaaaaatcaagactattgttcgactgccttgcttgtctgacatgtttgctgcacctgagtttttgtgacccccaaacaaggccaccaatttttattatttcatttcaagctctctctctctgtctctctcagttttgagtaatcaccatatttgggcaatctcatatgacatatgtgtattaattatttgaataattccactcactaaagaacaacataaatttaaacacctttgttgataatgaatccagccatattaagttataataacaacaatgtagaatatcaagaaggagaatcaattatctatatttactactttctggccagggccagaagattaaagctccctgaaacttaaaccatttcgtcagtttgttcactgaaattaacaccttggtcatgacaaaaccataaatttcacatagtttaaagctaacaatgtttaaaatacatatatatatatatataaacaaccctaaattttctttacacgatttacaagaggaaaaggaaaaagagttatacatttgcatgatatcccaactctccactttcataaaatataaagatattatattttccttagcaacacattaattttccctagaaagaaaggcagtgaatcaagaagggtgtggtgtactcattataagtcactctttgccgccttattattattattattagttaaatctttgtagaacctcaagaagactttaattttgaaggccttggctcacaagacagcttttgttggggcacccctcattacaagtaaaaagactaaaacctccatgcttagagtgatatcaaatactttttccaatgtgctaatatgtaataatagtgaaaaaagcaagagagtgggcaaatgggtgaagaagatgttgtttataaaaattagaagaaggatggtatccaaggttttcagtttcatattcccctgacacaaattgcattaaagagacaagcatttaagttcccattccacgtgaggttgtatctctggttctgcattgtaccccactactacttagtactatattatattatatgcacgtgtgcacacattttctttattcattttcaccttgaaaaaagtggtcactctacagattcatgacacaagaagaactccccactcaagacataaaaccttttttttccccttgcagtaatcataacacctctctcaagtttgatttatatatatatttctgaatcaattatttaataattggtgcaatcttgttttgaactcaatggactatatactatactatactacaaactcttctcttgtggggttcttttttatttaattcaaaatttcaatcaagttaaaagatgccaaaatcttatcttgaagacaaaattcagacaaatggagtaaaggaaaccatcaaactccaagttcccatgaatgatgttttggttaataaaaacataatttactatatggaaacagctcaagtggaatctaaggtaaaattaggttgacctatgaggctattacattctctcagtgtttctttaacttggtaaacaaaatatttatatatataggtttcacacagttaataatatctaatattatcaacagtgcctaggatgctcctcgcacttagtagaattttgggttaagacatttccacttacataagaagacaatgttgctgatttttttttatatattatcagaagatgagttggtaataccaatcaaaagaacaaaccccttttagtattttcatatgtaacataatgggattcaaatattttaagagtttacttcaaaaactaatggttaaaataaaatacactatgcgtgagagcatcgatctaagaacttttcaagttaaagaattaattttgaggttttaaaatttaattttatgtgttcctaacacaaacattgataaaaccttaaaggcacatttttctaagtgtcaagggacctaaaaaaaatttcagaagaaacataacaaaggaaatgctaatataatttacttattcatctatctacaaatattggatcttgcagtgaatcatagtcattttcgaatgttattaaagaaaaaagaaaaagttgtcatttgggtgaggaaaatgaaaatgttgagactcagaatccaaagacagagaaagaaagaggtgcacgtggacttgcatgcctctctttctctctctccatctctctctttcttcctttaacgaaccagagaagaaagtaaaaccagaaaggcttcatttccatattccataatctctgaagaaaatcagcattgcctagggacttcgcttcttcttcttcttgacttttcttctttaacaccacaggttgactccactctacctaaatcaatcttatagtcttctccatcatatctcattcaactttttatacacactactttcaagctactttgcatgaactagtttcaagttcccacctttaatgatggtttctcaatcttgtaatgtagctgatcagacagtccattttagcaatatcctattcttgagagcctctgttttttgattagtgggcaatccttacttgcttgagtggatatagaaaaaggctctcttttctg

SEQ ID NO: 184483 - DNA, 5228 bp, Cannabis indica
ttaatttaaaaaaaactaattaaagaaacgctaccaaacgtgctcttaattgatggcgtaatttggtttaatggctccactatccgtctttctttcgaatcaaattaattataagagcgccttgttaattcgtttatctcgtataaatactcccgtggaaacactcccaatttttcgttgtcaaaatattagtttcttgaacagtactataagattaagatatactaaatgctttcaaagaaataagatataataaataaataaattatataatatacaatacgcattactcttcttttctttaataatattaataaagtaatatgttacttcagagcaacttgataataaatttatataatatattaatataatcttatatgtgtgtgcagataacctttggggcaaagtgctctgtgccaaataaatgatgaaatttatttctggatgtggtgaaaattctaataatttcgggaaaaatatttagaaaatctcttacaactcttacatcttcagacccaaatatttcaggtggaatcaatcacaatagctaaaaatcttacacatccactacacatcaaatctttagccttttaaaactgaaatgattagaatctgagaaccctgaaaagactcgacataaacaaatagttctttgccctccggttgaaaagttattatgttccatttgcaatatacttggacaacaaattcattccaagtataatattaaacttagttaattcaaactccactaggtcaaaactcaactccctattctcaattataattgtcatagatctaacccaccttttgaagataaccaattctctgctaggtagtagggttccaaaccttatctcaataatatcacagggcctacccaatttattaattactctcgatgccacatatgaatgtgtaggcccaatatcaaacaatacagtataataagagtcatttataggaatctaactagttaccacagaaggactggctgtagcatctacttatataatggtaaacacccgagcaggtacgagtttcacctcttgtttctgttcttcctttctcatttgagggcaatttttcttaaaatgcccgacgatgccacactgaaaacatgccttcccaattacattctttgggatgatgtttcttacaatgagggcactcaaaataagaataaccctgacatgcacctctaccttagttcccacggaacctcttactctatcatgcaccacctgatgttgtaaaaatcttcccctcctaatcaacattggaatcaccaccatccctaccataaccaaaagtatgaagggtggtggtcccaccaacacttggagtccctcgggactcttgaagaaattttgctgcaccttcaactcaaagagcctttttaaccatctcaatataggttgttgtatcatttgttgtaatcacgagatcatgcataatcttggcattcaaacctatcaaatatttttccttcttactgaagtctgtgggcactatatccaaagccaacttggtaagtcaattaaacttcgttgtatacgctgtcactgacatggtctctcccttaaccagttcagtaaactctttcctcttagcattgcgaacaacctcattgtaatatttggcattaaagaaatcccaagacactttccaggtcattgcagtgacatcctgggtgagggacaccatttccaaccacacaagtgtgtcctcctaaaactgaaatgtggcactagtcaccctatcattcttagtgacacccgtaaagttcaattttctcttaattactgtaagccactgctcggccttcataacatttgtacctcccagaaaagctactggtgcttgtttgcaaaatctctcatataaaggctccatacggttgctagcaataggttgttctattgcactgctgggaccgaagcggctgacacttgttgtggaggcaattcagaaggaccctactatcttaacctccgaatctcctcatcttgttgattgctttgggctcacatttctgcaaaccttttctcccaatcctgaggagcctatggtaggttttccagaccacctctataaaaccttccacgacctctgccgtgtcgacaaggattcgaaggattttgacctccccgactgcctttggtctcgaccatattaccttgactctttgggttttgatgggcatccatattataggacttaacctgtgaacccataagttgggtaggttagacaacgatcacatatattccaaatattgcatttttatggattttaggcaatgcatttatacaactagcatattactaacatgctccctatcatgcttttctaatcaaataaattaccaatcaagtaaaggcttactgaactgtgaatcgagcttctcttagacgaagattgcatatatcttggcagtctttggtaaataacctaatggctctgataccaaaaattgtaacgccctactgcttaggcacactacaatgactttctaattactgttcttacctttgctaatcaaagggtttctcaaaaaacgtgttaaatttaaactttttatttaaattttaaacctttataactatgtacgtatatccaaaaaaaaaattggatcctgcttttaaaacttatattcataatcaagatacactttacaaaacatgtcgcacatcgactacaacatgaagcccatgtcgtcccgagactaaattctttaggtcaaactacttgacatgtacaactatccccgagctgtggactcatgattgctcagccttagcctgtgcattacctccacatgaaaacaatatatgtgggtcaacagactcagtaagaaaaccatataacacataatatattactgacctgtactaaggcacccatacaaatattcttaataaaagtacgatctctataccacatgcactaagtactgctactgtactagtgttcgtagggctgaaccacaccgtgagtacccctgattattgtaccacatgcactacgtactcatcccgtagtagtgttggtaacactggacgatcgtacccattaaaatatcatatgttataccaatgcactgagtaccgctactatactagtgttagtagcatatgaattacataaatagcatgtatataatacacatacacatatacatatacatgttctatgctaatcttaaattgtttccaaattcaagtgtgtcggtcgacttgaatggaaaatcacgcactgaatgaaggccctatgtcacaatcacataaattggctaacaacttactaaacctttctggggatctaaactcaaaactagaagttttcctatggataaatagtaaggaaatgccctaaatatcgaggaaacaagagaaaaatgacattacgggaaaactatctaaaaaatagtaagctattttctataaaaacggggagtcatttttcaggttctacactagtaaaaacggtatgtcgtttttcaatgcaaaaaaaaaaagactcccaaaatcgactcaaaataactccaaactccatacgaagcccttgatcacctaataacatcacaatagactagtttcaagcaacagaacctcaaaatacgcaaaaattcaaaaaccaccattgttgagtcaagtttgagttcttgaaatcaaactttctaaacaacacaaccatccccaaaaaaataattgtaacaagcttaaaacatcaattataaactgtaaaaacaccccaaaccaaaccctaactcggacagaaccaaaatcaccattgtacatgcttgaatttaaaggaaaacttgaaaacttaagaagaagggcttagggttcttaccttgggttcacacctcttgaaatcttgctaaaaacctcagaatttggtgaaaagagagttaggttttccctagtttttggttgggctaaaaagggggagagagaaaatgaagatttaataatttactttttggtttttgtttattttcttaattttccttaaaacacaagctaaatctaagtttatcttttattcattagttgccagctatagaaagtagtggaataaccatttatctctaaagtaaaatgactaaattaacctttcctttagcttaagtaattaaatggcttaggggtaaaatagtccaataccataaccccacctaactcgatattttaacatcaaacgtataattattgtaataccctcaagtttagtaaccgaatcagcaaccctaactaagttaattaagtgttaatgagaaattatattattatatgatttaatatgtggaattattgtaatttactgcattttaagatcccgttagtatgttaggggcattttcgtaattttgacttgagaaggataaaattgtaatcttataatatattgtgtttatggactatattattatatagtatggttattctatctttctacacgtattttcttacaagtcggcgctgtatagtcacaaccgggtattttaggccgaaccggattcaagatccaaaatatatttttaagatttagttatggcttatatgtgttaaaagaaaaaatataacttatgtgatatatatgtgtgagtggaaatgaaaaattaccccttttatgtgtttatgcctttatatgttttttagggacaatttggtcatttgactagataatttattttcaacaaaataacaattcacctaggataaacttcattttctgggttttttcacctctaaaccgcccacctctctctttctctctagttaatactttcaaactcaaattgtggaagaaagcttgaatttggtgttgaattgtgtggttcccttgcttggaacttggagagcattatgtactatcttgatctcctttttcttgcttgaatattctgatttttaagctttgtattgatgttcttggtgtccctatgattagtgttgcatgttgttgtaattgaggaaatttgtggtgattatagtatgattttgttattaggttcttgctaggatcatcttgatgtttagggaggtttttgatgtctaaattctcagaaaatgatttgaatttttgggttatgctttgaagctttgagttttaaagcttgtgaatttatgtgcaatagtgattttgtgtagcatgcccaatttgtcttttgtggagatgttttggactattggtagagctcatttttcttaccaaat

SEQ ID NO: 184484 - DNA, 4438 bp, Cannabis indica
aaaaaaaaaaaaggaatttggtgagatactttttgttaggttggtcgattaattatcttatggcgtatgatttccatagaatataatgtttttatttctttgtaattagggctagacaaacctagagtaatctagaagaaaaatgaaagaaaaaaaaaaagaataagagagaaaagtgaagaagaaaaaaaattagtgtttagtggagagaagaatacacgagaggttactcaaaaatttctccactaataaataaatggaggaaaaagttctacaagataccataaatgtggaattactatatagtcttttatttttgtaagataatttttatcataatatttttttttttaatacaaggtgaacttcataaacatataataggtaaattaactattatagaggaatgtacaacactagaaatattgttgacattaaacaagcgatctgaccaataacaagaaccgtgagtaagacaatgagcggttttgttagcagaccgcgtaacaaaagaaacagacacattaaccagacagtttaacaactttttacaatcagaaattaaaagaccaaaaatagaaggcatagaaaaagaacttgtgatagcctgaactgcaataagtgaagcagattcgacaaccacataattagaccagtttttcaccttaatccaactcaaagcttcaacaaaggttggttgaacattcccaaatctcagcagagtaagtgcttctatcaacagaccatcagaatctcgagccgccactccaattccaatgccatatgaaccatcggtttgaaaaattgcaccatccacgttcaccttgattttatttatttctgatttagaccactgctcctccttgctgtgttttgcatcgggtcacaagaagggctcaaattgatgagattgagcataactccactgatcaaggacagaacgcgcactaatgacaacttcagcagcagtacgcactttactttttcatagcagctcatttcgggcattccaaatgaaccatgcaatcattaaactttactcaacactacctgtctgtcctctatgcagcagactctcaaaccagagagaaaagtcactaccaacaacagcagcagagttcacaccagtttaaaccttaaaaactttgagcaaaccaacaatcaagaaagacatggttaattgattcctcgtgtgtttggcagaagaaacacgacacatggaatggaacacgcttggactgaagctgcaatctcgtgggcaagcaatctgtaagggctttctacataaaatacaaaactttggtagggactttgattttccacaattttttccacacttcatcttccatagcagcactccaacttcctttgagcgattgcaaatatttatatgtactcttcactgtataaaatcctaaatgttcatgtttccaaaaataattgttagcaatgccagcatttattggtgtattcaaaataatgcaagcatcttgactgttgaacaaatcttttaccagctcttcatcctaggcttctccattcatctgccttaattgctttgctttacaatggtcaagagcaggatgggtagatgtgacaaatggattactatcatatgctagccatggagaattgagcacctctaattcaaccaaactaactctgacttttgcaccagcaagaagaattgcttgattttcaaaaaggcttctccaaataaatctaggattggctccaagagaagcaattaacatagagccattagggaaatatctcgccttgtacacacgacccaccagagagtcttcaaattgcagcaaccgccatgcttgcttacctaaaaaagacaaattataatctctaagatttcagaatccaagtcccccaatattcttgtgacgacttaaatgattctaattcatccaagtgattccacatgattgttttgaggatgacccccaccaatactttgacatcattctttcaagtaggctacatgtttcaatgggaagaaaaaagatggacatagcataactcgaaatagcttgggcaaccgtcctgagtagaatttcacgtccggccttacaaagaaatctaccccccaactttcaattcttttttgcatcttctcttgaagaaacccctgtatagcctttttgcttctacccagaatacatggcaaccccaagtataagctttgattattagctggtaacattcctagcctcgcacagagtctatctctaaggtggtgtatggttcacatgaatgagcattggaatggacttgctattccttaagaaagctcaatcaagtgtttggtttctttattagaacttgaaagcccattctaaaggaattacaattcacctaaattaaggatttacttttccactataaaatcacttgaaagctaattcaattaggcttaagaatgtgaacatttccatcacatgtataaatattacttttttgctaagaatattatttatttgttcaatttataaaataatggtaatttaatataataaatattatttttgaagagtaaagggtaatttagtcaaaataatagaagttctattccatttcatacaataccaaacatgataattcttattccgttgttgattccatagtctttaccaaacaaaagaataaatattctattccattcttattcctattcccattcccattctcatttagtaactaaacgccacctaagttcttggggtgtttgcactattgaatattgacgatttggtgtagttgacttgttggtcggatgccatctcaaacatatgtaacaaactaagcacattgtctgcctcttttttatttcttgtcattttcttaaaaaaaattattataaaataaaataaaatatattttaaacattaagaaaaaaaattaaaaataaaaatttttataaaattttattagaaaaaaaaaatcttacatgattttaaaaaaatatgaaaataaaccaaaataactattgatatttaaagaaaataatgaaaaaaaaattaaaaaaatatttaaagtaatttttaaaaattaatttaaattaattattttttaatattgtgtgcacttataattttatgggtcatagacatatcttaataaataactatacatttgttttttttttttaaaaaaaaaaaaacgtaaagtgcaaataaatgttctctatgaattaacgtagaatattttatcttgcagttaattatcaccattaccgacatttttttaatggtttttaattagttgaaaatcttataattttttatttataaatacagcctttgagtttcaagaatacaacttatatatgtttcaaaaataattacgattttaagatatgatattataagaactttgagattggctatattactatataataagatacgatcagaaatattaaacgacactcatgttgcttaattaacatttttatgaaataatattactaatggtttaactcaatatcagtcctactttttttattttaattaatattataaaaaattattaattaattatacgactatacttcatcgtaatattaagcacaataggtatttcataacaattttcaaatattattggtttgctaacatttttttttatgatattgaaagacataaaagctatgcatcaaaattgtacaatcttcacttttataaaaagaaaagaataattgtacatctggaaagactattgtgaactttgtattttgtaaaagatactagtgggactaatttcttttttttttggttaaataataaatcaaaacctattggtacaaaataatagtttgagctcaattttcattattttttaaggattatttcacaaatgcacaaaaacaacaaaaaaattataaaaatacagtttcggaattttaaatatttttacgatttttttgattttatttacagaaaatacggtatttttatgttgtactcttgttaattttttgttatatgtacgttatttttttctgttattttgatgttatttagatgttatttttatgttacttttatgtaatttcttgtcgttttcgtgttattttttatgaaaaaccgtaaaaaaatgtaaaaataaaaaatactttaaacataaaaataaaaatgtaatttttttttagaaaaaaaaaataattccttacctaattatccctttttataatataaccctaaagtcagtttctagcttgagcacatccaacaatctagtcataattactaataggttttaatttaacaaaaattaagttcataatactatttcatacaagttttaaaataaaagattcacattatatttaacaaaaatgaaaagtaaaagctccaaaataatattaccaattaaaaatattattaggtaaaatactgaataagttctactttgaagtagttgt

SEQ ID NO: 184485 - DNA, 758 bp, Cannabis indica
atatatataaacaaaggatgatgatctaataatattaatgttaatagtgtaaatgtatttaatttggcagtattatcccttgatccagtcattggagctatttgtgctggcaatgcggtggttttaaagccatcagaaattgctccagctacatcctctttgcttgttaaactgttccgcgaatacttagataactctgctataagagttgttgagggggccgttccagaaacaactgcattgctcgaacaaaagtgggataaaatactatacacaggtatatatatatttagagtgaaattagtatgtacttaatacttttgaatatatgaatgtaatgatatgatctacaatggatgtaggtagtgcgagagtggggcgaattgtgatggctgcagctgcaaaacacctcacaccagtcattctagaacttgggggaaagtgtccagctgtggtggattccaatattgacttacaagtgagtacctatatactatatgtatatacatacatgtattttaagttgcttaaattgatttgtatttgggggcctttcaattaaggttactgccaggagaatagtaacaggcaagtgggctttgaatagtggacaagcctgcatagctgtagattacatcatcacaaccaaaagctttgctcctatgttggtaagtttgctcaaaaaatgattatgcaaatttatatatgagttataaatttaaatggatcgtatgttatatatgagttataggcattac

SEQ ID NO: 184486 - DNA, 5010 bp, Cannabis indica
tttaagaccatggccatgtgtctaatttctttatttttagaaaagttacctattttaaccaaaaaaattatcaactcatttattaaaagagaactgttaaaatgcaatacaattgtctaggtacttgtttctgaattgtattagtattgatttaattaagtatagaatcttatatatttaaaaaaataatttaagaaatattactatatataattgtgtaacgccaattatggtacccaatagcaattctcttattaaaaagtgtactagtggactatggtgggtaatttttgagattcaactatttgagtaatttttgtaacaaaatatatcaaatcttatatgaatgagaaataaataaaaaaaaagtatatatattttttgtttttaaattaaaaatatcaaggggcacgcctatttaaaaatcttttaattatctctctcatatgtcaacatataatatactatggctcacaaattttttattcgaaatgaatcgggaactactagaagctcatgacatctcgatattaagcaccttaaggtgcaaaatatcaatgcttagttatatataggggtgtgcataaattgatctaaaatctaatgagaaccgaccgtcaaacattgaatatctaattgtgatcaaatcggatggatgttatttttaaatatcaaattgattcgaatcagatggtggatgggatatccaaaaatctaatacatccaacatccaattgaattaattagtattttcatttaatttaaataagtaattagattttatatgattatacgtaaaatgtatatgtatttataaaaattaacaataaaattttactatttttttcttgaattggatagattcagtccagtccaatccaatccaatatattctagacttaaaatattggacggatccaatctgattcaaaaaatactctatctaaaatattagataaacttaacataaatcaataaatatttttaaaatgcatccaatagaaagaaccgatcaaatccaacatccaatgaatgttggatcgattggatgactgaaattgattagaacggttgaaatggtaaaatctaacatccaatattctgaataggctttaaaacattagatgttatccaatgaatacccctaatatatatatatatatggcaatgttatatataactatacttacacagcacaatcatgatattactatatatagtacttgagcgctaagcttatatagctaactagagaaatctctttctcattatataataaatatatttttttgggccaggtagtgtaatattagtacttgaaagttaaatatctttactcaactaggctaagttaataatgcttacaagttatatatatagattaaaaaaggcaatacttattgggcaacattcatttagcaacaactaaaaatagttaaaactaattaacattctcgagataaaggtgtgtattgctgtcattttcaagcacagggcttctttttggtttttatgcagaaaaggaatgagaaagtaaagatttttcataaataaattaaaaaacaaaaaactaagtcattttcaacgttgagagagagagagagaaaagagttggcgtcttttgccctccacgcagcttaaaacacgcagtggcaaatgtagacagtccccttgacacgtttcgactttctaaaatcctattcattcatttattttaattcactaaatagccaaaaatgtattaattatatattcagatatacatgtcaaaaaagttggcattaatatatatagagcttaaaaaagtggaagagatagaaagagatggagcatgagttttgctagggagaggaatttgtaaagtgatatttatatgagaaacgaaaacaaaagagagagagagtgaagaaaagcacagatcgattgtgtgagagagatcacaattgttagggcttatcccatgtttgcttcacgcaaacagctaaatgtggatattattaaggcttttgctctctcgcgtggctttaaagactcttctttctttcttagctagcattttaatcgacccacttaattcctcatttgaaaattatacatatatatatttaaaataaaaatacaaaaaatatataattaataataaaataaaatccaccatcatctaccaaaccagaaaaccccacacccttttctctcctgatactccttcaagtatatacccaccaagaaaagaaacaaacaaaaaaaaaccctaactctctatctcctttctttttctctgctttggttattttctcaagtatatatttatcaaagaagataatcattcagggaaaagggtcgagagattaaaaagatacctcaagacatgaacgcgaaccctagtagtagtacaagtagcggcggaggaggtagcggtggtggtgggggtggaaacagtgggagtagcagtggtggcggtggaccctgcggcgcgtgtaagtttcttcggcgaaagtgcgtggcgggttgcatattcgcgccgtatttcgattctgagcaaggcgcggctcatttcgcggctgtccataaagtgttcggagccagtaacgtgtccaaacttctcctacatattccggtccacaaaaggctcgacgccgttgttaccgtctgttacgaggctcaagcccgtcttagagacccagtttacggctgtgttgctcatatttttgctctacaacaacaggtaatacaataataatgttatatagctttaattaaatattgaattattcactgtattgtctataaatgtatgatctaaattcctttcatttccacatccaatttccttcattaatttgttttttagtgtccttttgtttattgatcgatatttatttttctttctaaattttgaaaaaaaataacaaaaaattgtaacaacttttttcgtaacgtacgtttcgatgagttaaacttgttttggtagttactgtgtatttgacctgtgaatttttcgtgtaaaacaagaagctatagctacccacattaacctatcgctatatatagctataaaccttacttgtagggaaagtgtcttacgtttaaggaccaaagggtcccaaatgataaactaaaatttagatatatgaccgtattagctataatttttattattatatattaataattaataaatttattctatgggcagagaagaagaataataatataaggtgggttagctagttaggggacagtttttgtgctttactgaaatctagaacgtttttttatttgattaagaaaaaatatggtcggcggttaccaggatggtatgagcctatctatggtttgatgccatttttaagtgcaaacttgtaggtttttgctggtattaaggaaatggtcggttttatacttctcggaattcaggcttttggttaggaaaaacagtcaaatcacttttctatttgctattaacaattcattgataattaatcttgtctttctttataagtcaaactaggttactgatcataaaatataatgcataatagaggttgtactagcttttttttcctttcaaaatattatgtacgattttcggagagtaaaattctttttatgtatatacatatataattaattgcttttaatttcacacgtacgttactgggtagctaaacagtctcatttttcaaaaacacgactaaaaagactattgtaatacatttataattgaaagtattacttgtatatattttctatttataattgtttgtctataatttgtaaagaagaattttgatgtgaaaatacggattattattataaggtcttttgtttttaaaagggagatatcatgtgaatgctttttaatcaagaccacttctaattctagctatttaacttaaaatatatattcgtataaatatgtacatatatataacaataaatccttttagtttaacggccagcctgatgatcggctgaaattagtgttttaaataatattatttatgattgttttgtaagaatttattaaataataattatataaattatctgccacgagaaacctttaaatgctggtaaccccttgttctaatgctagtagtttaagcacccttttagtaaaaacaaagacaaatagtctttgatttgtctatcaaataaatgtttgcctgtactagaagacattcaagttatgtgtactgtagcaatatatatactgtatgaaaatgacattaaaatacatacgtaacatatgctttctaccaaaaagttgatttgataagttacttaattaagccctttattataaatataactattgcatatttaattcaattgtcagagaatgcaatgttcctgaagatttaacatgaaataacatcatgtaactgttgtataaagacgtgtactagtagagatctataattgaactgtgtactgttcaggtggtgagtttacaaacggagctatcctacttacaagctcatctagcaacattggagcttccatcaccgccaccggctccaccgcatcaaccgacgctcatatctcctccaccactcacaatctcagaccttccctcagtctccacagtacccgccacttacgatctctcaactcttttcgagcccattgtgcagccttggcccatgcagcagcgccaacaactggatccacgtcaatttggtggtgccactggtggaggcgtgggcgggggcagcggtgatcttcaagctttggctcgtgaacttcttcatagacatggctcgccgccacatggttctgtgccgccatgttcagatcatcacggcatttcatcacaatctccatctctttcgaaatgagactcttataaatgacaattgaactaatacacaaagctgcttgcctgatcaggttccttgttggtcagatactttagaacacttaaaaattttaggggtggggggtttttcttttttcaagggcaagtgacgttaataactgatccatatttatatatttttttat

SEQ ID NO: 184487 - DNA, 1445 bp, Cannabis indica
atattagcttcgccactggtttgtgcctagcctggctgaatcgacaatttttttgaagaggttgccacctacacatcctaaggaacttatttctttaccaaattggcttatagagttttgattaagcatcggtgggcctatcttgaccctctatggaaagatctttggaagcttaagatccatgaacgtctccaccttttcttgtggaagcttgtgagagacattctgccttttagtagtcatctccaacaggtttttggcaagaatgactttctcaatttgtcatgttggagaggactagtatctcttttttgaatgtcctacggctaaaggagcttggttttttagtaagtggggattgaaatatgatgagttaatttttgataattcttttgccttattgaattggatcttaaaccccgatattcatcttggcatccctttagatctcaaggtgtattttagtattttcgcaggttgtttgtgctatgagctgtggatggcaaggaataaagcttatcatgaggatatttacccaacagtggcggtatcaaagctttagttcaaaactctgcaaaccagatcctttagattgtgactcttgatatcagaagttctcctgtagatcatagtgctgatgtcgtgttgccagtcttcccaacaaacattatttgtatttttctggatgtttgcttgtagaggcttgtgggctgtgggacgggagctatcattgtgaagaacaatggcagagttgtgttggaagctttgaccgttaggtttgatatctcctctccccctcaaggagagaccagtgttcttcttcatgcagcttccctatgtttcttgcatgactggcaaagtttggttctcctttcaaattgtaaagtgttggtcggtggtatttttgctaataaggcccatactggcaagatatgtattgatttagttttcttgtggatcaactggattctttgattgaagctcggtgggtgggctgctgctcatttttttttttttttttttttttttttttgtcctctaagaaggtagaacctcttatttccatttaaactttgtcttttggttttggcctttgcgtttttaatgattgtttaagttaaaaaaaaaaaaaacttaattataaattttttatggaggttattgtcatttaacattttgatcatgtttagctgtgtttttcagttttcagtttttaaaattgtgttcttaaaagtgagaatagaaaacagttttttgttacattaaaaatttaacggtgtttgacacaaatttttaaaaattatttttagattttttctcactaaaaaaaattaatattttaacaccataccatgtcatgaactcatccagattcgaatttgggtatggtttggggtttaggatccgagtatgcaagtaaaaagataaaatataatatgttagac

SEQ ID NO: 184488 - DNA, 2338 bp, Cannabis indica
tgaaacttttttactaaacctgaagccagagctctttattccgttctgcagcacgaatatgtatgccgtctttctttggtactgttccctccgcagatgaagtttctatacccaaaagctggtgctgaagagtggccacagtatgttgcagctcgctaatatacgcaattgcatcgtccacaatggttgccttcttcatctgtaataaatcacagaccaatgctattagttttacactgcaaaagtgatctgtgaaatcactgaaatgagggaaaatgtagaaggcaaaaagttttctcctttagttcgttaaaattacatttgttattttagggactaagccacgcaaccgcagcagcttgtcgttgagcttctccctcctcctcctctcagcgtggagattcttggacttgaaattggattcagtctgctcgttttcgggtttctttcgactaatccttccattttcgccaatgcacatttcatccaaaccagagctcaggataaactggtccatatcctgcaagtattgggagctcttagtttcaccaagtgagggagggagagagccccttttgcggcagtatttcgttaagtagtgtttctgggagacaagttatatgtataaatatatgtatatatatatatctataaatatttatattgaaattggtcttcacaagggtaacatgttcttcgtgtgtggaagagagaggtaatgagatgctacggatatgattataatacacaattagataggcacaattcctcatagcccaactaattttggcaagagagaaataagagttccgtacgtgcgaatcagttaagctattccaaattttgttatgggttatataaaaaacaaacaaagtttggggcctaatatgcaaacccctctaccctctagttaatctaacacaccacactcaatattggaatgtgttttaaagccataaagtctccatctttgatgtgtttcaatagcaaattttatataaatatatatatatatataaatatattatattttaaaaggactaaaaaaaacgactggggttgtcttgtgagcattggtgggagatggtctttactctttgcttttctggtttggtgttcatgtcatggtggttagtcttctattgacttgataagtacaagagagtgaggttgttggagctggcatattcctgaaaagtacaattcatttgtgtaaagcaatgccaaagttgtggtgtgttaatcgaaaggagttttaaccgcaaccagcatggaggattgggttcttaatgaaggattaatcgttgagttaagaagtattattaattattttacatttaaattgtatgatatatatatgtttttgtttctttctaatttatatacaaatattttattaaacctattcattaatttgtttatatgtatacataaaatgatgtgaagaaacataaatgatagttgaataattttttttataaacaaaatttatatatagttaaaaaacatttataaaaataaaatatagttcatccatggtgtgtattacttttgatttttcgtgaattaatatagttatagtataatttatctttgcaattaatttttgctaatttaattaataaatacttttaaattgtaatttttctttaaaataatgtcatattttggaccatgtctactaataaagttcaagaataactacaaattggtgattatatatttaaaagaaaaatatttcaaggctataattattttaatataattttaatagagttatactcatatcccataaatttattaaaatatttgcaaatgtattaatcctatccatttatttatgtttgagaaaatattgtttaaaatttttagattattatatatgtctaattttaaattcagatatttttctttttattattttacactcaattattacattcattttgttttaatttagttttatgaatactaaattactgcgtttcaaaaaaaaaaaaaaaaaaactaaattactttagactgtgagcgaagcgtaatttcatcaataaaccccaaacccaaaccccaaaacccctaaagtcccatagaagagcaatgtcgttctctcaactccttcagcgcgccttctcaaccacgacccaggcgagttgcgccgccgccaccaacaactccctcttcactgtcgtctacaaggagcgtaacctcaaacgcctcgtcgagaagttcaagaagtcctccgaggcttaccgtttccgaaccaaatctgggatttatgaagacacggttcgccgccttgcctctgctaaacggttcaaatggattgaagagatcctcg

SEQ ID NO: 184489 - DNA, 3367 bp, Cannabis indica
acaacttgaagtgcccctaactcctaataatctcgtcaaccctatcattatactcctttatcgaatacctatgagggtatagatgcaaaaaacaattattgaagcccccttaatctagttgagccatttaatcccgacgaggggcataaattaagtgggagggctttttacctcttttgtagatgctagctctaggggtgccctcatctaggtatacagtggcgtatctctccgccaactcctactcctcgctaactagatctggatggtgtcgcaaccagtctgccatcaagcgctcatcttcttcaagggcctcctttatcacctcgacgaccatcacatcaattgtctctttgacattcaggaggtcatggcaaatacccctattgttgatctgatctatgctttggaccatggtggtaagcccatgctcatggagcaattcagtagtgacaaactatcctacttgtagaagagggtccaggatcttgttgtattgggtcagctttttcaccaaggcctcagttttgagggtccgagccacagtcactacaccaatgaaaacattcccattagttaatagctataaaataaaaggaaaattctacaaaaggaaacaaaaggagaacattgttacctacaattttgatgttaagggagaggcttggaagtctctttactgagaaaccagtggtaaaaaaccagtattcccaaaggtcgtgggagtgcttggttatattgtagggacaacgtatgtctaggtatctctccatcctgtataacctgaccttatttgaattgttccacatcgattgaggttttgcagcataaaaataaaaaacttcctcagatccaagaacctcgatattctaggtcttgcacaaaatgtaccatccagctaataacttatatgatggcgggatgggctaaaagggagctatcaaaatcttcatgcaaatgttggcaatgtaagtcttcagtgacaggtgtgccccactcaaaatgtgggcgcagctccaggaaacaaacccatctacgacgccttgagaggtagattaatttacaagggaaagttaattctagaccaaccctagaatattactgactcccatcatctctatgagtcactagagcatattgtatcccgtgaatttgttgacactttggtccatctcccatatggacaaattgtacatactggagttgggggtatttgcttccttctatttccattttggagcagctttttttgctatatctcttatgggttcttcggccaaaatcagtttcagtctcctcgaggtccacgacctcaaggttgaattaatcatcagataaatccactgaaagagaagaaaggtccaacaaatttgatacccaaaatcgtaaggacatatcgaagaaggtctcccctaaaatttcttggagtggtcccctccagacccattacccagaggtgtggccctcacagaacaacacctctgagtaataaattgggaacacatagaggaccaggaaagaaaaactggagcaaacctatttggagccctaatgtcttcaaaatggggaaacacagagttgagcctgaatgttaccctcacaaaaacaaatttctcaccagaaaataagcatgcattctcaacgttgagactctacaactatcagattcatgttaaacactacctaaacattcctcctagcactcacatgcaatcagtggtttcacaaatcaaagctcgaacataaaaatttctaccctaatatgaaattaaacagtttgacgattcttagagaaacttacttgtaatacgtagtagagatggaggatggttgagttagtcgggttggaggtcaaaggcccaaaggagaatttggtcacggcatgtttgagcgtcgacttctttggtggactgagggtggttcaagatatggtacaaaggtggtgctttgaggaattgtctagctcaaacttgccacaaatggtgagtaagggcatcgaaaggaatcatacattcactaatggtcgagcccctgggtttctaggtttttctttctaggttgggttcactagaaaaagttttgagcttgaatttgaaaaacaaagggcttgaaaagtatgaaaatgctaaaagagtaacgatggattcctcacacctatatatatagaaaaaattgtgatccacgtgattcaaaatcaagggtcaagatctctttaagaaatgaacaggtggtaatccaacagatgggaaactaacgaggctgctttaaaagccttaatcaggatcgaggcattcattcatcatttgtatccacctcgagctccacatttattcaatagacgtcacatcataattgtcatcgcttcactatcctgcactaggcatgcaatcaaaaaacgcaaggtattcacaaaccaaaagaataagggacatgtccatgatgtcagttgtctcccataaattcttgattcctcaactgcttagtgccggatgaagaaaaatacttccatcttactcaaaactgtccatgtgcccaaaaaacttcatgataatctaggaggaagattgcaagcttatgccactcttgagtgccggaagcttggggtaaatgttatatgtgtttcaggagaagaggcacatggcataaaatgaaaaataatgatctaaataactatcatttatgtcttcttatcgtagaaggtccattcaaacctggaacaagcccaagcccaagaaagactcaaagccttaccgcggaacgaagtaaccttccaggactcagaagcctttctaacctcttgggacgcagaagggacaaagacttcttagcttataaggggacacctggaagcctatcaaaagacgatattcaaacattcgctacaagaggaatgtcggatgcctactacaatgcaaaactagaggtctcccttaacgtgttttcttttctaacacaagatcagatattgtctcttgagtcagatcatggtagtgcgcacacctcctctatatacacatgttttttccaagaactcctctaacgactttgtctgtcaagcgtggtttctgcctgatacgtgccatgcgacgccaaaagttttcctacttttacggaaccatcatccatgagaaaagatcttctaatgggccctatagtcttgtatattgtgtatttttccctgatagtggaccttctttaacataaaactgaaacggttcacaggtatgcccgaacccgaagtttagcctatataaagccctttacccttcatgttggggggcaggaaaaaaaactagccaaagctctgcaaaaatattttctaagctttcttcttccttaagagtaacttagaaactttaccttatag

SEQ ID NO: 184490 - DNA, 5002 bp, Cannabis indica
taataataataataataataataataataataataataataataataataataataaaaataattaaagacagagcgtatagaaagactaatttctgttctctaaatcaacaaataaatagtttcagtagctcttcacaatctgtaacagtgaagaatatgttcccatgatcgcacatacgatgcctaaacccgcaatcgcaacacttgaaacgatctgatcatgcaaacaaaccagataaacaaaattaaataaacataatcaatacataaaactatttcactatttatttctccacattcgtgtcaataaaaaataataaatatatatacactaaaattaacaacatcctaacacacaaaatataatttaatgtttttcacgtgtatatagatgatgttttcagtaacattgagaaatgtgcactgtataatatctgaaggggcgttgctattagacactgtggcgctttacaaatggattctaaaaaaatgattacatttactggttttgtttagtaataatctggcttcgcaaataatatggcttaattcacctcgctacgatcttatttgattgtgcatttatagagaacaaatttagaacaattgcaagaaaagtaaaatagaaacggtgtttcctggtctgattacctgaaaagttgtagcttttttccccatgatcttcacaaaacataatgctggcattataatcgcctgaaagaaagtcacatccattgttaatcaccggaacattttcctatagaagggtacttatgtgtgacttgactaagataaatcaacgatatgggagcaattacaggtcagcaaaacaattgcctacgcatatagaagggtacttgtgtgtgccttgactaagataaaatcgacagggaacaattaccggtcagcagtcttgtaactttaagatgaaaaaaacagcatataaagttttgtagtagtggggagttttaatcttatatttaactaaatgatcgtccaattagaagacaagcacagataaaaattgcaaaatctagatttccatgatatgaaaggactcgtttcttccaggcgcatctgtattaagagcatctccaacggtgcaccaaattagtgtagccattggagatggcctaagtgcagcaattaagcaaaaagcttttcaagaaagagcactcccccatgtagcaacagtttgttatggtaattaatgtacttggagtatgcaactagtaaatcgagatgtatgcttaccactagtatactgaggagagaacctattaacgccataacaagacctgcaatcacaaaaataaatatataaataatgatattgtaattttctatgtaaggaaatgaattccacaatgatgttcataattatatcctactacctcggcagaggggagaaatataggtaccattaaagttgttagacccggattttgtgttgctaaatttcatgtctacgtttatctatgaaatgcatttaacatagcatgccaacttaagtttgttacatattttgcattgacattaagtattgaagtactgtcttgaacaaaattggaaaagtgtagaaacaacaaagtgtgctctggaatctcaagtctaaaacgtaccaaagaaaggaagaaggaaggcagcacaaacggaggaagcaacaagtgctgtcctgagaagaatgtaacacccgggactgtttgaaactcttggaggcaatagctcctcgatactccttgccaatggattcaataagagagcatacgtgccaagtgttaaggaataatatattagaaggaaatgaattcatcaatttataagagctgacactattttctattgacagcaaatataatgtccaaaggatatttagtgaatgggttgataacctgtaacacaagaaaataagttcagcaaccttgtataaaatcatttcaagttttttcgaaattaaaagaagttcacaaactcatacttaccgtcgtccacaatgcaacattagagatgatcgagtctcttggcatattcagagttatctgagacagcgtactttcaccaaacatcagaaatcccatgactgcaacacttccgtaaaatagaacgcacaacagaaaactgcatcatagagataagtggccggtatcagaagataagacaaaagtaagatgagaatgtctacaatacaattcatgatggtctgtaccagattatcagtgcctgactaaatttctttttatctgccatagactggtagatgttaggaaacacagaatgaccagaatagcaaaaaccataaacaccaacggcaaatggaatgcctttccatttcactacttcaccagtttcatggaacccaattgcatcatcagtcccaactaaaaatacacacagaacaatcaaaattgttgcaaccaccccaccagctgccaaaacaattgaaacaaaaaaaatcaggaaactgcactgggaatcatttatatttttctaggcttcatgtaacagagtactagtggatctgtggatgtctgctatacctgaaaggtatgaaatcaaacgaagatccctcaaccaaacggttggcagaacaatcagagcagttaatattccaaagaagtgtgcagagtccagctgcaaaccagcccaattgaaggatgttccagggaacagcctggtaagattatctccttccaaaattataaactccacacaataagactgcaatcataaaaaaggaattttgttaaaaaagaggatccatgacatatggttattagagactactgtaaaattctgagacaatgtttcacttacatataattccgtgtacaaaaagatctgcagcatgagtaaaacatgaattaccatcagtacatgacaaggagcaaaccatctgcatatccattataataaactagagctttccctttcaaagtccaggatgttatctttaacaagcactttagcaaatggaacatatttggaggtccaaagattcaacatgatagaaattattcaatgccacttaatggataagacagacacaacatgcgagtaaaaatagaccgtctccttgcaagcaacatactaactagacatgaatcataaccatgtttcaagaataagtgaaataactgtttgctgccaataataaaatgaactttgtataactgtttgctgcctataataattgaaatttgtataaccatgtttcaagaataagtgaaataactgtttgctaccaataataaaatgaaatttgtataaccatgtaaacttatgacttaccgataagatcaaacgcccatattttccgaatgcagcttctcctaaatcagggtatgttataatgccttctttgctctcaaagcagtacctcataagagaggctgtataacagcaaacaacagcaaaaagaactagcactaccaaacttgcccagccagcttctttcactgtaaacggggtagagagcagcccaacaccagccattacattaattcctgtaccaagtaaaacataccataatgaaaaatcaatcacaaacagcccacatgaaagttcgaaatgcagtttaattacagacacaaatttaaagtctttctatcaaccgaataagagagtaaaacaagcctgaaaaggttatacaaaagtatgatccccattgataaaaagaatttaagcaatcttcatcaaacttcaatcacgaaagctacttttgctaatactcaattggaatagaaatagttaaagggtttcacttttcgattcattcatgtgttgaacttgcatattctgaacataagtttttgctgaatcctttcgttacctcaactttcaattccttctcatttcttttaaaatccttccccataccataagcaagtaaccaaatgtcaaaaggcacaacaaaaaagtggcaaagattagtgttgaataacagtacaataaaagggattactcaccattaaagacagtttgagtgaagctgcatccctgaccaattggcaattcaccagtcagctgcttatttacttgagttttatctgaccatgatgatggtgttcttgagatcctaccagactcatccttttgagaaattcgatcagacagcagaggaagcctattttcggaatctaaactagctttactatgaccgccaaagcttgaatatataatactccgaacatgttcaagatttccaaagtttggagatattatgtgagaatcaattgtttccctgccaaataataaatacatataagcataaccagaaggatcctcagcaaagactagctaaaacccagaattggagttgaagtataatgtatgttgcttccaagaaacatggaactctaatatctcactatgtagattcctatgaagaattaattaaacctcgaaagtcggacctcatgatcagggtaccgagtaacgattactctactacccacgtgtacccaaaaatatggaattctaaacaaacaaacaaacaaaaaattatcattggtactcataaatcttccgtaaggattaaacattcgacaagggattgtcattatgaatttatgatctacttcctcctgacagagttaaatataaaatcaatagaaaaattataagtattaaatcgaccatcaccttcaatgccaaacataaacaaacaaactagcttaaatgaaacttccacccatacatgataaacaaaatcataaatccggaagtcgatacggttgattcaagcagaaagatcaataattaaacaaaagcagagtaagtgggtacgtacttgtaactctgaggccattgatgagaggagaaatattcatcatcgttaggttgttcttcttcatcaacatcatcgtcgtcatcatcactgtcactactgcctctaccttcaatgtcgttttcttcacttctgtcatcgtcgtcatcatcctcattttcgaagtaaaactcagtttctttctcagacttttctgtaatattagccatcaaaa

SEQ ID NO: 184491 - DNA, 1840 bp, Cannabis indica
tttttttttcttactttatatatatagtttatatatattgttttgttattggattaatatttagccttttcttacgtaggctacagggtattgagtttttatatatataattattaggttttcatcatatgggagttgtgtatattggaatcataatatatatctttagaatttggatatataaataaatgtagttaatatgttcatagatgtacaaaagtcttgcgaaaatacatacatatctatacattttttttttcattttatctgaaaattatatataggcagtattacaagaaaaaattacgtcaccaaccgagtcttaggcgtgagagataagcaatgtttataatttgagtgctcagaggtcattttttttttttaaataatacataaataatccttttagtttaatattaatatcgtcaaataaatattaaaaatgaataaaatattttatgctggcggtagaatctctcaactaaattatattctaaaaagcaaagcttaaacacaagacttaaaatgaagataaaaatatgaaaaaaatatttgtatttagtattaatggttttctatcccctttcaaatctaaacatggagtatataaagggtttaatggctttagatggtctccaggggaacaagtatgacattgtaatcatgcaggtcgcagagttgaggagatggtcttaggacaagtagtggctgtcgaatgtcaagtggttccagtgtgtaggagtagtggttgcaactgtcaggatgtcagggcatgtaggtgaggtgtctccactactcatacattctctcgccaccgtcctcttattccaggtctttcaggaggtggtcgtgttctaatgtgtacttgatcgtacacataccttttgcttttgattcttcatccaatggtctcctttctaacatttatgaaaatcactaagtgttggttgactaattgagggatggacgggttcatggccgagacgctcatcgccatatgtacattgtcgagatggtgcccttagaaggcatgttgagattgtgaccatctcttgatgctgagatggtgtccttagagtgccctcggagggcattccgagatggtcaccatctcttggtgtcgagatggtacccttggatggcatgctaagatggtcacaatttcttggtgtcgagatggtacttttggagggcatgccgagatggtcaccatctcttagtgtcgagatggtgctctaggagggcatatctcttggtgctgacatagtgcctttggatggcatgccggcaccatatcttggtgcttagacggtcttaaagactccttggctatgatgtttgagactttaaggcttgaatagccttgagatctgaagcttgggtcttcagaactcaagtcttgaggcttgcatcttgaaactaaaagcttgaggcttaagattttttcgactcgaacacattgtccttaatttgttgatgagactccattaatggtgcattgtacttgattaatctcgaaaattagcctttttaatttttgggattcttataattatgtagaaaataataataataaaattaggaccactcatcattctataagaccaataatatccccacgctactacaaaaatagatttttgctttaattttaaagtgacacataaacaatttgtgtcggttggggtaaccgacacaataaccgtagacgcaaatagttatattttttctttattttagaaccattgcaaaatgttttttaaacgaggaaaaaaaacttttgcttcggttcataactgaagcaaatactagtgcactgacgctaattgattttttgctt

SEQ ID NO: 184492 - DNA, 5001 bp, Cannabis indica
aataattttttttatgcattttaaattttattccattctatttatattactattgattgatgattattaattgagtccgtaatttaattagaatcttcaattactcctaattacattaaattaaataattatctttaattattctaaaatttaactatattgtgttttttcaaagacactcttaattatataaatgcaaatataattttattttcgttcaatttatatttatatctagatctagtctccagatgcgttggagaggagagtattattataatattatatattatatatactatatattagttattttttttttttttttttgaaatttaactatttattatttttaatgacagatggtcgaaggtaccttactaattaagtagtattaaaaattcgggtaaaaaaaatagactattggaaagctatttaacccactaaaattaatataaaatataataagatttttgtctcttgaattttgacatacattaaattacgttcttttaaattttttgctactaaatcaggctcctcaattttaatatctactaaattatatctctccaattttgatatttgctaaattatactcttaaatttttaattatgggtctttaaaatttaaaaatatgatttaatacatgtgaaaatttaagaataaaaatattttaattaatttttatttaaatagttataatcttttactttttttatagtaagcatatttaaaaagtatattttacatgccaataaaataaaaaaaaatggaaagttttcctaaaatatgtgtattatttaaaaatcattagaattgattgaggaattgtacaattattttggagaagaaaatagaaatggaaggggatttcgttttggagaagaaaagaaaaagtcaagcaaatttcttagtggctaagccaaagagggtaagagagagcagtgaggtttatatggagacacgaaaacacattcatacatattcctaaattaaattaataattattcttcatttccaaaaaagaaaaagagtaattacctttattaatatcatcataactagaaattaatttttgaattagatattttgcttaggaagttatagaggcgatcagagcgggcttacggatacgcttgtctactcttttgagttttttttttataattacttttcgtaaattccaacgaaatttggagttacccaatttatatatattttccattccccttttctctcatataattttgaatcccatttttagtttagaattgtgcgatttctatccattagggtttcttctctggttttcgcggattacaggacgcgtgatcacgttcatttcttcttcatctttctctgttttgaggtgaagttatggcgtcgactatggtgatcaaggaggtggttcttttgtttttttctccttcttaagtccttttaatttttatttgattggtttttttttcttttaattctgtttgcatatcgagaaaaaaaacttggaaaaaagtgattttttttaattatctcaaaagtttgattttgcggacatagtggcttttgagtgaggtttagtttgttgttaatctgaaaaaaaagagtgagctttagtttgtcttcttttgttcttttattctgtgattggaaagcaaataaatggagacgcaagcttcaatttttatcagtcaagagactgtggagagagattggaaggtctaaatgagatgtttgatttgcaaggccactcttagggtgtctagtattttatgtccatgtctatgttttccttttccaattcaaacaatgaccaacagggtatacctttttgtctgtgtaaattggctcatgaattctgaaagtaattttttttcttctttcagttttgtacaaattgatttcttcatgttataatcagtttttctgtgcttttacatcctttatttgtgttgtaaatatatatttttttattattttttaatgtttgacactagtgtttttataaattgggattatacgcatgtgttcagaaaaatttaagcttgagaatattcttgcaaaatagttttcatccccatttttgattgtcttgttttctttatttaactttttttcgtatttgttgtgtttgatatcttcttcaagtaattgttatatattgtatatcaataactttctcctttgcctatgttgcaggttaagtatggggatacactcagacgatttaatgctaaggttaatgaggatgatgagctggagcttgacatggctggattgaggagtaaagttgctagtctgtttagttttaaccttgatgctgatatggttatgacctatgtcgatgaagatggggacatagtatcacttgttgatgatgatgatctgcgtgatgctatggggcaaaagctaaaatttttgaggattaatgtacacctgaacaatgacaaagctagtagatcaaatgctagaccaagtggaagttctacacctttgagatctcctcacactcggcatcctttggcgaatactagcattgatgttgctgaaaagttgaaaaatcttccagagccacttggggcagcacttttgaagctctctcttgatggtgcttcaaaagttgcatctgtaagtccagttgcatctgagcttattgagttcttctcgaagatggggcagtgttttctaactccagattcagcctctccttctgttggagaggctagcacacacagcgaggcggccgagatccccaaggtaccatttgctgctgagaagccgcacttctctaagtcctgctcaagcccaaataaccatcaagctcatttttcatttgttgatcttaataaacatcctgctgattgtaatgcatctgaggctacttatgtgaagtgcacatcagctgctgttggtgctgatgatgacaagaagaagaagaaggtaaacagtgatgaagcaaagcctgttgcttcttcaagtcatgtcccgaaaaagcatgtcacttcaagctcttctgtgaccggaagtcagtcaagtcactatgttaatcctgtctatggatgccccttttctggagcacctgttgtagataatgccgccttccgtccttgccactcatttaaaagaaatcatgctgaaaccatgagtggtggaatatatcatagaggcatacgctgtgatggctgtggtgtccatcctataaccggaaccagatacaagtctcaagtgtatgtatcttgatatagctttgatttttaatgctaagattgttaattattgctgccctcgtagtttacgttttcaatttcttgttttgtacaggaaagaagactatgacctctgcagtaattgcttttcagaaatgggtaaagaagcagattatgtaagaattgaccacccagtttctttccgccatccacggctattcaagggacctcttggaccttctgtgaatgtacgcacatatactagctaatttttctttcactgttttatttgacatttgctgtaaattcacagtacttttatttgtgtctccatttctctagttgccaaaaacagtaggcagagcttctattctgagaggttgtaagccaattactagacctattaagtctgacaggaggcttgacagtcgttttgttttggatgttaacgtggcggatggtaccctgatggctccatataccccgtttaccaaaatatggcggatgcagaacaatggtggtgcagtgtggcctcaaggaacccatcttgtatgcgttggaggagaacttattgcagtttctactaaggtggagttggaggtgtgtatgacttgatctataactttgtgtcgtgctttatgttttgctgagttctctactttttattctgtgtttttggttctttaccgggtaaggaatatttttttatttctttttgttgaaaattatccatctccagattcctgccgacggtgttcctgtgaacaatgagcttgacattgctgctgattttactgcacctaaaatgcctggtcgatacatctcatactggatgttggcttctccgactggccagaagttcgggcaacgtgtttgggttcttattgaggtacgcttttactaacttatgttttgaatagtcagcaatcctctggttcgatgtacttattcagattttgatttgaaggctttattttagctcatgcctctctatctcttttgtttactcttgcaggtggatgattctttgaaggactctttatcttcaagtctccaaagtgtggcctcagaccaacctccatcaatcagtggcgtcagaggctctcaaccagtcaaatttgatctaaatacagatgctgagcctgaccttctcaggcgttggtcgacatctttcattggtggtgtttcagtacctgtagaagtttcagctcccgtagaagctaatcccgtgtttggatggaattttaaagatgaactggagaataactttcccatcaatgacagcttgctggttgttgatcaaggtgttacaatttctcccacaaatgaggcagagtcatctgtgtctcacctatatgttgatatgagagacgatgcaactgcaccagctttggaacctgctttcacaactgaggtggtgccatctatgtcttatccaaatgttgatttgagagaggatgtaactgcaccagctttggaacctgcaactcccacaactgaggtggtgccatctgtgtcttatccgattgttgatttgagagaggatgcaactgcaccaacttccacaactgctcctgtattggctccactccctgaaatcgtggtcagtgcgccatcgtcttcattatctcttgttaatccaacagctgctattcaaatgagcagcagctctaacaatgctaccttagaggagaatcttcttattgaacttcaagagatggggtttaggcagacagagctaaacaaagagatcttacggatgaataaatacgatctggagaagtccctggatga

SEQ ID NO: 184493 - DNA, 4635 bp, Cannabis indica
cgttgattcctttccaaaatccaatcttgctgtgtagtttccttcccgccacgaactccaaaatacagcttcttctggttctggctaacctccaacaatggaggtaataaaacctcccatacctatagttcccaccaaaccaggctacccttttgaattttctccaaaacccaccaagctcagcaccattcctttattccccgactctcatttggataagctctgcaaaaagggacgcctcagcgaggccatcttggccctggactccattgctgtacgtgggtgcaaggtgaaacccagaacctatgtcaatttacttcagtcttgcattgatacgaagtccgttaagttgggtagggaggttcatgctcggataggtcttcttgagtgtgttgatgcttttgttgagactaaattggtgagtatgtatgcgaaattatgctacttggatgatgcacgcagagtgtttgatgaaatgcgtgagagaaacttgtttacttggtcagctatgattggtgggttttatagagcaaagaggtgggaggaagttttagagctttttttgttgatgatgaaagatgatggtattgttcccaaccaagtcctttggcctaagatattggaagcttgtgggaattgcaagaattttgagatgaccaaagtggtacattcgatggtgattcgatgtggcttcagcggttctattcgagtcaacaattcaatttttgatgtctacgtaaaatgtggtaaacttgatctggctaagaggcttttcgagaacatggacaaaagggatgttgtcacttggaatgcagttatatctgggctttgctatactggtcaggtcaaagaagctactaaacttcttgataaaatgagagaagaagggactgaacctggtttgttaacttggaacatattgattgctagttgtagtaatttaggagaaattgatgttgcaatgggattgatgaaagagatggaaagttttggcattgctccagatgtatttacttggacttctatgatctcagggcttgctcataataacagcagagatcaggcattagatttttttcagggagatgcttttggcaggagtcaacccgaatgcagttactgttacaattgcagcttcagtttgtgcttctctaagatcactcaataaagggattgaaatccatgcttttgcaattaagatgggtcttatagataatgttctagtaggaaattcagttgtcaacatgtattccaagtgtgggcaactggaagcagctcaagaagtctttgatacgattaaagacaaaaatctttactcatggaactcaatgattggtagttatagtcaagccggttactgtgataaggcttgtgaactcttcatgaaaatgcaggaatcggatgtactgcctaatgttgtcacatggaatatcatgatctcagtccatatacaaaatggtgatgaagaccaagctatggatctctttcaaagaatagagaaagataacaaattcaagcgaaacaccgcaacatggaactctctcattgatggctacgtgcaccgtggggatcaaggcagggcgcttgaagtatttcgacaaatgcagtcctccggtgttattcccaatgtggataccgtgcttagtattctgtctgcatgtacaagtgtacttgctgcaagaaaagtgagagagatacatggctgcgtactgcgccgaagcttagagtctgtaaattcagtggcaaatttattattggacacttatgccaagactggaattatgaaatattctaagaatatctttgatataatgtcatctaaagatattatcacttggaattcaatcattactggttatgttttgcatggtttatcaacaattgcactttatcaatttgatcacatgaagaaatcaggattgaaaccggatagcaatacttttgtaagtgttatcgatgcatacagcctttctggattagcagtcaagggagagctagctttctctagtatcactgaagaatatggtattgatccaagtctagagcattattctgctatggtagacttatatggccgatcaggtaagattaaagaggcaatggatttcattgaagacatgccagtagaaccagattcctcaatttgggaggctttgcttactgctagtaggattcatcggaactttaggatctttgtacacgccttgaatcatttgcttgagttggaacctgggaatcacttgattcagaggttaagagggcaggttgatgctttaatcgggaaaaaatcagagattgattccaaaatgagaaagctagagaaagagagttctactataaggaacatgggacagagttggattgaacttaacaacagagtctacacatttgttgctggtgataagtctaaacctcatctatatccttggttacatggtataccgaaaagtttgagcaaatctgatttttgtgatgggctttgcttcgaggaagaagatagtgaagagattggtggtgtacatagtgaaaagcttgcaattgcttttgcccttgttgagtttccaaagaagggccaatgtataagaatagttaaaaagctgagaatgtgtgaaggttgccatgagacagcaaagtatatctccatggcttataggtgtgagatataccttaatgactcgaaacgcctacatcgtttcagtaaagggaaatgttcttgtagggactattggtagtgcaaaacaaccaatgagttactttctctggattatcttcattgtagtttaaaggatgagtgatttaggtatgtaagtgtaatatgccttattttcaatgacgtattacatttacatacaattgcttaatttcatagttgtttgtataaataaaacgttgccattctttactcagcaattttaccaacaaactataattgtctgtatatacagacaattatgaacataaaatgataaaacagtcaaaataataatgaggcatattttatttataggagtcaatggcttctttcattggaccaagatattgttctacataatgggaatgcttagtatagaatggtaatgttttggagccatttgataacgttaattctctgtttacatggagaatggtgatcatgtcatttgatatgttctgcagataaaaatgaacataggaaccggtcaattgattcactcgaggagtagggaattaggatgagtatctctactcttctaagtaaagttactgctgccatagataggagttgtagagaattttcatggggaaccacagggaaccggaccaagatgcactttgcttcttgggagaaggtatgtctccctaaaaaagtatgggggagttgggtttcgtgagggtaaaaagtggaataaagctttgatgaccaatttcctttgggccattgccagaaagcaagatagcctttaggtgaagtggataaattctatttacctaaaggatcgtagtgtgtggagcctttctatcaaacaagatatgagctggtacttcaaaaagtttttaaaactccgatctagtaccaatgagacatccttgtttcttgctgaaaagtgaggtaaatttcatcctaacacttttataacttgcaattggatgctcaggaagtgaagcatagtggcgcaagcttgcaatgttcatctcctcactcaagatcatctttgcaagttcttgagcttatcctcgaacctctgtccggtttgcgaggacattgaaacacatactcaccttttctttgattgtgtatatgtcaggaaaatctttgttgaaatcggttgttggctgggtattgtgaattggccgattgacattagtaatattcagtagtggtgtactcggggccctcttgacttcaagaaccgaataattaatacggtttttgttgctgctatttatatgatttggaaaaatagaattggatgtatttttgatttagcttgtacctcttctcttaagtttagcatggactcaatctaaaattttgagcatggcttgtaatacccttaagaaaagggagatgtatctaattaatgtcccggtagcaggttttttttggctgctgttgagttagcagccccttgttggctcgttgagcctttgtaaaaggaacaaagacagatataccaaacatagggaacttatacgacacaaactattaaagaaaccaattatgtatttcaaagggatctaaatgatcaactataacttgttgattttttattcctctatggtaaaactgctgaccagtacttgttacaactataacaaataagtgttccagaattatacagaaaatgaataatttataatgcctatatatggatagtggtaagatttatgaactgaagcattgaaatttgaatcacataaaggtttagaattaaccagtacaattgtgtagtgaaaatgctaattgtaaatggcctatattattagatactcaaaagacccttttccttgaggctttcaacagtgtctctcaagctcatttccaagggaatggattgggatatacccaaacttttagctctcaaatctgatacttggtactcttccattagaggctcatcattttcacatctgccaaacaattacaaacaaaat

SEQ ID NO: 184494 - DNA, 3022 bp, Cannabis indica
agagagagagagagagtctgtgttctgtgatcatgttaatcctactatttggaaaaagggactttaaatggttatggacatagacaggagtgatcatattggtgtactcacaaactaactgaatcattagtggctgagaaagctataccaactatcattgataattttatgtgcacctgcttcgtgaggctcaatgccttgggtgctctgcattcaattgacttaacacagtttgtgcttcattcatcaatagaaaaagaagcaggtgatggcgttaatcagagtgggaacctatttgacttcatgcaagaacttattaacaacttgtctagaaacattctttttatttatgaagcaaatattaatgtatctgttttggttgctactctcctctttggcttggattaatatgtgaattatacattcgttctctgtattagtttccgcatactgccacttttatattttcaaagacatttgtttttatctttttagtttccttgaggagccattattagctgacgtgttagtagtagtacagatgtaaatgaaatttgactttaacatgtatgacaatttagagacactcgttattgatgaaccatcatttatgtaactcatttaaggaaagaacaagtataccataaattttttatatgatgttgtgatattatcaggtgagaatgttccatgaaatgggagtttattgatattagaaaggaatttgcgagagtggatttcacctgaaagttttaaactttttatttgtgtgtgtgtctctggatttcaccaaaaccaaatgtgggtgatgagcgcatccactggcgaaattcataaaatagtgttatgaggttggagcctgggaggtgtgtcttctactctgtctcctgtctactttctagccaatgggcagtgcccagtgggtgcttgtggagctagcattccattttgtctttttaggcaccattttctcctttttcttttacttataccaaacaaatactaatatatatccataaatcatatgtatatttatatgttcttcaaataacaatgcattatttggtctggagaaatcaaagaaaatgtgtacccatgataaaagaaaagaactttgatggaagagttgttttgagtgtgagggggttagatgagaagaggaagaatgaggaaggagacaaacaaagatttctgtttcttaactaagaaacaaaagaggtgtctaatttattgctgcaactacaatgttaaaagaagaatactttagacccatattatttttactatatgtttttgggttttggtactattcatttccatgactactactttttaggtaatgcaagtgcaaataataataaaaaagaagtaatgataataataataataataataataataataataataataataataataatggaattgagttcctccactccatccaatttcattgatgagcatgatgatggggtagtgcttatttattgactccaacagcaccaaaccacaaccaattattcaccatatgaaactggatcctgcacaataccttattgcagagcttctttttcgtgctgccaagaagaatggttaacttttctgtacttgctacaagaaagttaagtttcattaaattaagaaaattaactaggcaattgctttagtatggagctagttgtggtcaaatgttttgtttagatttgtaaattagatcaggggttatgttttggaaatctattcatgagtttgcttgtgttttatgctcatctatgaatggattttcatgaattgcttgctattcacaggagggaagtatttggaggtcatctggataaattactacttcatatttgcattcttttaggtagtttttttctttctttttctttcatttctcctcgaaattgtaattatttttttggtacgagtaaatcaatcatctttagaaataaaaagtcccaatgctctcatctcatctagtatctttcgtgttgtattttatatttgtatttgtgtaaataaattttggttgcttttccttttcattttcacacagctgattggggttggttttatgatttgtttatgaatcacaatgcacaattcacagttcacggttaacaaaccaaaccccattttagacataagtcttttgagtcaaattataactacaaaaaataggatgagatacattctgtgattttattccactaaaaaagaagaaaaggaatttttattttacccttatgtactccattgatcatttcaattcatagttccatcaaatttcttgaatttcgttaccttctttcattaattcttaaccttttttttttttggaaatgttattaattcttaccttaaccatatatattttcttctttcttttttttatttaaaaaaaaaaaaatcgatttatatttttactgcaatattttatatttaattcttttactgctatattttcctctctgttctcaattttattaaaattttcctcaagaaaaaaaaagaggtctcttcataaatacttttttttttatattttatttacatacctatactttttacaattatataaatataatttttcaaaaatacttttttcaaatggtcaaaatatgatttttaatgtttcaaaattaaaacaatattttttctcaaacaaaaaaattaaaattataagaaaaaaactaaaaaaataacaaaaaattataaactataaaaacaacaaaagacaaggaacaaattaatcaatctcatcacaaatattaattaattacataaatttttctgtgttaacatattttaatatttttttaaaaaaaaataatatattatgtaaaaataccccaaaaaataagactacaaaataattggatgaagaagttaaaattaagagaaataatgtagtaaataatggagcatcttgcagatgagttctcaagacctcgattggggggtggtgactagaatggaaattcttcatcaatatgagaagagtgatgggggtggt

SEQ ID NO: 184495 - DNA, 7567 bp, Cannabis indica
ctttcacatacattcccttgccaaactgccataacgaggctgtcatgtgcctcttcatgtcgctttctttaggtctattagtaaaaaaaacgactaacaatacaccaacgctcatcaatcgttcactcctcatttttaggaaaatcacatatcaaatcatgctcatctttcccttcaatcacaacattggcacaattctccagatcacaaacaaacattttactagaagccataatcgacccgcacaattaccacaactagaggtgtatcaaatctaatgataaccaactaatccaattacaatcgactatgtaattacaattcactactaaatattagatattcaattataattagatccaattacattttacttttgaatatccaattaaatgttatgtcaccttaatattttagtcggtggccaatgagtctttctagaaagatacagaacagcacacacaaaccatgcacgtgtttttcgatcgctgagagtgagaaaaacgtgggttcacaaaccccccaaatcgccgccacgttctttctccataattggttagacaagccgcgggtttcgccggagcgccgccgccggtgggttcccgcgctggtaattttccagatatccttctcttcttatttcaatttgtacccactctttctcttccattaccatttctgtttttctcattcattggcatcgtgaactattaatgaacatagagttttgctataattatgggaaatttcgggtttgttttcttgtcggtggttgcaatttggatctgaacagtatattttgatcgattgattggacttatctgaatccaacctgtaacagagtctgtacgtctttggacttttgggattattgttagtattataaataatttgtgggtgctgcctatttatgataatttccttttatctatatccgtattgaacttacttcgatgatacattcaattgggaagtagtacttgatttaagatatatcaataaacttctgattaacagtttctgtttcagctctgtcaatgactggtgactactagtgttacataaaagtagcttaattgcataagccaactgcagtaagaatggttggacttgcgagttttcttcgacaagaaacgtgtgaaagctactttatttttcatgctgaaactaaattgggaaatgggtttaggacatttttgtattttcttggtcttgcttattgtttcctgggactatcagcaataactgctcgtttttttcggtctatggaaactgttgtgaaacacacacgtcaggttgtagtgactgacccttctactggggaagaaaccattaggcatgaaaaagtttggaatttcactattgcagacattaccctgctggcatttgggactagttttcctcaaatatctctagctactattgatgccataaggaatttggggaacctctatgcaggaggtttgtttgtttagtggaatcttcatttttttttcttttctttttgcaataaacaaattttagaatttaatatgggtttttttgtgtgtctattttttgagtttcttaggtttgggccctggaacccttgttggttctgctgcattcgatctctttcctattcatgctgtttgtgttgtagtaccaagagctggagagttgaaaaagatatctgacataggagtttggctagtggagcttttttggtctttttgggcttatatttggttgtatataattctagaggtaattagtaatttgtgtaaatcttcaatttcttatgttacaggatgttatttttgtttcctgtttaccacctgatcaacaaaaaatgttgtatcttgtttactgcttgattatttgcaatattactgtttcttgtcttcaccgtattcggtatttcacacatataagtcattagagatgattaatttgctaagtcgttcacctttctgcttatgttcttcttaatggtcaattcatcaaaggaaaatattcaattatgaatctagaaatgagatagttttgctctatgcttacaggtttggaccccaaatgtgataacgttgtgggaagccttattaacagtacttcagtatggtttattactaacacatgcttatgctcaagacaagcgctggccttacatatctcttcctctgtaagtgacttttatttatgttagacacaaaaacacaaatttcgtcactatttctcttatatgtttctgagttttcgttttataatagctggaattgtaaaaccttattgcaagcacattttgtttttatatatttactttatacattttggtggatctttcattctcaagaaaaaaaggtgaaaggccagaggagtgggtgccagctgaggcagcttcaggcaagcatgatacaactgttggcaaaggctactctgaaatacttccagtcagtgaaaatgcagacagaaatgttgttgatattttctccattcattcaagagatgaaataggtactttgaaatgccaattatggtgtcaattagtcttatttaaactgtaagttcagatgaaatagattatgttgtaattattattatcaaagagaactatgcaacaatttccagccaagtaactaagccatccaaattgacagaattggcaccaaaactttcccgataagcattccattagaggcataaaactatgatttatattataaatcatccacaattgtcatgagtcagcacaaaataatacaatgtgaccctctggaattataagaagggggccttggcaaaatggcctcttttttaaagtcaaggggactagaatttgtaaggaatgtgtgtaatgtattgctcttggaaccatgaagtgataccagaagataatagtttgagcatgtgtctgcagatttgagtagctaaatattgcatagaaaaagaacagagaattataattagttttttcgttgcattctgttatgtcttataacatcatttgtttaaactaacatttaatttcacattgaatgtcagagtttcctggcccagggtatcaaaaggtgcctggattcgatgattcagcagaatcgtcaaataaaaatttggaggaggaaacagcttcagaagattctgatattcttgtactttggagacagcagtttgcggatgcactcatggtattgcacttctgctgtgtataagtaattacctagccacatctattttatttaatctcatccaaaattctaatcaacacattttcaggaactcaactttgattgttatgcaatagcatcatcctttttaatttctaaatctaacaagtttaacacagatatatattatatgaatgttggaagtgtttctttttaattaattcaatatttttctattatgtagttgagtgtgcttacacaaggatgtctttattgattttttttcttttcaaactcagctagcttctattatgtgtgtgtggcaagcataaagaaaatgtttttttttatcagtattcatatttcattcctggtgaataatttcattctccctgcacagttggaaagcagagaatcaagaaaattgaataatgtatacctgcgacttgcaagaatttcctggcagttagttttggctccatggaaacttatgtttgcttttgtgcctccatataatattgcccatggttgggttgccttcatatcttctctcattttcatcagcggtattgcttacatagtgacagaattcacagatctgataagctgtgtcacaggtagtttgagtcatttaagttgaattttccggctcctatcaatattgttcttaaataatatgattctataaccaagttggtccacccaatattatcccccctctatattttagattcaaacatgtttaattctttgcaggaataaatccatatgtcatagcatttactgcattagcaagtggcacttcgtggccagacttagttgcgagtaagattgctgctgaacgtcagacaacggctgactctgctattgcaaacatcacttgcaggtttagtcatttaacgtccatttcaattaacaacttcttgtttaatgcaaatggtcaagatatattttgtttctgagttttaaatggaacctatgcaaattgcagtgatatataagtagaattctctcagcaaattcaaactgcctgagaaggaaactagaaaaaaaaaaaatctctacactaacatgtcatagtgccgcatatttgagcttgacttttggttgataattttagcaaaactattgtctctcgtgtaaaccatttagcaaagtaggtttgataagccctttactaataatactaagtagtgtgtaaactattttagttttgcaatgttgcagcaattcagtgaatatatatgttggcattggtgttccatggctgattgacactgcatacaacttcatagcatatggagaacctttgcacattgagaatgctgctggactgagcttctcactacttgtatttttctctacttctgtcggatgtattgctgttctagtatttaggcgtctcacgttaggtgctgagctcggagggccaaagctttgggcatggcttacctctgcctacttcatgttactttggcttatttttgttgtgctatcttctctcagggtttctggaatcatatgatacgagcaatttttctgctcatttcttttctattggatatagttttttttgtttcctttccctgttatagtaatatatcagaattatgtaattgagtgtatgaataggttcaaagttcttttccttttatgttaaaaatactcattcatttttgtaaccgtttgaaaataatttaagttgtatgaaatgttgaatactgatgattctttttgtgccaactaccaatgggatgttaataatgttattgacccagaaaaacaaaatatcatacataaacagaagtccttaaacaaaatttgaccattttatttagagaacccggaacagaaaaatgtttcgcacgcctactccatctctaatagctacattgtggggcgcataatgaagaaacgaaatcagcaatccaaagtaaattttctcttcacatagaatatgcattctaacttaagcaaaggcgccggtacatgctgttgctggagcattgtctagctgtttctttgctgaactgtatttcttggtaatgaatctgcattttcaacaacaaaacattattaatcagtttctttttggagaataaagaattatgtcaataattgtcatcaatgccagcccaattgacccagtgatgatgttttcattcaccacccagtgatgatgttttcattcaccaaaaagaagatattgatttttctagcattagctaaagaaagcctccaaaaatataagtttacctgaagaaatccctccacaataactcgaacagtaaccagttcattccactgccatcatcattcttattagaggaagcagaaattgtcctgctaaccatagagtttcaattttaatgtcagaacatatgttgaaaagtttccaaatattatacgacgaagtagaagtttaaattagacctggaagttgttttctttagctcatcaaacatcgaacgcggagaaaggcatcccatagccagccatggagagattttgcaggaaaagtttgctccatatatgctgtcatgactgccatccttgccccctttgggaggctgtgcttggcactcagctgcaaactttttaagcctttctagtgcttctgtttctcctccaaccaaggaagcattggcagctggctttccatcctacaatacaacagattagtaagtaaatacaacatgagagagagagagagagagagatgaagaaaagtttgtttataaattgatctgtaaataaatataacattcagatatatcaaccaatgttaattcagtgtcttcagttaaacattccaaaagctcgtggaaatagtagagattcttagattcagtaaaactgactagctatatcagtcctaaaaaggaagaacactagttcagctaatgtctatggtacctttgagaagagaaatttcagtggaaaagaaatgcatagatagatggcagtagtaacatgtccacataaaattctactattgtctacctgattcagatgaaattagtagatactcttatcactcccactagagttctagcacaacagtcacacaacaatgctaattaatgtcctcaatcagatcaaaagtatttagtttgcaactcattaaacttattgagtttcatgaccaactatccaagtactaatgcctcagaaaattcaatacccttcttttgtttgttttgattcctcagctatgaacagatttttctttaccaataaagcactggatcctcgttttcttatgatacataaaaggcttatattataacacattcgaaaccatacaactatagtcattatcttgaagcaaaccatacttgttcatttagaatacttaacaatgtaattacctgagtcaatgttgcagattggttaacacccaaatccatcaatgaaggaatatctccaggctcaacatcaccacgagaaggcaagcccttcatttgttcaagagcctcaatggtttgcctcacctccaagccttgaactttctctctaaatccaccataattggaaggcatatcttccaacttaaacggcaaatcatcagcatgatacaatgtacttccccaaaagtacttcacctcaaaattttcatctttcatggctgcttcaatccgctcttcggtcttgacctcatcatgagaaacctctctgtgcgcataaattgcgtccgcaccaatagccttagccaactccaccagaacagtctcaggctttccgattctgaccacaagatcggaccctcgagcttggaggttcttcctgagatccttaacggactcaaccagaaacgtggctctgtaaggaccagttttgtcgaacccagatgaagatttgccataatctctaggatcgaagcagtagacaggcaaaactgacatggactcgttgtgagccgagttgaggcactcgttgtcgtggaccctcaaatcgttgcgaaaccaaacgatggaagctcggcgaactgcggccccattggagggatccatgggacggcggggacccaaagagagagggttctgaagagggttagctgaaatggtggacttgaatgaaagcttcggctgctgagacacagaggcggcagagagagaaagatgggtaagagaagaagcttgtgtggggactttagccttgttgggttgagaaaacaaggtggaaattttggattgttggaagaaatgagttgggagaattgttgagagagaaagagaaagtgaagcagtggcaaaagggggtagcctggtttctccagaagacgacggcacaacaacagccattgaattttgctcctctgaagattgggtttctgggttctccatttttgaatctgggtccatttttcttttcactttgggagattggttctaaagattagcgacgaaacttgatactaagaa

SEQ ID NO: 184496 - DNA, 1251 bp, Cannabis indica
ttttcaacttaacaattccagcctaaaatcatatagatcgaaagcaaactataatcaacgtcatgcacaatcaaaccatatatattctaacacataatccatcattcaagtacttattctactttcataagttatctcattagcaattcaatagtcaatattacaacacagaaaacaaatgtctcaatttattaatacatcacaataacaattatgctatgtgttacaagttacgtactcccacactaacaaattttgggttggatttaaagcaagttgatctgccatatttgccaatacatgtcataatacgttcaaacaagcacattcaacaatgtgaaccatagaatactttcttaatcctctgctgccttaacacatatatttttgtactttggcacatttactataaagtattcagaatcaaaataaattaatagagaaatataacaaaataaatggaagaataatcgaaatcaatatttgtaatatgttgtttactaatttttttttttaaaaaatggaataatagtaatttattttgtttacttatatcagaaaaggtaatcgggatgcttaaatggactaaattccttttttgagttaaactatagtatatggtagttattttgtaagacgtattttaaaggacaacattgtcattatatattttaatattaaaaactaaaataaaaataaataaaatcacctttaatggcatttcctataaaattggtgggggagaattcactttcttttatcccttattaaattaagttctcattttcttaattttaataatacaagtaatatagaataattatcttatcattatttttattacttattaattagtatatatgtttaacagttctccatatactttatctgacatggcataatcaccacattacttatcataagtggtagttaatacatgtattacatacaatcctttggtgccttaacacatttttgtaccttaaagatcgttactatttgttatacattgtgtaaaatctgtactacaagatcatatgcatatatataaacataataaaagttgttccagttcatctagaacaatacttgtatatattatatatataggcatacacacagagtcttcctattcgaaattagctcgaacaattcaaatcacgattattcaaagtatcatctagacctcaagatatatatatatctgcttatataacagtgattcttaatttaacgttttgttatttttat

SEQ ID NO: 184497 - DNA, 1420 bp, Cannabis indica
gatacctccagcccttctgaccctaattcgatccaattttccattaaatttaatagtgaattttcatgaaatttcattaccattatattattacttgatagacaagatttgactatagagtataagtctcttcatttctttttaaattttatcaaagacctataaatctatgaaactagctattaaaaatgtagtagagatgatcaacaactcaatcataacccgcccaatattcatataataggacaaacaaggagaaaacactcaaagtaaaagaaacatttggtgaagactgtttcaaaatattcaataataaatagttgaccattacattttgtcatcataagttcccaattacattcctactacatagacatatacagcccactaacatatatatatatatatatttatcaataatggccctgtctattaataaataatcagagactacagtgtcaatcttttcctattggactagctagtaataaatagagaatcatattatatataatatgaacaattatttcagaaactccaacgaaattgtcctaattgtcgttattcttggagtatgagatcgaagtttcaaagaaatttaaattatattatgttgaatttaattatataatataaagcaacgagcttttcttcttttcctccataaatatcattattatttccatctcatcttcaagctatggctaataatcttgattagctcctttattcttttttctttccaaggagacatctaataataaaaaagccagaaaaatattcaagagctagctaccaagtaagtaaaatccctgttccctttaagaacatttaatatatgtatatgtgtatatgttaacatagaaagcttattggccatataactgtttaattaatacagagagaaatggaaaatcatgccggtgatttgagttcggaaatacatcaaaggtactgaaaactttaactttgatgaaaaacttttaattcctaccatcaggggcggagccaggaatttatctgagggggggccaaactataataaatcttcaaaaaaaatatatattattaaattcataattaaattaaaatatagaacgtctctcttgcatgtcacgaaaatcatctataattgaatctatactaaatttttcagcaatttctctttcaatatacactagcaaacaatcacttaaaaattcatcttccatcttgttgcggagtgtagttttcactaaattcattgctgaaaacgatcgctctgttgtagctgtagaaactggaagtgtaagaataagagttaccactttatacacaagtggaaaaacttctgcttttctagtttttaccagccattgacataaatcagagatagttgttaagactattaaattcaagaatatttcgcacatgatcaaaa

SEQ ID NO: 184498 - DNA, 17214 bp, Cannabis indica
aaataatatatgagataatttccttttaaataattccttgatattagattgactaatgaaaacatgcatatattattatataatggcagttaccaaatcttaaaatttaaataatttagtcgcaaattattgtaataataataataatagtaataataataataaaatttctcaattttttttttgaatgaaattcatttttattattaaacttgaatttcagctaccaacacaagtagcaaaacagttgggacatccccaaactgaaaacacaatcaggataagaactagaagctcttgcaaaagcatgagcaactgagttcgctgattgtttaacaaagattacagaaacatttcgcataatagcaagcaagttcttacaatctttaatgactaaaccaaataaagaaatcatatccattgagctacgtaaagcttgaactaccacaaggctatcggtttccaagacaacttgctgccatgagaaggtttttatccagctaaggacttccctaacacccattgcttcagcaagaggaggatccacatgaccttgatagtagactgtttttccttgaataagaaccccacaacagtccctagcaacaataccgaatccaaaactgtggttttccacaaacattgcagcgtctacgttgaccttagcactattagtactaggtgttgcccaatgctcagctccatccccagacattaagttgtggattgatgactcgagtatcaagttctgagcacaactccattggttaagagttgttgtagatgagatgatgttcgagatgttaacagtttttttgttccaagccactccatttatggcgccccaaattgcccaacatagagcagcaacatgggcttttttctcactgtccaggtgtcgaaaaacctccctgcaccagtctagaaaaccagcaccctcctccactcgagtgccgatcccaacccttttccaaacctccttgattacttgacaagttaccaaacaatgcagcacagtttcattctcattttgacagaaaggacacagagcactcacctctactcttttaatcctaagttgatccattgttggcaaacaattggtgccggtcctccacaagtgatttttgatcttaggaggcatcctcaatttccacatgttttttcagaatgtcgaggcctcttcttcactccatctcccattaatttgctacaataagttgtagactgacttgactgtgtaaaggcctgaagtatcattacaccatataaaatggtcagtacaatcagtcacctagaggggaatttgtaagataaggcttgagtctctctcatcaaaaaggtcattaagcaattcaatgtcccatgttcttgcatcgggcatcattaagttgcttaccttagtgtttacaaggccagggtgagatgaaattacataggggttactcaaatctagcagccaaggctcccctaatacacttatgttaaagccatcacccacacaccaccttgttccctttaagacaagttgttgagcctcccatatgcttctccaaacgaaactaggattgttccccaaggaggcattgagaaaagagccattcagataataacgagcttgaaagattcttgacacaaacgaatcctttcttatgaggagacgccatccttatttgcctagaagcgccaaattaaaattcctgaatcccactccgcccacatcgttatgcttgctgagtttttcccaagacaaccaatgaattcctccattgttttgagtgaagatttccaccaaaacttggccatcaacttctcaatctctatactgatttctaacggcaaaagaaatacgctcatagcataactaggaagagtttgagccactgttttgaccaatatttccttgccagctcgagagagaaacgtcccttcccaaccttgaagtcttttacgcacacgatcttttaagtagcccaagacatcggttttgtttctccccatggtgcttggaagacccaggtaagtactgttctcattggcttgtcgcatctgtagtacatggttcaggtgcatacgagtagcttctgaagtattaatgctgtaaaagatagatgatttgttcaagctcacttgctgaccagaagcattttcaaacttggcaagtaactcacgaaccttcactgcttcaggagccgtggccttacagtatagataattgtcgtcagcgaaaagcatatgtgtgattctcggggcaccgttagccaccttacaaccatgaatccaaccacggttctcgtactttttaatcaaggcagaaaaagcccctctgcgcaaagaatgaacaaataaggtgataaggggcacccttgtcttatgccccttgttggaataattggacccatttctctttctccatgtataatgttgtattttgctgaggtaacacatcacataatgaggttaacccaacttctaacataacccatcttcaaaaaaaatttcttcaaaaagtcccactcaatgcgatcgtacgctttgctcatgtccagttttaaggccatgtacccttccttgccttgacgtttcctcttcaggtagtgtaaaacttcaaaggatacaagaatgttgtccgatattaaacgacctgggataaaagtactttgggtgacggacacggctttatccataaaaggcttcattcggtttgccattaccttagtaatgattttataaatgacatcacacaatgcaataggcctaagatctgtaacatgctctgggtttctctttttgggtatcaacacaacattggcattacttatatccatcttaagtccccttctttggaagaaacgatgcaccacattaaccacatctgaccgaacaatgttccaacatttctgataaaaaccaggtgtcgtaccatcgggacctggactttttgacgggtgcatctggaaaagtgctttcctaacttcctccttagatacaaggagaagaagatcatggttcacaatatcaaaaatagaacacttgatttcatcaacaacttccgcacatgtcgttcctgaacttgtgaataaactggaataataatctacaattaagacaaatagaccattctcccaatgaacccaatccccactgtaattcttaagcttctcaatattattccctcttctagttgtggcagccatgtgaaagtacttactatttttgtctcactccttgagccagaattgtttggctctttgtttctagaaagtctctcgctggtccataatttgagaaagcttcaacttcacttccctaaaacgctgcacagagaagggatatctcttgtttctcagctcagaaagctcttgcttacaccttttaatcctcagtttaaaagagccagttatgtcctttccccattcggccaaccgctcagtacacatttgaatttttttatcaatagaggcattgggcatagactcccaactatctttaatcaacttataacaaagtggttctttgagccaagcattttcaaaatagaacttacgaaaaaagatgtgaagagtttcaagtacaggttctaaaagaattggagaatgatcagagggggaagtttcgagattacttaacttggcttgagggaacaaacagaaccaatccgcagaaatcaaagcatggtccagacgaatctcagcccaattcgttgtacctcttcctctctcccaggtgaacagatagccaagaagttccatatccgtcaattcacagtcactaagggcttgttggaagccttggagtaaagcctgaggatagggaagacccccttcttgtcttgctgagaaaccacattattaaggtccccgactaagcaccatggcaagtttgagctttgcttcaatgtgcgaagaagatcccaggttatgtgtcattgattccttcgaggctcaccatagacccctgttaatctccactccggcttcccctccatcttaacagtaaaatcgatatgatgatgtgaatatcccacaacttgaccttcctcacttgtcttccataaaagggccaacccaccacttctaccttgggcctcaattataaaaaccccttcaaagcccaactgtatactaacccattcaactctttccttggcacacttagtttcacacaagaaaacaaatttgggtttcttttaagaaattatctctttaagaaattgaacagtccatgggttcccaagcccacaacaattccaacttagaacattcataatacttggcgggcttgagaaccaaggcccgcccccattcaagttttttggattatcatctttgtttggaatcattagagtgtcaccaccctccttaagactaatatgagaggagtcacctatttcattatatggcccatgagaatccattataattaaactaggcccactgctgttttcccctggcccatccgaggtgtcaaaagcattcttttccttttagcatccagggaagacacataatttttttgaattaattcagttgaccctaaaatccctccaatttgcttctttccttttccatctaatagagtcgttattggatgtatatttcctgttgaccgagggtcataaatggtgatgagcaattgactaccctgattcatgggattaccaatttctaccaccggaatatctctattcacactaggcggatgttcacactctactgtcggtcttctctctgtctccaatgaacgctggacattctcgaatccaccactcgtctcgcccttagaaaatttgccattattctttgagtcatcagcagttcgtaaccaacgagagccaatcgtgtggttccgcctacggggtgcagctttcaactccatgttatacggtttgggcaacaaatgcgatggggtatcgaaaacttctcacaggatttttccgagtggccgatgatcccacatataaaacagaatgttggcaatccttcatacttaaatatagcccagcaaacaggtctccccaccttctttagtttcattttccttttttaaaggttgatcaacacgaatagatactcgaattcggagatagtctctccatatacccatgaaattattatgatcagactcgacaaaaaccccaatatagttgccaatgtccttcactacccgttgagacatgaactctttcgacattccatgtagttgtacccagaagtcaagcttttttagtatcactgatcggggtttttccccccttcgcagcctttgaaaacccaattgaattctgtcaaacgtccatgggcttccctttataaccctgccaacatctatttcatgatagaactgaaatagatagagattcggtttcagctctttgacatacaatccacgtcctggtcgccataaggaggccattttatgttgcatagctaggaagtcaatttccctatccgtgataaatcttcccaccagaaaccacctgtcgtcgatttctgagagtccctcatcctcttctccatattgcaaaccacccatttcttcttcatctaacgtcatcgaagcatattgatcatccatgttcgtacgtgtttgattaaacgtagccatagaaagacaaaaaccacaatcacaatcagaactagaaaaacaacattaccatatcaaaagacaagactccaaatcaccaccctacaaaattatagctcacttagatattaatttgcaatcaaaaaataaattatgtattgtgaccacatattattttatatttatatcatgtttaatatgattgtttgagcttcatctatattctcaattttattttattttgctccaaacaaaaaagagaaaaagaagattgaatataatgactaattaacgtctcaccaacaaataaaaaggaaaagtttgcgttagatctaagagaagagagaaaattgacccagacggaccagacccacacccaccgacccagacccatacaaattaggagaacgaacctcaaccttccttcgcattctcaatccattttcatttttggttttctcttactcattacaaacgccgtccccagatctatctaaccggagctactcagattctgctggtattttcttcttctatgctttcatctcccaaatcaattttgttttttttttgttttttagggttttttcaaaagaaaaataaataaatacaagtatgttaattgattggaaaatcttgctattctgttcgtaatgattgacggagttttcatttggtttactgagagcaagaaagagtgtgtatctgtgtgtgtgttctgtatagtgattgtttgattttacttgtgttgtacagagtgtaatggtgattggaactggcgggaggtgatttcggacagtttatagtttgaattagtggatcggatggataagaataagaaccgtaccgatctgcttgccgctggcaaaaagaaggtatggatttttatttctattttcttcacttgtgtgctttggttttcttttttcggaactatgattataatcctttttgcttaatgggtaagctaggacagtgaaaccaaattataactgaaagtatgaatgatatggttatggttgcttattgggaaaaatgacatggacacagagaggatattgtagaaagacaatgtaaacaagtaaaattaacaaaacaaccattacggtcgttcatacttcaactgtttctccacagtcctttatgtatatgatcgctctaagtaaataggatgctcattttgcaaataagtatataataatatgtgtatatatatatgcattttatgtatatttttggtgcaaataacagttgatctagagtcattgaaaatattggttagatggggtttgtgagtatgtttcagaaagcaagtagagagttggttctcttgtgtaatgtaagtttttcactattttaatatggtatatgagcttacatttttggcgttatagtcatagaagttaggaacataagttgaaattctgttcttgcgggatatctatgattctagcttaagtgctctttttgcaacatctatagtgtgccagtatattatcctaggttctatgttttagaaccttttatgagtttgtgaagtttaattttgtattttttattgtttttttttttccaataatcagcttcaacaatatcgccaaaggaaggataccaaagggactggaagtcatggaaaatccactaaaaagtctagtaataaatcagagcagcgtgaagctgatgctggctcaactgctgataaaactacatccatgtcttcagttgaaggggaaattacatctcattttgattctgatcctttggtaattgcttcatcaacttctcaatctgtagagagtgtagcttctgtcagtgaagttgttgcagttgatctatctacagtttccagcacaccagactttagtatggatgaaacattaacagcccccaatgagttatctacaccgaaggtgggggttggtgagcatcatgttgactctttagtccaatctgaaggcacaagtattggaattgaggtggcaagaattatgtcttcagatacatcagatactgtgcactctggtggagaaactaaatccgatgatatttttgtattaagtgatttgctcactaaacctgaattagttgattctactggagtaacacttaatgctgaattacaaagtggtagtttggaagatagttcatttccttcacgagcaaatttttgtggattctgaacacgaatcactgccatcgaaagatgataatcctgataaatccttgatgcagacaagggaagatcaggtaacagatgtaggttgtgctcttctccgattgttacattttatgttttccttttgtttatttcttcttcttgaatctgaggtatctaggtagggtagtagtgagatatttggatttagagaactatattttaaatttacatatattattcctgaaattgactatgatgaacccaggtagtgctttatgcctactattatgtttatttgatgtataatattgttctcatttgttgctgggtagggtcaatgcaggaagctgatggtttggatggaaggaactctgattataagagtgaaatagagcacaagggggataccaaatttcctttatctgaggctgatgtaagtggtgaagctctttctgggatatctttagaagggacttgtgtggacacatcatgtgaagttgattataatggtaaggtggatgaagtatctgtttcggatggtgcaaacattatggaagattttccaggtgatggtcttgttgtggcaagtcagaatagcacgggtgccgtgatgggttcatttcatgaagggaagagtagtgatttgctgaagactgatgatcttggagaaggaagtacagagagggttcaaaatgatacaggagatgagaaagttgtacaggtacataatcaacagcatatgctggacagctatgaaaagccttcggaaatcgatttggtgagttcagccagagagtggaatgtatcttcgggcttcgttttgagctcaataaatctctcccagctcatggatttggttaagggtcttagtgaagaagaatacaatcttctagttaagtctagagaaccagtttctagtgccgaacttgggcctgccaatttgaaaatggctgaccctgacttttctaagttgctggagaagctcaaagaagaattatttctcacgaattgtacaaaagatattttccagttgcaacttgctcagcagtctgagctacaaggtgagtttgatcatcagcatcatcagttggtatccgtgcttagtgcctcacttaaagaagctagtgaacagaaccaacttcttagagaagagcttttgcagtgcagatgtgaattacaggctgctgttggtgcaagggaagaatttcaaaaagaattttgcacttcccaggctgaggttgccagagcatacgagttgcagatcagtcttgaaaggtcacagggggatttgttgagactctcaacagagttggctgactgcaagcagttagtggcatctttacaggtggaaaatgaggacatgaatggagctcttactttagtaaccgaagagaaaaagaaattgaaggaggaaaaggatcatctttttgaagaaaatgagaagcttgcaattgaattagcggactggaagggattgatggctgctttacagctagaaatttccaacttaactacaaatctgactttagcagcagcagaaagaaagatacttgaggaggagaaggaacatttaggccacgaacatgcgaagatattaacaaaatttgctgactgtaaagaagtggcctcaacattgcagctcgaaaattctagcttaaaggagaggcttgaccttgttacagaagagagaaaaaggcttgaagaagacaagaggtgctttgctcttgaaaatgagaggcttttgtttgatcttgccagtcttaaagagcagttatccactgaaaaaagggaacgagagagggttggagttgatttaaaagaagtgacatcacgccttgaacaacttatggaggaaaacatttttctttctagcagtttggacattcataaagctaaacttactgaggcatcagatagcaacagaattgaaatgccggttcaaagcaaggaagattggcatcaggttgaaatatcagaagttcgaagcagggatggtgagaatttaagtgctggtgaagattcttattgtattctggggaagcaagtcgatgatgtttgctcttacacccagaagcctctgtctgatgatattgcaggaagaacaccatacatactttttgaaaagggagtttttgatgattccttgggctttgtatccttgaagggacacttggatgaggtagagaaaatattgcaccaacttgaaaaagcgattggagaggttcaggcttactcggcgtcattaagcaagtcaggtggcaagttggttgcacctggggtatctaaactgattcaagcttttgagtcaaaggtgcatcttgatgagcaggaatctgaggatatgcctccaatagaaaagcagtcaacagcaacagacccatttgtggtagtggaagaagaaattagaaatttgaaagagttatttaagcagttggtattggatgctgctgatgcttatgtattgttcaagagtgaaattgatgggaggagaactgcagatatcaatgttagggagctcaaggttcaacaagaagccttaaaggatcacagcaacaatttggaagcgtcaaacattgaacttgcaattgtttcagaagttttaaagcaacatgggggcaccattgaagcaacaaacaatgaactcgtagttttgtgtgaagctactaagctagaagttattgatctcaaagcaaaaaacactgatctttgttgtaagctacttaaatgtgaatccagaattgatgatttacagagtcaattgtatgatttacaacaaacttcaaatgagatggcaactgtgattggtaatcacttggatgatttgcagaaagaggtttctgggaggacattaattattgaagaagattggaattctactcttgctcagatttttgaaatagttcagaagcttgatggttcccttgggaattttgcctcaaaagtatttgtccctgatgacggattggatgttgtatgccaccttgcttcttcagtcaatgcagccaccaaattgtttgaggatatgcagaagaaacttgaagcttttcaaattgaccatgaagttatttctgggtcatacaaagaagtgaacgagaggtgtgaagagatgcatcggaagaatgatatggctgttggcttattgcataaactacatggtgactttagaaaacttgtgcgttcacatggatctctggatgaaaatgagataaaggaggtgaatccagatcctctagattatagtatatatgagacatttatggggcagctggagcattttctgagtgaaaggcaggagcttgaatctgttatcgataaattgaatttggaattggtaaatagaataggggaatttgaggaactgaatagaggatgccttgatacagatgtgatctgcaagttaattgaagatgctcggggtgtccttaaagaggaagatattgagatttgtgcaaataaatcacctcctttgcattttgaatcattgattactgttcttgttcagaaatacaaggaggcccatatgcagttgaacttaattgaagaagaaaatagatccaaggtaatgaaatttgaggaattgcagcaagaagtacagcatttaactgccatctgtcttcagcatgaaactgaaatgcttgttctcaaggaaagttttagccaggtagaggaagctctatttgctactggttctgaattacaaaagaaagtaagtgaacttgaattgtcagagcaacgtgtatcatcccttagagagaagctcagcattgctgtcactaaggggaagggcctggttgtgcagcgggatggtctaaagcagtccctggcagagacatctagtgaacttaagagatgctcacatgagttacagttaaaagatgccaggcttcatgaggtggaaacaaaactgaagacatattcagaggcaggtgaacgtgtggaagctcttgaatctgagctttcatacattcgcaattcggctactgcgcttagagagtcattccttctcaaggattctctccttcagaggatagaagagatcttagaagacctcgatctgccagagcattttcattccagagatatcattgaaaaggttgattggctagcaaggtcagttgctggtaatagtttgccttctgctactgattgggatcagaagagttctgcaggaggaggttcattttctgatgctggttttgtcatgatggaaccttggaaggatgatttacagtcaaattcaaattcaggtgaagatttaaaaagaaaatttgaagagcttcaaagtaagttttatggtcttgccgaacaaaatgaaatgctggagcaatctttaatggaaaggaacaatttagttcagaaatgggaagagcttttaaataggattgatatgccatcacacttgcggtctgtggaaccagaagataggattcagtggcttggaagagaacttacagaggcacatcatgataccatttctctccagcagaaggttgataaccttgaaaactactctggttctttaagtgctgatttggaagactcgaagagtaggatatccgttcttgagtcaaaccttaaagctattacactagagagggaacatctttctgaaagattggacgttctgaatcatgattatgataaacttctagcaaaggcaacccaatatgaattagagaacggtaggctgcagagtgaagttactagttttcaggagaaccatgagatgcttgcaaggaaggctgatgagtttgacctcaagaacagaagtctgcagaatgaagtagatgatcttcagaagcaggtggccgagatggctggaaatgagaaacagattcttagtattgaagaagaaataagaagattacagaatttggttggtgatgtgctacaagatcctggactagaagatcaaattttcttctggcagtaacattgagtgcttagaaatgttgctgaggaagcttctagaaaattatgcaaaattttcgaccataagacctgtacttggtggtggaattgatgagctgcagactgacgtgatgactgtagaggcagctaagaacttaagcaaaacccatgctggggagtccgatgaagttatcatgaagaaagagcttgaggaagctttgcacgagttgattcttgtgaaggaggagagaggtgtatttgttgagaagcaacaatctttggcccttgaaattgaagctctggttaaaagaagggaggagttggaattacttctacatcaagaggagcagaagtcagcttctgttagagagaagttgaatgtcgcagttaggaaagggaagttattggtacaacagcgtgacagtctgaaacaaaccattgaacaattgaatgctgaattggaaaatttaaagtctaaagctaagacccaagaagataaacttgtagaatatgataagaagtttgaggaactgtccatgtatccagaaagggttaatgtcttggaatctgagattctgttgttaaggaatcgtttgacagaaaatgagcagcatttgcaggactcaggacatgtattgagcgtgatttcaaatactttagctgattttgatggcggagatggagttaatgctgctgacccagtgaagaaattggagcaatttttgaaactgtgtcgtgatatgcgttctgatatgatttctttagaagaagcatcaaggaaatctaagcgagcagcaggactacttcttgcagagttgaatgaagttcaagagagaaatgatagtcttcaagaagaactagcaaatgatgctgccgaactttctgaactcacaaaggagagggatctagccgaagaagccaaacttgaagcactttcgcgtcttgaggagttatataatgttcactctttggaacagagaaatggattttctgaacttgaaggtttaaaatctgttgtagatcaacttaggaaaggttttcatgatgtcaataatctactttccgatgtcttctcaaaagatctagaattgctgcgcaatctggagtctggtatcgacaagtgtctgaaaccaaccaatgctactgatgaggaaagcgtgcctcgttttagtgcatccagccttatatctagcggttcagatggcaaggtattcgtacatagagtggtcatttttctgttttacttcccttttccatgctattggacgagatagtctctacaatggtttttctttccagaggttggggaaggggagaatgttttttagaaaactacatgcttacaaagacaaataatgtttagaatattgttctcggaaaaatgttctcaaactactttatggtctattatcttgtccgtctttttttttcttcatttcaacatttttaaattgctcattaaaaagtatatatgataattaaaaaaaatattatagcatcttcattattttgtgtggtgcttgttaccaaaaagaatggtttaaagaccttcattcaatattgttttcatgtcctctgtaatcaatattttccttgctaccaaagattattttctttttcattttggttgtgtttgtctgattagttcgactctcttgtaaagatagtaactggattcatgtttttgttgcatttagaatggattcttcttagaataaaatgctaattataatggccacttgagtctagctcaagcagttggatttatgacttgtctgacgatataagggtccatctattgttttttcaagaggatgtattgttgttattatgctctgtattttacttttactgttattaatgatgtgtagcttgtctctgtctagcttggtacttttcatttacagctttgaatcatcacttatcaactcttctctttttttgggtgcttgttcaggattggtatttttcgaagggttcttggttagactccattatgcatgataattttgaaggcagttctgtaactgaaatctgtagttatgttgggcatcaactggaagaactcacgattgaggttggagttcttaaagaaaaattgcagagtcacacgagttcattacatgaacaagctagcagtctgtctaagttaatggcggtcgcccatagagaaacaatttcccgatgggagttgtatgaagccatgaagggagacattataagtaaagaatcatccgaaaaagaaaaggacaaggaatttgttacgttgcagaaaagtattgctttgtcttttgaagcattctccaatttgcatatggaaattgaaaaagctaaagctgaattacttggacataattatggtgcgggagatcaagggataaacttagcgggtcacctttcctctgaggaatctattaaaaccatggaagacaagctattgtttgctatccgggagttcgctaggataaaagctgaaattgtggaaggtaaccaaaaacaactgaagactgctgttgcagatttgcagaaagagcttcaggagaaagaaatttcaaaggaaagaatttgcatggaacttgtaggtcaaatcaaggaagctgaagctgcagcagctcgctattcacttgatcttcaatcttcgagaagtcagattgatgatttggagaaaaatcttcaagtcatggagcatgaaaagaatttacttgaacagaaaatggaggaattacaaagtgtgcatgcaacaacatccacagaattacagcagagggtcagatcactctctgatgtgattaatgccaaagatcaaggtcagtttactttggctttgatttgttttagttgtgtccattgtcatttattgtattgaaattatttatgattacagaaattgaggctttaatgcaagcactagatgaggaggagtcacagatggaggatcttaagaaaaagaaagaggaactagacaaggctttacagcagaagaacctagatttggagaatgttgaagcgtctcgtggaaaagttatgaaaaagctttccacaacggtaactaagtttgatgagcttcatcaattatctgcaagtctccttgctgaggttgaaaaccttcaatcacaattacaagatcgggatggagagatatctttcttacggcaggaggtcactaggtgcacaaatgatgttcttgtagcatcacagctaagcaacaagaaagattcagatgaccttcaagagttcttggcatggtttgataatttgattgctaatgttggaatgcagaatattcatcctgatattaaaaataatgatcgtgttattgaacacaaagaattacttaaaaagaagattgagtcttttgtgtcagacttcacaaatatacgtgaagctgctcaaagcaaggatacattattgcaattagaaaggagtaaggtggacgacttgatgcgcaaaggagaaattctggagagatctttacttgacaaggagtcacgcttaagttttattgaaggtgcagaagacccgggagtgacaacttcagcaacctctgaaattttggaagttgaacccctggtatgatgttggatatttctttgtattggtctaagtgttagtaatttagtaatacccttttttccatcaaaaaatttgtattaccctttttgaattgtgttttccttggaatgtatattttgttcgttatgaattttcatacatttgtgtggtatgttccaaattatacttccctggtatttgttaaattaagagtactactagctgtacttgtttgcatcatctttgtttctgtagtttgtgattggctcaactgtgattatattttcctgctaatgacttggttgttgtgtgcttatgcagataaacaagtggacagtgccaagctcttcagtcgcaactcaagttcgaagtttacgtaaaggaaacgccgatcaggttgccattgctatagatatggatcctggtagtagtaatagactagaagatgaagatgatgacaaaggtatcttaagcattagtaatgtcctttcctctcaaattatagctttcttatttcggattgcttatactcattttatttgtctcctctgcctcagttcatggtttcaagtcacttactacatcaagagttgttccaaggtttacaagaccagtgactgacatgattgatggcctttggtatgcatatacttatctgtgtattttatctttttgagacttggtatttttcacggggatgggttggagtttcaagctttcaatcaaatttccatatatcttgataaggttctcaaatgaaaatggttaaaattttggtagataagttggtgtctatgccttttttttccccttcaatttatctcgatgttttgaatatgcttaataaattctgttgatgcaatccaccagggtttcttgtgatcgggctctgatgcgtcaacctgcgttacgtcttggtattataatctactgggctatattacatgcacttctggcaaccttggcaatatgagaaaatcaaagatggttagtggtcttcttatttt

SEQ ID NO: 184499 - DNA, 2522 bp, Cannabis indica
gagaatgaagtagcagatttcacaactgttatggaaacaaaatataacagtactgaactttaccctttagtgaatttgttaaatgttatgtaaggtggaaggaagaaacttgagcaatataattggcaattcaacaggtagaaagaaaaaacaatgataacaaagagcttaagaagaaattgcaccttcacttcatcgtagagttttttttcccatgctaataatttatccaaaatagaggcatgcgtttcattctcttctgtatcaaactcatcatttccatcttcaacattaaattggcctctaaatgacctattccatgtaatcacacgcatcactctagccgagtgatcaatatgccctgttaaacacaccaaaagaaagaaatttatttcagattccaaaaccactctaaacagctttaacaatcaatcaataaattacacagaccaaaaaaaaaatggcacctttaatatcaaaatgcaaacttttttcagcctacttacttacttaccgcgattatcagcaaaattcgagtgatagtgaagccgggttgcctcaagcatcttcgaaacctcatgggcactctcagaagctttcagaaaatgatcatcaagatcattaaatagcttaactaaattaacacctttaccactcattctttttgcatcccctgaactcgaacccacttgcttcaccttcttcatactcttcccagcagcaacacagcgtcagcagcatccggaggaggaggcggcggagtatccagaggaggttcatccatcgctacaacctccggcatgggttcctccgggtcaacctttccactactcccaacttcctcttcttccacaatcttaggcctcttgtcatacccattacgctctatgtcttctttcgaaaaattaatctcatgatgatccatctcactagttagagtcctaggcatagaaacgttaaagaaatactcataagtctcctgttgctgatacgacgtcgttgaggtacttccgttcacatgagattccgaaggcggcggcggttgttgaaccaccgccggcgccggcgcctctctgttacttctactatttctctttcttctcaaagacccaccttcgttctcaatttcattctcctcctcgtcttcttcttccacgatggtcttgggcttcggcttgggcttgagtttgggtttaatttcgggggcggggatctgcatctccggcggcatggtagccgcgcgctgaagcggagaagtagagaaattcgcaggcggaggcggcggaggaggaagggtttcggcgaatggggctgcgccggcactaccgccgccaacgccaacgggagctgacgtggaattggattggacctggctcaattgaggattctgaacctcaccctcggcgtagtcgcttagggctgcgccggtgttcttaagatacatggcgtaagaggaatgagccgccgcaaaggcgttgcgagcgatcacggcttctttcatgtattgcttccgctctttacagcgagccacggcttcttcgttctcgatcttcgattgcccacaacccatcttgtagttcgcgccggcgattgatgggtcggctttggatttggctaataaatcatctatctatctatgtaaccgttttctagagagagaaacaaataatggtaaggagagagagagagttgtgtgctttgttgggttcttctcttctctctctgcacttttttcagtgtgaggacaaaagaaagaataattggaagaagaaagaatacaaagacggtgccgttttaactttctttatttattaatttttcaccataaataaataattatttacatattggctgtaaacctgtaaaggaaagagccagacaaataatgaattattaggaaattgaactacgatattcgaggatgagaaacactcaagtgtttggatcttttttgtttgatgacaaaatgggcatatagtcaaataagaaatcaaaacaaattagaattaaataaccaagaagtactgtaatagttttggtaatggtataaatgtcatgtgtgccatggaatctataaatgtcatgtgtgaataatttatgtaatttaaattacacacatacacacagtattttttgaatcaattacacatagtattaagtcttcaccttattataaaatttcagtaatgaataaataatgttgtgtaatattttagtgtgtgtatactctctttaatttactcaacaaaaatctttttttttaacaatatctaaacactttgaaataataaaagaatatttatataatgaataaataatgttctgcaatatctttttttttatataagatttctattttatttaagaattttttaatttctactatctttttctctatataacaattgaaaatatatctattttgtttttttaattagataagaaattgtatgcttgattttttatacaatatttattaatttatcttaattaaaaaagtgaaagtttatattattagaaag

SEQ ID NO: 184500 - DNA, 3492 bp, Cannabis indica
tttttttttttttttgcaaataaaagtcaatattattgaaaagaaagaaaaacaaatggtgtatggagaactgaattccgtacaaataagatgcaaaataaagacgaataattaaggtggggtcatgacatgagaaacaagtagctagggtgatgataaatatagggaaatttcaatttttctatattttggagttttattaaaaaaatgaaattatataattgcagaatggtttacttcttcgagagaagttaatgatgtaacagtttaacggtaatgtttctgtatattctgtgaatgtcctcgaattgatatatatacatatatcgagagagatggagaaaaaacaattacatttcgatcactaattacttttcacaaatcatcaattgatgatacaccagatgaccagaatacaataatcttttttttttttatgcataagatcaatgtgtattgctcaatcaaacaccattatacacaaactgttccacaaaaacagaaatttataattatcttacaagaaaatggcttaaagtacgtagatcaaacctcagcctagtgtatccaggtctatataaattatttatatgtatattgtttatccaaacatgcatgcatgtataaggtagctgttaaggaactactgataaaacagtgacttaataacattttattaaacttaaacaacccttggactttccacggccacagaataaacttaataataacagtactatattaattaatttaactaattaatcagcaagccagatatatagcttgcgtttatgtatatctatatagcaaaaaaaggcgacaaccgaaagggtagtacaattgtgggtgtggctgacagtgggttattcacatgaagtgttcctataaacaaaaatgtaaaaatgtaaatatatttacaaacgaataaataattaatgatttattatatagtgaagagagtaagtgtgagtgtgtatacagggaacatgggtttttgctaccccattctttggtttggtttgtcagcatgtatgaaaatttggccaacgtccccttcacgagtatgacccatttccaactcctcttgttttcttcttcattctcttccatctgcttgtcgtttcttcttcttggaatgtgtgcttttgatactctacacactactactcattactacactttctctctctacaactctattctactcttctcttctcttctcttctctatacaacatctcaataaatatatatatatatatatattcttcattagccgatgctagctccttgattacagtaataagattgtgctcgacaaccactgaactcttgccttatagttttgaaaaaacaatcaaaggcccccagcctgccccggaccctctctcataaaactacttcggcttaattaactatagacaattaacctcatgatcgatagcaagatacaattttcatcaacagtagaaaatgacatgattttaaagcaagaaaaagaaagaaaagataagaaatgatagaaagaaacaacaacgaaaaggactaaggaaagaatcccttttatttggtgccctccctcgatcatgcatgatagaattattaactaattaatagttacgacaaatgatcactatttaccatataataaaattttatctttagaatttttctttttaccactttaatgtacatgatagaaaaacaaaactgtaattcaaaaacaaaaccctttattaatcctccaataaagatgtaatcaggaaaaaaaaaataaagaaagaaaactcaagtagctgctagtaaaacttgatggtgatgatataataatatatatatctactttatacatgcaacaacactctcccggccaagtacccaaaaacatggacatatcgaacttaattaattacagatatggcagttggtcgcagtattgatcgatcatcttttatatcaccttgatagcacattcacggttgtggtgtaacatatattggttaacccaatatacatttgaccgactctttaaaaaatgtactttttctttgttgtttatttttgtttttcttttctttgaaagagtctctttcgaccacttaagttaattaaactgttgatgttccaaccatggccaaaacccagattggtcatcaatagcacaaaacatattacttaagctctcttctttgaccacatgatgatgatgatgatcattcttctgatattggagttgttgatctgatgatcttgctgaagacgaggtctgaaagagctgagccacatgatgacctgaattgggcctgatggaggttggaaaaagagcccttggatgactcgaaagtgggctgtctattgctgctggtgttcttgagatatccaacttaatatcagagctattctcacttctgttgctgcaagacccttgatctgtttctttattaagattgattgattcagttggctctctattttttagagccgatatctgtgtgtgtccatgtccaaagggttccattattataattatttacaaactaattataacagtcaaaataagtcattacaaaatatacatagcaatcatgacaaagatattattatttattatttcagtatttattgtgttaagaaatgttgtctactgatgatacatcattacactttaggcctctgatcatcaaacaaattatactatatcaatcaatcaatcaaaaaaagttaaagcatctattatcagaaaagggtgttgtactaatcttcgatagaattgtggttcattcaagaaggctggctcatccacacacagaagaaaaaaagttcttaaattatgacagacataaaaagaaagaaaagaaaaacaaaaatatatgctcaattccttaactaaaaggattcttttgctagctaggtgagaaagaggagaagtctaaggttctcgttaaaaatacaaaaatatattcttgagcgaatcaaaagcaatataattataatcccagtaatatataatgtatttatgacgactaacttttgaaaaaattaattacctctgcttgaagtttgtggttctgagcttgaagaacatcattatcagctttgatagcttcaaattgtctcttaagaagatcgtaatctttctcaagctgtttagtcttccacctagctctcctattctgaaaccaaatagcaatttgtcttggttgcagaccaagagctctagctagctgcattttcctttctggctcaagcttattccccaattcaaagttcttctcaagtgtcttaacctgttccatattaagtctcctcttcttttcccctgcttgagatccatcatcggataaatcatcttctcctccattgccttcttctcctagctcgatacccgaaaacgataccgatctcttacctagaaacgatgccactcctgccaccatgaaacaattagtatctcaataaatccaaaaaaacgaaatgaaagaagacagagaag

SEQ ID NO: 184501 - DNA, 4160 bp, Cannabis indica
accaaagtgcatgttaatacaaacagaaaaactctttctgaacttgctgcttaatatggctcttcatcatgtctgaatagtatgagcaaatgtctcggttgaagaattagaggcagcataactttacttatgcttcatgtttgatgcatccgaaatttaacatttatacttatttcgctcttagaagcttaaagaaaggaaaattttccaggcctttcctataattatttttagtgcacaatacgaagattgttagataagatatattttttttattgttattgttggttggtcagtaaattagattatcgattcaaaatgaagtacgattctgtaattgattttcctggtcttccagccaaaaactttcaactgctgttgtcagaatgttaatttttttttctttcttacaaagcctagaagttacaatctactctgcatatgcatctacatttttcttgttacattaggtcacctcaattcaagatctatattctcattatcgttgataagtagaaacaggtgatcaccatcccggatgacacttatgtcatcaatttcagcattctctgcattgatgattttcacaggtttgctgcttccgaacttttcacctgcagttttacgaagagtgagaaaggaactatgcatatacctaagcagtttgctgagtttgttcaaggtttgtatttttcttatttttgatttccgcaataatgttctttattatttaatttaaagcaatagtgaataatgaaatcttcttatttcaggttggctattgaaaaatgcttaccagcaaccttgaacagctcgtcaattgagtcaggtaggattattaactttccatgttgccggtgatgtgtaatactgttttgaaactgcatgtggatagtgactcttttcctcattgtttcttttcccttctggtttccagacgagctagaagttcttatatgtgagtctgtctctgcctttttcaattgggaagtgctttcacctgcttcgggcaccaaaaactgtattctatgttcattcgattttctattttcataacttagtaagagttcacatatgcttttatttccttgctgttctgccaaagctttaggcgtccatcctctgctgtccgatatgctcgtacttgatcctcctccaagtaaattcttaacaacctcaagatgctccttgctgacagcagcttgatgagccgttcgaccattatctgtcatagagttcacacacaatgaagagcctgtaacactcttctcttttttctttggccctttgaaatgataattcatttcctcccgtattactacatcctcttgtatagtatcgctacaccccatgtaagaacagcattcttctgcttgtcctaagccttcagaccactcgttgatgatcaattcaggatctaaatgtgggttttcatatcccaagttctcttgccctttcattttctgtggaaatgaaaaacaaattaactctaaagacaaccttgacactcacactcggaaaatccattttctgtttttaggaagttttcctaataatgttttgcttaccatgaaaaaattattcattatgatatggccatcttctgtatttgcttgtatgatattcatcagtggtgttatattgagccgtaatatttgagcaagctcagttgtcctaactgtaaacggttgtggtctgtaacataaaactccaatttctccaaatgtatctcctgaatgtgcttttccaataacctgtgaaagcatgttgaatgtgaggatcaatatatatatatatatatatttatacatttggagaaaagtaatagcaatacgtacttgatcatgtccaggagtattggatatgaattcctgtggccacaaatttgtaaagtaaactttgtgttagataagattatttaggattttgtgaattaattaatgcaggactgagactaagttaaacttaccactgctcctgagacaagaatatagagatcggttggagcctcgttctgcaaaattacgtcttctttaggtgggaagtactctgcctccatctctgaaacctttaaaaaaaataaagaatgatatataaataaatcattaattaaatatttatttgtaatatatcttatatttattaattaataataaggatcaaggcatgtgctttattgattttgtgggcccaccagaccagttaacatggttgtctattggcttacagaaagactccattaaaaaattaaaaatgatgagatagaaaaaccaagtcaaagtcatgtggttttgatttgttaccaattggaatatgaaatcttgagaaactcctttgaagagatatgctttctgcactgttggtaagaataaatggtaagcaatacttgaacgtatggcctttggtagactgtttaaggtttcttgttgttttagtccttctgttttgaaccttagacataagtgtgacaacatttgatcttgtactctaggaggcaagtgatttctttgagcaaattctgaagctgctctgattgtatctctctgcaaaaacacaaaaagtagtttttaaatatctacattttgctttttttagttaaatagttttcatgttcaaaataatcattgaaccaaaatttgtttcagctcatctttcagtcaacaacgtggggcggttttctgatgtttgtagcattttatgaggtttagatttttatatatggcattatcagatgtagggtagagagtaatacatgtattgtgtgagagagggaataaagattggatgggaccaaaaatatttgaagggcccaatagtcttaaattgcctaaacagacagaacagggccaaataattgaaaggcctagtaccaccataattaaggaccattactgcatgttataacaattccacctctaatactggcctggaaaaaagagagagaataattaaaaaaaaaagaaaaataagagagaaaatttattgatttagaattttatgctctgggtaaacatgtttaggctaacataacatgggagatggggtcagccactagtgtaaatactgattgggacaaggctagttagaatttgttttctttttttttttcttttctttctttctaaaaatatttagcaggtgaaaaaagatgcacaagttggagtagtaaagaccaaaaatagagagatagacagacaactcacgaagtttctggtgcggctggtccagtgaacaaccaagtttgtcatgttcccaatgaggtaagatgttaatcccaaattgaaaagcatgtataggatataaaaaagcatttcccttggattttcagcatgcaaatctccataacctgtggtggttagtgttgtgatggaccagtaaattgaagctacatatctgttccaaagactatctcttttgaaattcgggttcactgcaccgatccatgtctggcttggattcggatatctgtctgcgattagatagttaatacatccggccaagtgtactgcgaaaagggtcacctgaaaagctcaaaacaaaacagaaatggagtgatcaataagatcagtttaggagtaataataatatatatgttttgttcacataccgaaataagttttgtgcagcgagtccagaaatagttgaagcggatatctttctcaagtctgaataacaaaagaaagaaagaagaatatgaatatctatatgatcgatgatgaaatggaatgaaatagaatggaatgaaaccttgcaaagagagagctgactcgtctgagacgccagagcctgagcatgttaaggagtttaaaaccaagttcactaccatgatgatttgagaaaagaaggctaatggattgaaacggggcagtagagcaaacatcgaaaatgaaccaggtacataggtacctgaattaaataaataaagaagattatgatatgaactatgtaaaaaaaaattaattaaagcagagtttattagtttactacctaattgcaatcttctttggattatcaataagaagatatgtgtggctgtcgaggtatgctacgaagaaagtaaggaagatgtcaatggcgaagaagccattgataatgttgtctattacgaataaagcatcatcttttttatatggcaggaatgcaaactcaaaggggcatat

SEQ ID NO: 184502 - DNA, 8295 bp, Cannabis indica
agtgagagagcggaggtggtggtggggcccccgtacaaggcagggtgttgccatctctcttgcgacaatattattctacttcgccacaaatactccttattctacatccattttctctattcttttcattttttgtatatataaagagagaaagagagagagagagagaggaatttgctggtcgagaaatgacatcgaagggttcgacttctcctgtcaatggaatgttaccgccgggagatacaccgccggacttggaggcggcgacggcaacggcaaccgcggataatgataacaaggagaggagttcggagtttgataatgaagacgatgatgttgttggttcctctgctgatccatttgacattgctaacaccaagaatgctcctccggagacgctcaagcgttggagggtacagttttctttattattattgttattgctattattgatatgattatttgttgaaatgtggtaaggttaaggtatggtgtgtttgtttttgatgtaatgaaattggaccaaagcattgggtagattcgtttccgtgagaatgaacgaatgaacgaatgaatgaatgaattgaccaaatacgtgaagattttatatgaatggagatttgaattgtttggcatttgatcagaatttagacacacaatgcttaccataaacggattggaaatggagttttgagtcctcaattggaaatgaccgagttttgtttgtctagtaaagattggaggattcgaaatatgagtaaaacagagaaaatgttgtgatgtaagaacgagaaaaactcttgaagaggtttagtcatttcatgaacatgttttattggaacaaattatcatgccctttctcagaacttctcagtataagaaacttcattgaagaattttggaggttgcaaagcagaatggtttctcaattcaacattaacttttaattgcttattcatttataaatttgagcaatgtcattgtttgtactcttcttttatgtttgaatcattctttattcaagaaaaacatgttgtacttttctgttgaataaaaaggtctggttctttgcagcaagctgctctcgtattaaatgcttcccgtcgctttcgctatactttggatttgaaaaaggaagaagataaagagaatagaagaaggatgattagatcccacgcacaagttataagagtaatgattttactcctaaaattcattaacactcacacatttatgtgtctaaatatatcaattctaattgatgattatttttcgacatatataggcagcattacttttcaaaatggcaggcgaacgacaaattggtatgacattagtattttattttgatttgaatggttaccttcatgtttgtttttctactttacatggtcttggtaaatttttgtatttagttttgcctttttatcctcttaagaggtgattccaatggatgtttttatacattttgcattatgttaaggttattatatacacttgattatccctacgaaatgtcataaattgaaattactaggttaggtgcattattattgttttgaaactagcctcttcggtctaatcctattatatttggggactagaaaactacaattgctatgcgagtgtctaggagagactcaaacctcagaccatgtgggagcaaaccacatgccaaactaatcaagttacgtttcttgagtgttatgtgcattattttaagatgaccttagttagaataattgagcatgacatgcgttaaaccacatagtatagaaaatgatctagggtcctttacaaattctaagaacgagtgattggttaggtcatttgaagaggaagagatcaaaagggttgtgttttagtgtgaaggtaacaaagctccgtgcccaaatgactttatgttgaaattttattagcataatttggcaattcgagattgattatgcaagtctttcaagaatttcaccagaatgcattgtgaattcactgacaagacttataccaattccagcaaggttagtgattttgacctattctattcgctaggattaaagtgctttgacaaagatgactttagaagttgaaggagcttcatgaaggaagacaaatcttagatatacttttgatgactaatgatttagttgtatattttgccctgagccaacaattgacttcaaaaaatctacgacattgttgaatgtttttcattgattttgctcaagaaaggaaaggcttcaacttaaaatgaagatcttagatcagggggatgaggttttgagcctcttagttatgattttaatgggagatcaaggcggaggttcaaaggggatagatggttgaggcgaggacactcgatacaatcgttatcacccttcttgtgtatgttggtggttgatgccttgggttgattggtggataaagctaattcacttaattaggtttaacattgttatagattgaaatttctcatctctagtttgttgattacatgttttcttctctaagaagaatacaactaatttgtctcgtcgtctcattcttagtctgaacactctagcaagtggtatggggtgtaagctatggggcctgggttagtgtcttgtcctattagggcaagtttttgggatgttgggaggatgattaaccttactttatttttgttttgcaagctctcaacttacttcatttttttagcattcttaaaaaggtgggagattgagggacatgaaaattttcctttggaaaggtagcggttataaatgtggatcgcttaatcaattttgaagatgtttgatcgaaggagataggatggtagttgggaacattttaaagcaggaataaggcttttgctatgaaatgactctagggatttcccttagaatttgattccctttggcgtgagatcatcattaagagcaagaacgcagtgcactccgttggatgggtcgcaagagccacttttagaatccattggaagtttattgcttcgatttaaagaaattccacatttttgtttcctataggactagcaatggagaaagagttaacttttaagaagacacgtaagagatgattgtctagcaactagattcatactcctttttaggctaacctacacttttaacgctaacatagcttatctacaagggtaattgagatttttgaaaagtgtagtgctcttgctaaattttcatttctttagaaagataatcgatttagatttgattatgtttcttcaattgtactcctttagacatgctatcagggattgtagaatgtggaggatagatgattacaaatttttacttctaccagtttctttttatttggaaagcagttgctctgtattagatttaaggctttcaattgatttttgttgttggaaaagtaaaatgcttgtgataaccttcaaaaaagactcctattttatgctttccccatattggtgcattcttggtatgacgaggatcatctcttcctttattgtttgatgtcgcattccctttagtttatgctattgaaagcttttggaattcattgggtttggcctcatcgttgtcttgatattttgttgttgtgtggatgtttagggtctcggtccatcataagagagaaacttcggaatgtcgctatacaagcattttgttgggcactttggttagaaaacaaaaccaatttggatgtttcatctttgggagaaacttaaactttctatatctatttgtattttttaaaattatgaatttcatagatttatcctttttttcttacttagagatcgtaatgatttttgttggtttgtaaatctagaatgtctaaaggtgatccataaggggatagtttcttttacaatatagttgtaaatacataagggtgggaaattagaccatgtgacacattatcattattgatgacaaccatggccattgtaaaagttggtcttatcattatgcctagggatggaacaaagagttcatatcttggagttattgtatggtcgcttcgtgcccaacaacgtttagtctgtgataaattttgagatctgattccatttagtatagagaaataggaagaaataaaagtttattctttatctaggattttggagtttatagaataagaaatttagtatagattttgagctctgataccatttagtatagagaaatagtaagaaataaagtttattctttatctaggattttggatttttatagaataagaaatttatggtcagcttgatcttcgttcaatatcatgtttcttttaaatgaaattttatgtttactttgaagaaaagtgatgtttattctatcgttttaattttaccttctagtactgggcccaactgttgctccccatctccaactggtgactatgcaattggactagaacaacttgctacgttgactagggatcacaacgtttctgctttacaacaatatggaggggttagttattgggagtcttgttttttcgtatgtacatatatttttttgtgctcatggatgataatcaccaggttaagggcttatcacctatgttaaaaacaaatcttgagaagggaattgatggggatgagaatgatttgttcaagcgaaggaatgcatttggatcaaatacatatcctcgtaaaaaggggcggagtttcttggtatttatcttctttattaggtgtatttctgctgtaaaacgtttattttactaaaaaataattttccatggatgctattaaatctcatgctttgtccttgcagaggttcctttgggaagcttggcaagatttaaccctcataattttaatcatagctgcagttgtgtcattggtacttggaataaaaactgaggtaagtcctttaatgttgatctatgtatttttaggtatttcctcaaacaagactttttgatatatggaaggttgagtttataaaacctagtactacaagagttatgtctaatggtcaacccatgatttgctcccttgtggtttgattccagccatggacatcctagcaatttgatagacctaccgagtaatgtaaggcttagcgaaggaaagtattttagggggaaaaagtcacctttatgttaagattacaaagcttactatgtaaagtataattttctctctagatgtgagtggcctcaacgataggtcaatgtaaatattgtggtgcatcaaggccttttgagcacctgttttttgggtattctctgttcgctttgtttaactttcctcctgtttttttgggtttctctattcgctttgtttaattttcatctatcactcttcagtcctcaaagttggtttctgtttctattttctctctgatattcctcagggtcttgaggaaggatggtatgatgggggaagcattacctttgctgttcttcttgttatatttgtgacaggtaaatgataaacctctctgatgcttttcagtacatcatgtccatataagagtttgtgcttgtagaaaactgccattatactttgctatattttgagtttgtatgcgatttgggttttgttttttttccatgacagtacattattttttatgatcttttaactttgttttttatttcttgtttttacagctgtaagtgattatagacaatcacttcaatttcagaatttaaatgaggagaagcaaaacatacagttggaggtatgaaatattacatcttgtgattttttcaccagaaataagtggtgatgctgagtatgtgccctttgaaaattttgacaggttatgaggggtggaagaatggtaaagatatcgatatttgatattgttgttggtgatgttatacctcttaaaataggtgatcaggtaaatttcctaattgttctatctgttcaattgcctcattttatttatgtattgattaatccaatattcttatgctgcttaggttcctgctgatggaatcttaattactggtcattctcttgccattgatgaatcaagcatgactggcgaaagcaaaattgtgagcttttacacctcttagaattttttatcatcgaatcatattttatttattggtcttataaatccaatgttttgcaggttcacaaggatcagaaatcacccttcctaatgtctggttgcaaagtagctgatggtgttggtactatgctggtaaagtaatttgtttatatatatactagttgttcattgccttacagttagattatctttttctttgctatctcatatttattattcataccgttgtgctttttgtgtaaactgtgggttacagatgcctagcgactagtgtaacacgtcctcatctcatattttagttttactctctagattttcttcgttgctatataacaatttttactaaaaccatcatgaagtttgacctttctttagctctctgtaggtaactggtgttggaattaatactgaatggggattattaatggcaagtatatcagaagatactggtgaagaaacacctctccaggtttaattcttctacttaattgttgttgcttatatagtggttgatgttgcttaaatgttcacatattaacttttggtatgcgataggtgcgcttgaatggagttgcaacttttataggtatagttgggctctcagtggctcttcttgtgcttgctgttctcttgggaaggtaggcctttgcaactgaatgttcttaccttcttattcagttcttctataattatttatcgataataaattgttttggatgcttagatacttcactggaaatacaaaagatccagatggaaccgttcagttcatcaagggcaaaactagtattagtaatgctatagatggagtcatcaaaatttttacaatcgcagtaagagagatatcttggtgtttcttaaatttttttatttggttactttttattacctaatgttaaaaccattcaggtcacaattgtggttgttgcagtaccagaaggactccctttggcagttactttgacgtaagtgcaagccttttggtttcaatgcaacaaagtattagggtgcttacttcttattctagtgtattaattgaatttgtgattacttatttcatcaaatttgtctgtatcgttctatgacagtctagcctactcaatgaggaaaatgatggcagataaagcattggcaagtattactttacattttattatctttgcttatttactttgaacaatttttttcagttttagattttccccttgtcgcacttgtatctttcgtaatttttcataaccaatttttaatagatgattataaatgtgtacaggtgcgaaggctgtctgcgtgtgagacaatgggctctgcaacaacgatttgtagtgataagactggaacactaactttaaatcaggtgaagtacctatattcaaaattaaatatttgctcttgatggaaggttatttttttaggctttttacaaaggtttttgagtagtaactaaagcatttcaatcatttagaattatactgtaaagagtactgtctttatacactaacacaaaaaacattactacattagatgaccgtcgttgaggcatatgttggcaaaaagaagatgactccaccatatgagccttcacagttgtcatcaattacttctgcaatactgattgagggtatagcacagaattcaacaggaaatgtttttgtgcccaaggtaagcctctcctttttctcaacttgacaattttacccatatcccatttttatgttggaagacatgtataggaagatatattattgtattataacaaattatcaatacataaatgaaatttttaagtttcttttctacctagggaaagaaaacattgtttctcatttgtttatatatgaatctatattatcttctctaggctttagtttctctaattatgctgtttacttacatcaattagtatagtaggtatatatacactatctcaatttgtacagaagtagaacggataggttcgtggtggtttccacaggtgtatggtttgagtagtagttaatggtgtgaaaaagactttagaccaacaagcttaataacaagacattataagtaggttcttgcaaagacaatttcagagacttgagggcttttaggtaggggaggcaaattttcgatttgattcttgtggcaattgagttgtggtggattataggaacagtagaaaggaaaggaatggggtgttcgaaaaattgagagaaagcttagaatttgtaatcaagttactatactaaattcttgtcgaaaatgaattgaggttttatgtggctcatcattc

SEQ ID NO: 184503 - DNA, 4179 bp, Cannabis indica
aaaaaaaaaaaaacacaagcagcttcttgtgaaatttctttcaattttcttatttggatattttcaaatctcgttttacaatatatttattttatgttataagatttgctgtctgtctataaatttgctatttcatctcttataaagaagaaaactcaaacaatacatcaaaaataaagaactttaactgtgaaacttgccgagacaatttcaatgtcaaaaatcactcctttatataagcttaaacacactgcatcatcagccaaaactacatcgcctgactcactcgagtcacaccaattgcaaccttttcttatcaacaaaacaaaaaataattgtctgcaaatccatgaatccctcatccatactgcttttaacaactgaaaattcccatattatcaatcataccaatgtaatgataatatagttctaacctgtgcaataagaagtaattatcacatgaactactgccacataatggtgacattgtaccagtgtctccataaatagatataaccacgaaattaccagtaatctccacatgaacactggccatcatcaaaatgatgaaatctatttgaatctcgtaaaactattttacgaccaacaatctttgatatatatttgaaggcggagtggcagtcaccacaaactcgtagatttttcataatcctaataggcaactgtgatttgcgagtaagaacaaaagcaacagcaagcttctcactatgatagctcaaaacttcttccttattctccatctcaaggtcataaagtgcaaattttaattcagggatatagccagcatccctcattttcttgttaagttccttcaacttttcatatatcaattctttctctggatgtgatttatctccagctacaaaaacatgaacgccatctttcattgtcacccagctacacccagcttctttctttactgatgccttcctcattgccattctagcctttgccacgtcctcccacttctccccagatgcatacaagttagcaagaagcacataattcaccccattttgcggctctaattccaaaagcatttctgcagctctctgccctagctcggtattacggccattagttctaccgcaagcccctagaattgtcctccaaataagaacattaggcttgaaaggcattttagttatgaaatcctctatcttcttaagttcacctgcccgcccaagaagatcaaccatacatgaatagtgctccatcttaggagccaaaccatagacttcactcatggatttaaaatgtttgaatccttcatccaccaaacctacatggctacaggctgataatacccccacaaacgtgacatgatctggtaactgatcatgcagtttcatttgtataaaaagcttcaaagctttgtgtccatgtccatggcgagcatacccagatatcattgaattccatgaatacacatttcttacaggcatcaactcaaaaaatcttgaagcataatcgattcttccacattttgcatacatgtcaacaatggcacttcctacaacaacatcagattctaaacaagctcttatagcgctggcatgaacttctgtgccacgttctaatgttgcaacagaggcacatgcactgaggacagtagcgaaggtgaaggagtccaatcttctacctttctgcatcataaaccacactaaatctatggctttaggcaatagctcattgtgtatgtatcccgatatcatggaattccaacttacatcatccctcctcccagacatcctagagaaaattttctcacaatgatctatctctccacactttccatagcaagccaaaagtgcattctcaatagcacaatcatttgccacagggtattttaatactacagcatgaatttgctgaagaggctcagtaagtgaaatagatgaaaccgcaccaagaatgttaataaaagttattttatttagtgtccaccctgctcgcatcatgtccataaaatactttacagcttctaacgctgaggccttagaatcagctaaagcaccaattatagaattccatgatacttgatcatactctggcatcatgaagaaaactttatggcactcagcaagataccctgcctcagcatacaacaaaagaagagcatttgaaactgacacatccagatcaagtcctaatttgagtgcttcacagtgtatttcttgaccaagaatgatccatcccaaacttgtacacgaactcaaagcactaattaacgtaaaatttgaagcaaccaatccaaatcttctcatatcacaaaaactcatgactgcatcttcaaaacgcccattctggtcaaggccagaaatcagggtgttccatgagactaaatctttgtcaatcatgtgtctgaaaaccgagccagcatctgttataagtccacatttagcatacatgctaacaagcccatttccaattgcaaccttcatatttaccaaaccagtgcagataacatatccatgaacctcttgaccttttctctttcctacctccaaatcagaaaattcagcaaaagagcttaagagaaccacatatgaatccaggtttggttcaacttgtcccttcatatatgaaaaaacttccgcagcttcttctccccgtttttgtctcaccaatccaaccattaaaccattcatagagactgaatttttattacccatctgctcgaatatctgcaaagcataatcaattaatccagactttgaaaatccactgaccaaagcactccctacatacaaatcttgtaataatcctgattttttcactctggccaacatttgctctaacatgcttgaacttgaattggccaaatagcaagcagaaggaattaagctaccaaaagtaaactcgttgggcttcaaactaaatctgaaaccttgtgtttgcattctagaaaagagctcaaaagcagaaactgcatcccctcgatgggaataaacagaaataatagaattccatgaaatcgaattttttattttagtttcatcaaaaacacgtcgtgcatcattaatagatgccaaacaatttccatacattgaaatcagtacattggcaaccacaatgtcagaggcatatggtgttttggaaagtaacccatgaatctgcagtccaagtgtaagcattggtggcccagaatattgacaagctcgaagggcactaccaaatgcataatggttgggtaaaaaactagcagaaatcatccttttaaaatgcaagcatgcctcacttagcataccattcttggtataacccgtaatcaaactcgcccacgtaacagagttcctctcaggcatttcatcaaacaacagacgtgcacaaaccaaattacccatcctaacatatatattgataagggaattgtacaaaaacaaatcagaagtaaacccattttttagaatttgcaaatgaagggtgttagcatcatctaaggtacccgaattccggaactgagtagtgagaagttcactcttttcacataggaattgagtattgacgaattcatagttttgacaagagggtggcaaggatgaattgtagttaacaaagaattttccgaagggaggaagagaaagggaaaggagtggaggagtaggaattttcggtttaaagaagaaagaatcgattggagagacaacaagtgaggcagtagaagaacagtatggagttgttctgttaagggtagtcccgaaaaacctgcgagaccatgggttgtacatttgtttcctgcgctaaaacaatttcaatggaagttgaaataatagaataatgaagcttttccattcatattcttacaaacctcaaatacaaacaaacctatcatcaataatgggataaaaacctgtgatactcaagatttcagattgagaatatagatagatatatataacttaaatcttcataaacatttcatgtaatctcagaatctgataattgaaaaacatagtttttgaagaagaaaacgttgaattcatacttacttggtcagagaagttgagattatagcatgagtgagtggtagttgagcggttgtgttgtgcccaaggaaatgaagatagtgatgatgaaactcagctacagctaaggctattattgggctttccgctgaaatggtataaatgagattgaggaaattacactctatac

SEQ ID NO: 184504 - DNA, 2095 bp, Cannabis indica
atcagcttcatcatcgaattgattctgcaccaacctgaacactagatcaccgaaacagtagcagtattcagggtgctcaatcaattcatatgcgcttacagtttcaactgtctgctcatcatccaaattactcggttcatgagtggcaagagttctccattgtacttctacagtttgttcctttgcatccacactcaaaacaacaccccatttttggctgttaagtgtttgaggatcatcacatgtggctttttcttgtatgaactgttgagggaaaaattcataagaatttacaacactcgcgggaagcaacattggcgagtctagtcctaaagagatactcccatcttgccacacaacatcaattttggtctttgtcttgacaattacagatatttcctcaatgtttgagctagaatttcttccgagtcctctttcgaatgtcttttgagtgttgatgtgtttttgtgtagtagatgatgcaggacccgaaattggaagtatacaccaatcaccaagttgccaattttcatgggaaaagcatgacagcaatgtcaatttcttggagttcaacacacgtggtggagaaggaagatctggattattaggcgtgagaagagaggcgagccaatcaacatacaccaaaccagcttcaacaccacaaacagttccttcatcttgatgtgccctccaagtaccacatagccatctagccgagttggaaccatttgagagcttaaccttgactctttgtcctggatagtacgggtattgagcatcttcgagtatgtttggagacatcggtagtagcttgtcatgatccgtggtattcacttcaaattttgttccatcatcaaggacaacagttacatgatcaatgactctagcaactttaccaagccatggtccacaaacaacgaaatctccaaccgaaaaggatctgattttcgagagatttttggagttgacatttttcactatttttccttgaacattctccaaatccacaagcatatcaatgccaactactcttcccatctgacccgagggatcagtcgctgaaagaaccatgtccccatgcataaatcctctttcaaatgagagaaaatcatcaattttttcaatgctttgttccaaacttgagaaaatgctttgagcttgtccaccatacaaaaaatcgatttcttcttgatcttccataccgctatcacttgaactttcccagtcagagtcgcttgtgtatagatccatcgctcaagtctgttatatacaagtatagatcagttataacatagaggagtgattatgaatatgtgattaactaacaaagaaaaacagttataacatagagaagtggcagcatggtaccttgtttagcaatgtggacaatccaacttctttaaggatgagcagttttagtagaatcgatagggaaaaactagaacaattctttgtgataaacacttgaatttcccagttgataagtgacacaaattaatgtgcctgtatctccaaaacaggagatgtaatgccaaaggagatttgcccaacaaggacgatggaagccaaccgaggacttcctaataatgccaaaggagatttgcccaaaggaaatcttgatttgaagtttccaactgcagataccaaatgataatgcaactgcagaatgagataagtcccaaaggaatgagtgaacttaaccgctcgatatcaaggagatttttccaaacgataaagggatgtgtcactcaaacaaaagggataaataaagtaagtaactttgccaaaggagatttgcccaaaagagctgaatccagaagtaacaacaatatttagaccgaaatctaatgccaaaggagatttgccccaaaaagaaccaaagattctttcttggttcattcactgccaagaggagatttgccctgtataaggaacttaaccaatcaaaaactactcagaagttaggacagatatgtatgtatgaaggagttcaaacaatgcttttcgaactatcaaggatcatgagtcttgtctcaacaaccaactgacattgccaaagttcaaatcaaaagagttctatgaatgcttaatttct

SEQ ID NO: 184505 - DNA, 1189 bp, Cannabis indica
tatgattatgtcagtgtgtggtgtggtgcctgtttctttgacaaaagaaagtcaacaaacgacagtgatatcaaaattacgacattcaaggataaaaacgacagtgattttttaagccgacaaacgacattaaaaatacagaaacgacaaaaaaaaagaaaatacatattattggtttaagggtaatagcggtgtaaaccaaaataattttttttgtggcgaaatttacaatgtttttaaaactataatttttgctcaatttagttagtatatactccgtcaatttcttaaacaaagatacatgtaaaaatttatattttaaatttattaggtttgaacgaaaacatgtagtatcaattatttctattttttgttttaataaattcacaacaaaattgaaaaaattggataaatattatagtgttactaacattagacacttattttttttttataagtaacattagacacttatactgctaaaaaattttattgaatttatgccaatgataaacttaaattttagtacttatgatgtgattatcactattagttttgtgagattaaagataaataattttcgttcagcttcgtttgtacatactctattagtgtcttaaacataacacattttaaattattgaatttgaacaaaaatatacaacattaattacttttaatttttttcaataaatttaaaacaaaattaataaaactgaatgaaaattacagtattactaacataaaacacttatgttgttgaaaaaattattaaatttatgtcaattaaaaacttattacttaattacttatgacacaattattactattgattgtgtgaaattacaattatgaaccaataaacgacagtgaaatttaagtctataaacgacatagaaaatacaaaaacgacatcaaaataaatatgttaaaataaattgacagctgtgggatttgaacccacgccctttcggaccagagcctaaatctggcgccttagaccactcggccaaactgtctgtcttttattctttgttagttacatatttaatatataattaaaataactacaaattagagacaaaagtcaaacaattatatttacaatttacttgaagattatcaagtaattttgactttttaaaatttacttactaaatccagaggtggtcggcggcgaaccctgatc

SEQ ID NO: 184506 - DNA, 3348 bp, Cannabis indica
aacatccaacttcacctccaaacactccaatccaagacaccttcccaactcaccacaatggcgtgcacactgccacgggctgccaatctacctgctacaaaaacgaagaagatgatcaccaacccaacaccaacaccaacaccactgaccaattcgacaaaatcaccccaacccaatccaatccccattaccggaatcaccatggtctctgcctcaagtgcaaggcaaaccaccctatatcatcagcagcctctggctctggcgatgacgtcaggttctgtggtgactgctttagaagcaatctgtatgggaagtttcggctggctgtcacttccaatgccatgatttcgcccactgataaggtccttgttgctttctccggcggcacttcttccaggtcggtatattattcgttgagtttatgagaagttgttgaaaggatgaaaatttgttaaaaatcctatctttgaattttgttgtatatatctacagtactagtatgtgcatatatgaagtgtagactaaaaaaaaaggttttttcttgttcatagctttctgggcttttttgtaagtgccatgttgagtgaaaaagtgctcaatagacgtattaagtaaaactctatgcattctccaaacatatatcaatttatgatgtgtaagctgaaaggggtaggagagaaccaaccaaatgtggacagtagcaggtttggctgttctatggggtgttttggttggagagaaatggaaggatctttttaaggaattgaaaatagggctgaagaagtattgggaaagattgaattctgatcagggaattgtctttttaagacctgatcaggggatgggacctcatcttacactaagactaagttaaccttaggtagctgtaatttcaattcatgcttgtaaactacttattgttaggtgtattgttaactacttattggctttgcaattcattttgctattaaaaaatgaaacagaatagaaaacaatcatgtatatcacttctttatgtttattggtgactggcatgtcgacagtttcttaggcatagtgttttgatggagtgaaataatgttactgttgtaaggactttttacattgatttaggtcctttttttatatttctttcctttacatattttaagaagaggatatttttgtttcagggttgctttacagtttgtacatgagttgcaatacaaagcacaactgaattttgaagcaagtagggatagatcgttgccagtcttcggtgtgggagttgcttttattgatgaaagtgttgcttgttctgttccttcttatgaagttattgaaggaatcgaagatatcagacagattgtgtcaagcttagctcctccaactaaagagttactagttttcccaattgaaagtctgttctcgtccacatcaactgacggaaaggatcaactgaatagattgttagacggtgttactgatgccactggtaaagaagatcttttgattcatcttaggatgttgtccttacaaaaggtacggtcaaagaaaagaaaaattgatgtgaatgaaaaaatactatttctgaagaactaaatatttcatcccaatattttgtttcatgctgctatagattgctgctgaaaatggatacaacagacttgtgctaggttcatgtacatcaaggatagcttcccatgttctttcagccacagtcaaggtttatttctttagttgttactattatttcgatgcaatgcttcaagttaacaaaaattgaatgtttgttaatttcttcagtcaatggtagatgacatgtgactttttatcctttgctttttttattacaggggaagggatattccttaccagcagatattcagtatgttgatgcaaggtggaatgtccctgtagtgcttccacttcgagattgtctatcagaagagcttaacatgctttgtgaccttgatgggtttgtatttattgccgttcacattactttataaatcgtattgaattaatattcagtgattagtccaattctcaacttggcagggcagcctaaagactatcgagctgattaaaagtccttgcgctggaatcaatagcctggtctcatcattcgttaagttgttacaggtattctttggccttgatctttcttagtttgactgacctaagctaaaatatttgttgaaattggtgtgacacatgtttatatcataatgatttccacaacttaattgtccacaatatgtttatattgtgagtttattactaccgataaacgaatagtttgattgggcacatagttgctaagtttgcaacactgccattcatggatcatgtgatctataaaaaatagtaccccaaatctttcatatgagctcataagattagtttttttttcctttgtttaatgaagtgttcataagattaatggtctttttttcttaagcaaattgtaacttgtttgagcccacataataattcatctaaaagggtttaaaatcaaatgaaatgtgtgtatagtgtctttcaaagagttcttaaccagcgattctcaatagtgtttgttgttaacattttattcttcaggaggaaaatccttctcggcaaagcacaatcgtcagaacagcaggaaagcttactccatttgatttcaacaggattcccgagatcatcgacactaatgtaccattggccacccgaaggcgtcagaagagatataatcttaagcctaatgaatcaatttctacagaatcattctgtcctatctgcaatagccctctgagtaaatctgaggttctaagctcaacatctgtggaagactcccacaaagattctcatctctttcgtgttgaatgctgctcgagttgtcagtttcagattcttcctaaagatcccatatcagtggacaacttctacatgctgttaccacagccattagtttcgaaagccaagcatagcaaatctgacaatctcagtattctaaggtgagaattagaatgtataaatatgtagtttcataatgttttgtttatttagaagttaataaacatatattctaaatttatcaaataatttgacactgcattctgctaatattattttcagggaacaaatagaagattgcttactttcagacagtgaggatgaaacataatattatcacttcttaagcaagcattaaagtattgatctaaatcaatgtagcactttgaaaaaatatttgagtaacataacatgttcaaatactaagagcaacacttgcatttacattccaatgtttcaattcagataaagcacaaagtatcatatttttttctctttttcaaatattattagcattagaaattcaaa

SEQ ID NO: 184507 - DNA, 6899 bp, Cannabis indica
tctctctatatatatatatagtcgtcatacctctcactattttgcatattggtatatatagctcttattatcaattttttctttttctttttatttttctattttgtttatacatattataaaggagaagtatgagatagtaacatgacgctctaaaattactcaaaataactctatttatattctccttaaattttatgtgtataaaaatatagctttccacttctacatcattttttttatagttactttcgttagcattaattttgtattttgtttatacatattataggagaagtatgaagtggtaacatgacgctctaaaattacttagaataactctaactattttctccttaaatatctcatttaaattaataaaataacactttaaaatcacttaacatagttttatctaatttttatttttgattctttttataaatattaattgattaattaactaaaaaaatatttatatacaattcaaaaaaaatttctaactaactaaaataacaatcgttagcaaccaaaacaaaatattattattattattaattaaaaaaatatttattaaaataaataaataaattctctaaactaataaaaaaaagataggaaccaaaacaatattttttattattattattattaaaaataatatatatatatgtgtagttaaaaaaaaatcgtatttgaaagtattagaaaaatattatgtcaaaaaatgtaatccaaagatgacctatgtatcccatttataaagggaaatttgaattaatatgcttacattatcttaaaaattttctcctaaacttatacttaacaaaattagttatatattacaagttttatattgcttaattgtggaagtcttccctgctctggaacgttctagggttcttttctctggtttctaatccagtttgtttcccgttcctttgatcttctccatcctcttctctttcctcaattaacgcaattaatctgttttcttcctataatcatcgttagtatttaatgcagccccccttttctccctctctctctgattgttttcttccatgctaaccgtcacttttcccttctccctcacttctctttcttcaattaatgttgttaattatgtcttttgcctataatcattgttagtatctattcgcagcctccttttttccctttccgagaatgcatttaatgtttctgcagacaccccttggctatccttcttcctcccctcttttcatgcattcaatgaaagtctctttctgcaggtggaggcgcatcattgccctattgctgggcagacgaggatctaggccttctgcaggtatgatggcgttagcatcccctcctcttccagttcactccaggtattatctctttttccttctctatttaacattatgttttttgcttcgtacctaccctatttcagcacctttttcctctttcgatcatctttctgttctttcattgctaccaaaaatggcctcttttcctgtttcccagtccactcagttaactccagaagaacctcttgttcacgactttgaccatgtttccatccatcctgaacctcaatcccaatcccactgccttgttgttaaaatcttgtcccctaaaaccctgaaagtatattggattcagaaagctatgactgaagcttgggtcgctcgttgccccttttctttctctaattatcactcgggactttttctggttcagttcggctgtgagggtgaccgtcgaagagtcatggaaggtcagccatggcatttcgaccgatcccttatgatctttgctattcctgatggttttgacaccatcctcccttcccaacttcgctatattcctctctgggtccaggttcaccatatcccctttgggtcccgttcctatggtttggctcagttcgttgctgatacgataggtgacctcattgaggttcatttgatctctctgtatgactttgtcacccctttcatgcgtgtccgtgttcttctcgacaccaccaaaccgctgcatcgtggcatgaatgtccacttcaggaaactttcccttaccaagtggctcaagtttctctacgaaggcattcaaaactattgctaccactgtggtaagcttgatcacaccttcaaaaagtgtggtaaattcctccttcactgtgataatcacccttatccccctagcctaagctacaaggatgtcttgcgtgcccctgccaaatccatctataagaaaagtacttttgaaatgtccacttctattccctttgaagaacaaccctctcttgccaacactggcaatcccactatcgaagaccacaatgatcattttactgtccccaccatggttgaacccactccccccattgccacctcccctccaccacctgccttcactcatacgaccttggctccaacctcatccattcctacttccaccccctctccaatcactcactcctcggttcactgccctatcccagttcatacctttatcacttccaccactaacccctccaccaccaaaggtaaggccccgatgtatcctgaaacttccctgcctattctcagccaccctcctttatccagtcttcgcatcaatgacactccctctgcacctcctcccaccaggaagcggaccttttccaggcaaaattgtcaagttggttcttcagtccgcagtatgttgaaacgtgctcgtgccttccactccgactttgcggttgtcccatcaatgtctgacaatgaggaaatggcgggtgttgctcagcaaccccgccgaggaaaatgagtcttttaagttggaatgctcgcggtttagggagttcccgagcattccaaaacttctccctcatttgcaagtagcaccagccacaactcttctttattatggaaaccaagctcactatgtactttacttttgtttctaaggctaaactgtatttcccttatgtttttaaaattcctagacttggctttggaggtggtttgcttttgttttggaaggaagaggttaatgttaatattttttctaactccctccaccatatagactgtatggttactataaataatactacttttcatttgtcttgttattatggatccccttatgtttctgacaaacaacattcttggacactttcgcatcgcctttttgatgttgcacctttgcaaccgtggcttattatgggtgattttaatgattaccttgggtttaatgatcgtaacactaactgtttacctccccccccatgccatgcaatcttttcaaaattttattggcacttactcgctttccccgctttccttttctggaaattgattcacttggaagcatgggaccactttagaacgtttagattgggccattgtcaaccaaaattgggccaatttgttatatcttccctctaccatttgggtttttttggctcggaccacagagttctgaaggttgttcttgaggataatcctaatatgtttcattctaacccaacttttcggtttgagaatcactggttacttgaaccagactttcatgatcttgtcaacaaaagttgggttactgatcccactgttgccaactctagcaaccccattcttattttctttccaagcaacaaaattgttcacggtctctgtcctcttggggtcatgacaaaaaccaattttctcacaacatcaaacatctccaatcaaatattgaacaccttccggcaggcccaactatttccccttctgatgccaaaaaagctaacgacctccaacgtaacctggataatattttgctcaaagaagaaattttctggaaacaacgttccagagcaaattggctcaaggctggtgacaagaacactcgttactttcacaaccgagccactaccaggaaacgaactaatttcattaagtccctcaccttggatgacaattctcaaatcactacccttaatgaaatcaccacctcttttgttactttttactctcacctttttgcttcccaaggcacaaattctgaagcaatggcttttgctacgagtggtcttcctaaacaactctctcctcaccagcatgcttttctttcctccccctacaccttagccgaagtcaaagctgcccttttccaacttgctggagataaagcccctggtcctaatggtttgaatcccactttcttccaaaaaaattgggattcagctggaaatgacctttgccaggctgtcttatctgctctctctaccaataccgacttggcttctgtcaatgaaaccactttggttctcattcctaaaatcaaaaatgtgactcaagttaaggagtttcgccccattagtctttgttccactttctacaaggttttatccaaaaccctcgctaatcgcctcaaatccattcttcctgatcttatctcccataatcagggcgcttttcttagtgactgcattatctttgacaatatcattatcgctaatgaggttgttcatgcgatcaattatcgaaaaaaaaatgggaaagtgggctgggttgccataaagctcgatatggagaaggctttcgataaagtcgaatgggcctatatccagcatgttcttcagcactttggttttcctttttctttcatctctctcattctcaattgtctttcctctgtctcttttcgtctccgcattaataattgtctctccaatcctattttcccttctcgaggaattcgtcagggggatcctctatcgccatatcttttcctccttgttgccgaaggactttcggggatcattaatgctaagtcctccgccaactcttttcatggcatttccatctctcgctctgctccttcaatttctcacctcctttttgctgacgacagtcttcttttcactaaagtttcctcttcgtcttgttctgcaatcaaggatattttatcaatctataacaaggccacgggacaatcggttaatttccacaaatcttccatcctcttctcccctaataccccctcctctgatcgtaatatgttcaggaattcccttaacatggacaacaaaccgttcatcgataaatacctcggtgttcctcaatgtttctcaagatcgaaaaattcttccttccttttccttttgcaaaaagcgagctctaagctgtctatttggaatcaaaatcttttttccagagcgggcaaagaggttctccttaagtccgttattcaggctattctttcttacactatgtcttgtttccgcctccctatctctctttgcaaacactacagtcgtcttatgtctaaattctggtggggatccctggccaaaaccacaaaattcattggaaaaagtggaacaacctttgctcttctaaattttttggagggctggattttcgcaatatagtgcaccacaaccaagctatgctggctaagcaagcttggcgtatactaacctcttcggattctttggttggtcagcttttaaaagctaaatatttcaagcgaaatgatttcttacatgcggctattggccattccccctctttctgttggcgtagtattctttggggtcgggagcttcttttgaaaggcctcatttggaaaataggggatggcaccttggttagcacttctgaatccaattggcttccatccaattacaaagtcatctttaaacctggtcctctccctccttcccaaactgtctccttttttcttaccccggatcggcattgggacattaacaaactccaggattattttgacgaggggatgtgtaactccattctatctgtgcctattgatccttgtcatcctgatgctcttatttggaattatcatccttcgggctgtttcactgttaactctgcctatcatttggctaattccaccatttctggccccggcccttccaaccctgctaattataaaagttggtgggtctctgtttggtcttccaacatacctcctaaaataaagcattttgtttggaaagctttcaatcatatcctcccttccaatctcaaccttttccactataagtctgtcccctccccatattgttctatttgtcactcccaccaagattccaacacccactctctcttacaatgttccagagcaggtaaagtttggaagcacgcatctttttctcagttctactctagtaataaaaattgtgatattaaggaatttatgctcagaggatttgacttcctagctaaagatcaatttgctacttttttgggtttgctttgggcgatttggaacaatcggaacaaagccatccttaattctaacagggacactgatttatgtttggagagttctgtcagttgttatttgcaggaatacagggaagctcaacattgcatctccccttgcattgtcacctcccagccttctcccagttttcaggttcccagcaatatgtatcagctgaatgtggatgcagccctcttaccctcttcaaacaagcatggttatggggcagtcatcaccaattgtcggggtcaagtagttgccactttatcctctccttcaacttcagggcttcccccaattttcgcagaagccgaagctcttatccaggagttgctttggtgccaggcagtccgctttccacttgctatcatcgcctcagactgtcagaatttggtccaccgtattcagaagttctgtcacgatcgttccgctctttcatgttacatcaccaagattgtctcctctttgtctccttttccaggtgcctcggttcattacatcccaaggacattaaattccatagcccatgaccttgctcgagctgccctaggaacgaacgaagagaaaatttggaaccactcttgttccttctcttgaagatcttagtctttctctgttgttctctagtctttgatcttcttcttctt

SEQ ID NO: 184508 - DNA, 1058 bp, Cannabis indica
ctataatgcatggtagctttagtagtttttttttttttttttcttgctgttcaaagccaattgttgttacaaaggccataccattgttcaattttcatttttatttttctctaaagttatgttggaaatttattggatcacaaaagttgcattgtatttttcttgtgtctttcagcccagcccattcgcaagggtggtctcatttcattcgaatataaaatgttaaaattaaacacattattttttggagggaatccacatataataatacatttcgaaaacttgaatttgttattattgctatgattttttttttttttttttgtttttaaaaaaattggaatttatggtttaaaattaagtcatctataaaacaaatagaaaataagtttcaggaaactgcatagattaatgcaaacaagtctgtcatgtctcagcctcccttctggctgagataaagaacaacttttcagcaatttcaaagaagggatttgaaagcatatgaacacatggaataagaagcttttttcaattgctggtcgggaggtccttttaattgtagttgtgcaatccatttcaatttatactatgagttgttttcatcttcaaacaacttatagtatttaaacttatggtggggcgagaacaaaaatggttctaagattcattggaatcttttgaaacttttttgcaaagctaaacaaggaggattgcgattttgttctaatatccatttcaattaggtgttattggctaagcaagcctgaaggatcctatcaatgccaaaattctttcttagcagtttgctcaaatatattcttctaataatacgtttttagaatctcgtatggaatcattttggaatcatgagttgctaatgtaaggtttgagataaaatatgggtaatgggcagctgatatctagtggaatggatccttgcataccaggtcatacccaattttgatcaatccgttttacaggtcacttaactatcctaattgctcatttcatcaatgatgctagagtgtggaatccatctttgatttaacaacactttt

SEQ ID NO: 184509 - DNA, 2074 bp, Cannabis indica
acttgggagtgcaggtggcatggatctctggaccttggtttctttctattttcgtgaatatgattccttgggaaagtggtgaagattttttgtctaatctttctctatatcaagcttcattctagcaagttacattcactctcattactttgtcaatcttcagttctccgtgtatgggatgtgcttctttatgatggaaaccgtgttatgctatttagaacagcacttgcactgatggaattatatggtaatttctcacaggctaagatgcatgtacaaaacttagttcatgtatgttgctattgcgattaaagctatgtaactttgttgctatctattcccgcaggtcatgcattaattacaacaaaagatgcgggagatgctactactttgttgcaatcccttgcaggctcgacatttgacagcagtcagctagttttgactgcttgcatgggttttctggctataacagaagctaggttggaagagttgagagaaaagcatcggccagctgtattatcaatagttgaggaaagatcaagaaaaggtcgggtttggaaggattccaaagggctggcaactaaactttacagctttaagcatgatcctgcatcactgatagaggagaaaaagaccaacataggaggtgagactgtaaagggagataaatctcatctagagcctcactctgctaatctcaacaatttgcttgataacatagctgtagatccagaagtggattctctaccagatctccaagaacaggtagtcatctcatctttttctcggcaaagaaatgtatgttttatttatctttttatttcgtatatctgtgtagttgaaaacttcaaaacgtggcatcactctaattaactagaaaggttattaactgcagatttttgtttcataatcgctgtttccatgataattttcaactgaattgcatatggtgagtctatgactaggtgattcatggtcatgccaatagaactttgctctaagaatagatctcaaatgaattgtatgctcccttgtcttaataattcataaatgacatgaacattaagggttgttgagggcatatcaattcttcttacgagggcacctgccatttttgttagcacaaccattgtaggttgcaggggcacaccaacacttctcaccaggatctcttcaatctctgagtggcttttatattacttagcttaaatttttcattgatatttactatctatagcatgccatagatggtaaattatcacgcatccatttgtggtgccattagtcttccaatcatagatttgaaagtgattctagattgatggaacttaacttcgtagttgacaaaaggaagcaatttatgtatgagcaggtggtctggttgaaggttgagttatgcaggttgctggaggaaaaaagatatgcagtactcaggttagttaatatgttacaagcttagggttacattttctctggagaagaatttcagattcgtttcttcatgttccatgtttcatggagacagtagttaaggaaaaacatgtgaagacatgtgaagctttttgtcctacctaattatggttgttatctacttcatccacatttttatttagtattcatgatgtaaattctaaaattttacaaaattctttttatgctactttctatttttcttttatttgatttctttctttgccattacattacaagtgtgtatttttcttttatttcattttcaaccaagcttgttaactgtagcttcaatgtatatctatatgtgtatctgtgctgatagttggacctagtgatattaactatcaaggagtgtataaacatccataagtgataagtgggatcaagtttctatacactcatcctaatattaaaaaattggaatctaattgacttgaaagtaagcattgtgataaaccgccaattcgttatacctatgctagacgacctcgcattaattgagatggcttatttatggaagtttatgttttgtctctgctttaagatttattttgaattatttgtttctgttagtggtatcagctttgtttggaaagtttag

SEQ ID NO: 184510 - DNA, 6512 bp, Cannabis indica
taaaaaaaaaactatttaatttagtgaaacacatatcttttccattttataaataataaatatattccattgggttaacaaattgataatttcacacctccatctattttggtgaaattaattttattttttaagtgactcttacagcactactaaacacatattgttcgttaaaaaaaatcataatattaaacaaatagtgtaaaactatctttttctttaaatcttctatccatattcttctttactcctttaatccagaactatttaattttttcagttatatatcttggattaagtgtcagttttgagtaaattaaatattgcaattccaaggagatacatttgttatttgtgaagataaagagcatcaattgagcatttgatatccaaggatttttgttatcaactcctctagtattggtagtaaacaatcaagaaaacatcaactcacctgagaaaattcaacatttagcaaggggcttttaaccactacatcaatactaggtggtaaaaacatcagtccagaagcactgtcaggtttggccggcaaagctgataaacggaattcacctgctggaacctggacaatttgacagtaagaagaaagttgatattataagaacaaaaaagtctaaataataaattgaccaacaaaaatactcaaaatacaagagtaatacatttttcttaaaaacatgagtattctagataattgataaaatatatatagcaccatcatcagtatacctcaaagcagaagtttccattggcatctgtctgtttcgcttgaggtttgacattctctggtccatgagtcaaagctacctacagttcatgtgtcaaattaaatcctataaggacgcggaactgggttagcgaacaggaaaacaaaaggaattcagcttttacctttgccctgtgaccagaactaaccatccgaaccacaccacatacatcataagaaactgctttaatatccacaattgaagccatgtttggcaatacctaaataacaaggcaaacacaaaacaaggaataagaacataaattcggtataacttgttaatgccacataaagaaaaaaataaaaaatgctgaaaatcaaaataagtatgaaaaataacattgttaaaaaaacacaccagataatccttcaaaatgctaaacttgtaatgctccttcacagccactatcgtataacgatttgatgtaacctaaacacattagatttgtaacctcaattttcaacaattccataaatgataaaaaattgaataaacacaacagtgatacaaaaatataatattataataataataatcaccatgctaaccctgataaataacccaaggaaagataacaataatcatgaagattttggaatcagatttcatatgaaaatactacttttttgttcttctatgtctctgaatctgtgtacttgtcaagctattttttaaaagctagagtcgcctgcaccccaacagtgttagacaaaattgttatactgtgagagtaatgcatcattatacctggtcaagcttataatatccttgtttgtcagtgatagacctttcatgaccatcaactataatcttaacaccctccactcccacatcatgtccatcaaggactcggcctccaacagaaaatccagtgacctgtaagaagtaaaaggtatgctaaacttgaataactcttacagcaattaactcagagcagcacaaaatgggataaaaaatatctattattctttctaaatgatctcaacaccaaaaaagtaataattttacaaacatataatgcttaaataaaaaagggaaaagctcgtattggctactacatattgttacctgaaatttttgtggaactgtcacatgctgatgtgtaacagtcactgacatgacaggaggtgaaatatcaaaaactgtattttcacccttgtagtaaggtacaagcccataagttcctggaagtggtaaaataaatggaatctgttaccttcaaaaacccttaaatacaaatgaagagcacttgagatgaacagcaaaaaacagtgattgaaactagctcaaccctattaggggataaagtatagccccatgagtttgttaaagaatacttaaagcccatgagtttccaatgctcggcaagcatttaaggattggtgggaaaaaaaatgctttaaacatgcaccatgacagggacaattaccacaaggtacggagttaaacatgaacattccttgagcatcagatacagcatggcaagagccttcgtgtttcaagggcagtaccagaaccttgggggcaatctacctctaagacatcatctgaggttaaatagatatgaactcccaatattggatttccctacttgacagaagattaaaagatataagtgagttaagtgaagcataattattgcactttatccagccactgtccaagataaaaaaaatgtacctgagagacaactaacccacgaatatcatacccagagacaaagaaaatatcatcaactacgccattcccaaagcccaatttcacctgaaagacaagatgacttgtttcaatgaactgaatcatataatgcatgccgtcatattgagtgtaatgagagattttcctcaaaaaaagaaaagtgtaatgaatgataagagcccaagcagagaaggataggagaagaaaataataaggtcagtctttaaaggaaatagtgcgaaagataaagaaactgaacctcctttgaacctctagtctcaacttcaaaatcagggtgtgaagcacgtaattcatagtttcctgcatccataattaaaatacacacacacaggtaagaaaatattcctatcaattgaaaaaatagagatggttttatgaaaaatccagaaaacaaatttaaagaaaatccgatcagttgtagaaatccacaaggaaacctgcagttaacttgatgagttgactatttctaatatagcttagctacaatataaggtacgacttcataaatctcctgggcaagtgattgcagcactttcatacctggaataatgtttgtaaacaagtagctcccccctgatgacgtctgaactgaagaaacaagatcaccaccgggagacaaaagttcaacctttacatctgatggcccgccttctttaattggacagctctcaccaccaacagctcccacaactctcccagagatagtaaaccttaatccaattgtacaaaaagtaatttgtatcttaatcctaaccatgtccaaacatcatatgctcacaaaataatacaaagtgaaatacaaaacaggagctaataaaacaaaccccgtaaaccgaaaattgatatcttcattgccattgcagccagtatcatcaacggctactcgaacctgcaagaaaatatctgagcatcagaaaattgattccctatgaacggagcacatggcacaaaatttgagaaggaactacgtaaataataattgcaatttctaaaaaccttgtctggattccacgaccaaccgtctggtccattgatttgaataataaaggaaccctgcaattgaaaaacttaacataattagcacagaaaagctagagccggccccccagactactgagagttagtaaaaattcatgacaaaacagtgtccgactgctagattaacaaaataccttgtcatatactggaatgaagtaataaccattgggagcacattgagttctctccttgacaagtccatcaagtgttttaagttcaatctaaaataccagcagaattcagatccaattaaaaagttctcagcacaaagttcaagtaaaacagatacaagtttactataatgccagatgaattaacgccaaaacacatgcatacatagataaatataatatagtcaaaatttcaattgaaaaaaaaaagggggggcggaaagtaccgtgatgtgcgaataatccaatttcaaatcgctagccttcttcgctttgaccaatgacgaacttgcctagaaaaaaaaccacgccaccaaaatcagaatcacaagctgtgaaaatcgaataaataaatcgatgaaatggaaaatagagattgacctcaacaaagccaccgcagccatggatggaatcggcggagatagcagagaatgaagagaaaagaatgaagaagaagaagaagagtgataaagcttcgatgattctcatggtttttggctcccaaattctggagctgagagagaaagggctacgctactactctcctactattctgtgatattaataaacagatctgatcatttacatattctttttttattttttttaacttaaaattaattaaataaatagaaaatggattgaaatggttctcgttggctctctacgactacagcagactgtttgtgacccttgcttgctctggtgctagcggagggtttaaggctggatttctttctttcttttttttctttttcaagactttcttagtgagatgactttcggtattggtacatacgacacgtcgtttactaattttgaagcctctcttctttttttttaaaaaaaaaaaaaaaataaaaataaaattagaccaaatgctcattaacaagaataaggaatacgtggtatctaaaaggaggcctgggatcacttgtgtcttcccaaatctcggagaggtcttggttttcgaaagtgttgcgaaatgaatcaagcgttattagctcagtggggttgggctcttctaaatgaggaccagatgtagtgttgtaaagttttaagggccaaatatcttagacgtaaaaagttattggcgtgtactttcaagagctttgattcgtggttttggaagaacgtagtgtgtactaaagaaattctcaagaaaggggtgtgcaagcttatttcgaatgggaaagagacgaatatctgggaggacccgtgggttattcatagttgggatttctcctctaagcctattacccgtccgccgaaggacttgaggttagttgtggatttactcttactgaatggggactgggacacctcaaagctctcaaaccttttttaccatgaaacaattaataacataatcaaaggtggcaagcctagtggtcaagagaatgatagatgggtctggactaaagaatcgaataggttattttctaccaagtctgcctaccttatccaagctcttgagcgagctccattgtgcagtgttgccccgacgctctggaataaactttggaactctaaaattttggagcatcagtcctttggtggagtaatatggcaaatgctctgcctatctgtgcctctctcgcgaagagaatgcatattgagaaggtctcttgtcccatttgtagtgaggaaaaggagacaatagagcatctctttctctattgtaattttgctttttatctttggtgttttttcccttggggggttatgcttattttgaattatgaagcccgtatatgggattgggttaatttcttatggagtctaaagtataaaggggtggacattgaaaaattattcatttatgtttcaattgtggtggatacgatttggagagcgcacaatgacaaggtacacaagaatgttatgggtagcattatacattatattgaatctatctctacttgttatgcagattatggatcttggttacttacctctttgaaggttgttgggtctcttgtttagacgccgcctccaaatgattaggtcaagatcaactgcgatgtcaaagttggttgcgactccatgttcgttgtggccattactagtgatcatccggagtctattttgtggctggctacaaacttgctcaacttctctgatcctctcattggagaagttgcggtttgtttactagccatggagactaccatttcgcaacatcatcgttttgttttggtggaaagtgattccaaaacagctatcaagactttgacggtactggcattgtttggggaattgataactatgtgtgccattgtaaacaactctctacttttatgttaagttgtaatttttcgtttatttctagaacttgtaattttatggctcataatgtagccaagtggacttttgctaacattatagccggtatggtagatctttctttaataccggttactatcttttgtaatgaccacgaggtataacattacttctatttataaaatgcctttaaaaaaaaaaacccttcattttctatttgttttaggaaaatttaaatttctatgcttaaaaatgactccgataataaaaaagaaattttattttgtatacataaataatattcctatactaaattttagaccttttattaatttatacaaaacaatactaatattctaaaatattacctaaaatatccctcacatctaattttttttttctctttttactctatctcttcctcttcctcacatgctttctctttcccacgtcagaccagcagttgagaacctcccaaccctaaatactccaccaccatctctctctctct

SEQ ID NO: 184511 - DNA, 957 bp, Cannabis indica
actgataatcctgtatgttatcttcttctaccatcacctacttggaaaagtttacaattgacacgaggttatcatgtaaatttgtattttgtgtctttcttatgcagaatgatagaattcgttggtggcccatacaccatgatgatcaagaatgcattgggaagattcagctttccattggcagtactatcacaaatgatgagactacacatgtaaaggtatgcttcattttaatgactaagaaaatccaggggacccaactacttcgttgttcttctaaatttcatcactattgagaaatgttgcatcaaatatcggcttgaaacttcatatgtttgtttcattttataacagagtggaccagttgcagaaacttttgcttatgatttgttgctggaagcagctatgcgcgcacagaattttcactcaaggaatttatggctgcacggaccttggaagtggttgttgactgaattttcagactattatggagtttctgtctcatatacaaaactcaggtatttggctaataaaattgtacttgagcaatttttttcctttgtttcctttcggtacagattcactcactttctctttataggtatctttcacatgtcatgaatgtggcaaccccaacaaaagactgcttagagctagtgcatgaactacttgaacctataataaaggccaggagcgataaatgtttgacaaggcaagaggtaatacttcaaaggccaactttacctgactactaaaaatccatcaaacgtatattacctcatgcaaactttgtttctttatattttattcaatagaaattcatcttctgtaagttagaaagacaacagacaagcaatatgtagtatttgtctcatctacttatcacagatgtagcaccatgagaatttttccttaaattgaatatcctaccaatcattttcttcggtttttcttgaa

SEQ ID NO: 184512 - DNA, 1749 bp, Cannabis indica
agtctggtaagataacatcgacaatgttatagtcggaactgttgtatagttatctttcgactgcttttaatttcgtcctttaatatatgcagtgccattgttatgtctgtgacttacctgcaccctgtgtgcattgggcaactagcactacaagtattggccattgtcatgccaccgacaaagaggatttatggaaaattcagaggaaaaactttaaatcggggaaaatatcttcattaccaccctcgaaaatttccgctagtccattatcggtgtgtgtgcctaaacataaccatgtttcaccacccattattcaattgtcaccttgctcgagaccaaatgattttgtctccaggccttctaccgtccaaggttgctcctcaactaattttgctctccctactattataagccgtggtaggagccaacaatcaggaatgctttcgtccaaaaacagatttcaaccgtacatggtaccaggaggaccacgcatggtacgaggtggatcgatgcttggtgctagtcatacaatccgaaagggccctttgagctccactcatgctatgtttaaaagacaaggaaatgttggggtcactttccctaggaatcaaactttgtacccttcatcaaacaccaggagtcgaactagtggtgccactcaatatcctaggatccacactccagcaccagcattggcaaacttggcggacttgagcacgatcatgttaaatgagattaactccctctcgcgtcaaaactcctatgatccgaactttgtttgtgcagcattaaatactccaacttctgagccccaaacttataatcaacaacatattcctccatcgaatatcgatagtcagaatatgtttcatcaacacgggaatcaatttcagaataacgaccaaagtatccttaacccgcgtggagatgaaactcaaaaattcgttcttgatgaggacattgaattcataggtgcgaaagatgttagttctgtagattgtagtttgccaaaatggttgaatgataccaaccaaagcaaccaacagcctccagtggaaaatactcaacatcagaatgcagcagactccttttttgctccatctgttaaggactctaattctcaatttagtattagaaacactgatcttaggtttgatgactggatttttgaagaccgaaatggtcctgtggttgcagatggttctatggcaccttcattagatgtcatctctcccgagcctgctccaattgatccaggtatgcttttctttgattttgaaccgcatggaacggtcttgcccacacataatcagcccgaccggactgacccttttactctctggagtttggatgcttcttgaacagataaaaatggagtctttcttccattattatggtcattgtaaataaaaattgatgctttttgttaacttttgtgataggcaaaaatagcttccccattgaaagctggaggagagcttagtgttgtcttgtcagtatatagggttatcttatattatatatattatatatatagagagagagagtagagagtactgcttattgtcaaaagtgggattattttaaggattagagggtggttaattttaactccttgatcctttcatctgttaaatcccacattctgagtatgattattattattattattagcaaatcttgtcttagtttatctcaaaggttctagttggtctattgttttttttttttttatttattgtattcttc

SEQ ID NO: 184513 - DNA, 2110 bp, Cannabis indica
gtttcatctgattcagtctccaactcgatccaattattgcaagttcttaaattttgttcattcttgctcaatttttctattttctacactcacttgcacacactatctacacacaattaaaaatagaaagtaatgtgctccgtatataatttatatatatatatatatatatatatataatgagagagatgatatggatacacaaatagaattacgtttaaaacggaggtgacaactgtttttttttccttgcacattttacgtttgaatgaaaatgatttggtgttttctatttggaaggtataagagattcaaaggtcatgttatcataccctgtccctgtaactgtaataactccttcagaggttttgatacttttagaggacataccatccatgtaattataattttctgtttattagtagaagggaaaatgtttatgctgatggtctcgctcaaagtgctagagtttttactcttaatgctggatatcgctagagggtcccctagtgtggtttccattagtttgttttgatttcattgaatagatcgttccagcaataaagaaaaaaaaactgtaataactcctaccatatgtggtctttttttcctgattaagcatttctctttagagataataatgtatattcctggttgtatagcattaaatgagcaaaaatagtctctgaatatttgcttgcttgtataccaattgataagtgtgtcggactgattccagaactcatttgctcgatgtatgtcgaaaaatggatatgatacatggattctggaagtcaggggttctgggttgagcacacttggattggtggacttgcacaaagataatgactctctcaacagtgtgtctgagaacataacgagttcctcatttagttatggtcaaaatggtggttttgcggattcggacatctactctgccagaagaagttggacctatatggtctcggatcaactgcaattgatggcaaagctgagaaaaacagctatgccttcatctgggagatcatcgaactttgtaaataagggttggtgaagcagttttcttttgatcgagattattagtaattagatatcttacatcattttatgaagcgtattatgcaaggattgaacttgcagggttattagaagcacatcaaaactctgttaacgctaccggagttacaggaatgaaacaatggctcgtagatatcatgagacaaagtcaaagattattccctgaacagtttatggacctgcaggagaacatttctgctacacttgaagatttgcagcaacagtttgagttaatctttaaatatgactgggatttcgataacttcctggaagaagatgtgcctgctgcggtgaggtgacatttcttagtattaacaagatggcgtatttttatagtggcatgtttcttagtctctgataaaataaacttagaattatgtttttcgggcctatattcattttacaatattcaagcttattgtatacttgtatatcttcacaactaaataattttaccataaattaaaatcccacattgaccaagtataggattggttgcctgttaataactagttagacacccttcaccaatatgctagtttgtagggagtgcttaattgtttaaatcgccatgtatatgaaaaaaatttccatgtgttgaacaaatcatttttttttcctttggtgagaatttcagcttaattcactttcaaagcattactttagtagtgttcaatatatctgaaactttccttcttttatcaaagatggagtacataagagctcactgcaaaccaaaagatggcaaattgcatgcaattggtcactcaatgggcggtattttgttgtatgcgatgatctctcgatgctgtaagttccaaagctaacttttactgcaatcacctataaattcgttaccttagttacattctttggagcaactccattcttattattatttcagttttctattgtactcagttggcataatctttgggattttactattaactaagtgaaatagtactaatgtctttgataaaatcggagctcattgtaaaaactcttcactaattattcatgctcaaaataa

SEQ ID NO: 184514 - DNA, 1064 bp, Cannabis indica
caagtagatttgatattttgaatatcatgttttgacgaagtggtggtatttgacaattttacccctaagtcttaaaggttacttaaggatgaagaagggggtaaaatagtaatttattctcttggtctgtctttttctcctagtggaatagctagaaagagctatccaccactacaaacagaacttttggtgtcagttttaaacagagatttatacctttagtgttagttcaaagaaccgacacccattccactctgacaaaaagtcagagtttaattgtcagttaaaaaccgaaacgaatgagttttggtatcgttttaatactgacacttaaagcgtacatatatatttttctctttagtgtcggtttaaaactgagactgattggtataagtgtcggcttttaattgacactaaaagggatatttccgaaaaaagaaagtaattgttaaaaatagtctctagtaattcctaaattataaaacttaaaatgctataaacttaattttgtttataatattacataatttgtatattatttatattaaaataataattataatattttttgtttaatattgggttgcaaagtttcatgattatatctctatgaatttttttaataaaattccaattataataataataataataataataataaagaatattttgctcagatttaatcaaaacaattggaaaataaaaagatcattcaatttaacattttctcataatattttagtccaatactacaatataaaactacaacaaccaaaaaatactcataacacatagaaataattagtacagtgcaaacacaagatttgtgtacaataaatctactcacaaatgattatcaaactcaaataatgaaattgtggtaaacaaaatgtaccccttagcttttatactccaaaaataagttttaaaatattaatagtagcttgaaatgagacatcagtaccgtgaatagtctttatctgtgaccctaactagagaaccactgtgcatggcagcaatctcagattcaaagtgacacttggagatgggagccactggtt

SEQ ID NO: 184515 - DNA, 3350 bp, Cannabis indica
cgacaggattgtgaacgcagtaaatatcatgtatttgcacttatctaatgtcttttacgtacaatttcgtcaaagatgcttgctacatcaaaatatcatttacacaactcagcttttctcaataaattccacaaggcaaaatgttaagatcaagggcgatgacatttcgatggcaaaatctcaatttgacaacagaattgtgtcatcaaaaatgtagacaccgctctactgcggtttaaactcaccaaatttatgtttttcatcatgcaattgcttgaatgtgttgtctagttctggaaatgctgacactagaatgagctccagaacctcaaaacccacttgcttcaagaaaacagatgactgcaaaggcaaaattaagatgacaatcagcgaaccatgattgattgagtaatcaacatttttgaaaaaacgctcacctgaagaaagaaatatagatccttggcacattgttcgtattccttgcgaccaacaagaccgacaatagctgcaggtgctttctctgcatatccaaaaggaaagaagattaagaggctaatgaaatgccaacttccaaactgtacatgttaacaaatctttcatgacaaaatagtagtaccaatcattagctcatatacaagatttgcacgtcgatttgcttcttcttgttggtcatcggccattctaggcgatgatacttctgtatgttgatgagcactgggtgaacccggggatgtgttagaaggtgatggtgcacgtctctttgggtgtttggttaagaatattccatcaggccagagtatctatcaaaaataaaatgagaacaactgttgaataattatgacagtaattaattttaaggaaaaatgaacagagttctctagtagcaatggaattttacttgctcaagtcgcttgatccctgaagcaaccacagatcccttacgcagaagctggattttctctattaaccaatcgtcaaaggcatctcccattcctagttgcaggatttgtttggccacccaaaaagcttgtctcctacaatgcgcagcatagttacattaaaaataatcagatgaaatgaagatgtatgtaatcagaatcttggatagaagagagagctccaaaatgaaacatacgagatacctgatccatccaccatcttggagctggagaatgacgtcgaccaaatccagtatgggaacacttacatttggtggcacccactgaaggaaagaattgtacgagacatagaaacacaaggttcatacctatgccaagtgctaaccaaaaatatattcagaatgggatgaacagacaaattttatttgtttacctctgtaggaagggtcaggtcatttgcagcatctaacgactctgatgctgccctatcactttctctacctttaagaacttttcctgattttctaagtgaggatacatctttttgagcctttgtttcagaagcaccaccagaattatcaaatgtctctgtagtttctttacctagaattttcaccggtgaataattcatagcttttggtgtgtttaatctagacccagatgcattattcctcattcgtaatgcaggttcctgacgttctgtatttaaagaagagccgtccattccaccaacgtttgaaacccctttacttctttcagatggcttatcttctaggccaactatataattccaaacaagcgcaataagattttttttttttgaaagttacatatgcatgaatagatcataatctacctgacaaagtttcaactatggagaaggaattggagaaagtatatgtctgcaccaaataaaattaaattgtattaaataccaccaataccaaaaaataaatctcatttctttttgtctaattgcatacctgagaatcaacgctcagaaaatcccaaacttcaattgatccggaaattgttggaagcagcataagcttctgaggaatatgaagacataacaacatcacgaaaatattagacaacaggaaagattaatagataggaaaggagaggaattgcatataaatcctagactcctttctattggcttatcaacttaaatcccatacttatcagttaacaaccaataaatgtatgtacgcatgcttatttaaccaactccagtcacaccacactgaagaacatgagtagttaattaagtgaaagatgcatcaatctgaaggtaaatatacacaaggttaagctaatggataaacagtagtagcatttaacaaatgagttctaatgcaaatcacgcaagtagacataccaacagcaaaacaacaaagttttcccatgagtcagaacacttaaaatgtggaaagtaaagatatgatattacgtataatttaaaatcatccagttgaccagatagccagtaacaacatctcaaaaaattaaaaaaggacagaagactgatatcatcattaaccttcaaataatcatcaagcaatttacaccgttctcgaatgacaactacatccaaaccagttgagagaaaatgtttcggtggcaggtgaagattatattcagaaaacattttcagacgccgatgtagttcctcaaaatggcgaaacctgtagaaagtatcaaaagttgcaagcacgtaaaaccatagtaaatcccatttatttgacatgttacaaaataaaacacatcatatgaagcgggggaaaatgcaatcttaatctatattaccttcttttaattgaccaactattattattaacatcaacaacagatacggagtagaccgcaaatgtccttgagccactcttcacaatatttgcacccaatacctgccaaagataaacagaattagctaatactcggaatatataaataaattaaaacatattttttgtttactgtacctcacatctcaatttataaaatgaatcaactgccagcgaacttttcagagaattgacagccagattatgattttcagcagcagaagaagaaagtgcagatgaagaagcagcggcaccactatgaaccctaccaaaactatccatatcagaatcatcactatagtcctcatcatttgcttgtcctttggaagacttgagtatatcttgtccatccccagacaagaagcttgttctctcaacctcctgccaaacatgcacattctggttgcttggtcgagatcttttccgaccagtcttggtttttatgtctttgatagcgaacacgtcccttagctagttttctttgcattatggctctcaaaattttcaagtggatgatgaatgtgaggaactgcaatatttctattattcctaccatccctaaactttagttccaggagagccaaggcctgttatactgcta

SEQ ID NO: 184516 - DNA, 6984 bp, Cannabis indica
aagtttttttttaaaaaaaaaaaaaaaaaaaaaaaaaaaaaaaaaaagtaaatttacttttaaacgcagctattggtgccatactgtctgcaacagattcagtctgcacacttcaggtaatcacataatcatatagccaagcataagtttttacaaatctttttagaaaaaagtttttgcagaatattgacaaactactttgatggctgatttatcactttcatgttataggttctaagtcaagaccagacaccctttctttacagcacggtatttggtgaaggagtggtgaatgatgctacctctattgtgcttttctactctgtgcaagatctagacttcagtaacattgacgccggtacagtgttgaagttgttggggactttcctttacctctttttcactagcactgctcttggtgtgtctgtaagttttctattgaacattttggcaagataaatcactaaggctagatgagattaaaagagacggatgcatgctgtgagtgaatttttattcgctaacttgctgttttttatatttcaggcaggtctcgtgagtgcatacattataaaaaccctctactttggcaggtataaaagcaggtttcactagcatttccaagaatatgttgttcatttgtgactcattaacaatacatttaggcaaaccatatttttttaaatctccctgatggatcgagtatactaaactcttaacataaactgtcttctcccgattatgagactttactgacctgtaacattacgtgatcaacagacattctactaatcgtgaagttgcactcatgatgctcatggcgtatttgtcatacatggtggcagaggtagataactcagctaacttccaatcattttcgaaacaattaatttatgctaatcaatttcggccattcattcaaactgtttttccttttgcaatgttatcatcacattgagtagagagaaggttgaatgtgttgcatcatgttaatttcaagttgacaaatatgtttcttgcagtttttaagtctcagtgggattttggcagtctttttctgcggcatagtcatgtcacattatacatggcacaatgttactgaaagctcaagaataactactatgtaagaacgagttcttgttctattcatttttcaagaaactgtcacaattaaacacttccttaaagagccttttaaagctgctcttttttcaaattgcaaagaaaagtataatttctgtactgaacaactgcatttttttaaaatttcaggcatgcgtttgcaacaatttctttcatttcagaaaccttcatattcctttatgttggtatggatgctttggacattaacaaatggaaaagcagcagtgcaaggttattttcttcatctgtaaaacttgcattaaatgacttgaaactgtgtattgatataattgaatctattaatatgacccgacaatggcatattgctttttcacatagattataccagtatgattgtcctgtgcatacttgatgttgtaataacaaaatgtagccatgcctgaccctgattacactctttaattcagtgcaggaacttcaattgctgttagtgcaatattgttcacactggttttgataggaagggcagcatttgtgtttccaattgcaaatattgaaaactgtgtgggaagaagaaatggttcaaaaattgaattcaaagagcaggtataactgctggcgcctgtatccttggttctcatttacaattactccctaattagctaactttttgcttcttagttcattatatggtgggcaggcctaatcagaggtgcagtaaccattgctttgtcttacaaccaagtaagttaatggttctcaaggttcatcagcctaaggaattttgtaggaaatagccaaatgctgatatttttccctccaaactttaagtttgcagagtctaaggaaaaatcaactggtgatagtgcattaatgatcaccagcacaataatcgtcgttttgtttagcactgtggtaggtcttctgttatttgagttagttttggtatgtcttctgttatttgttagttcttgacatcgttttttggacgtccacgtgagaaatttactcttccttcccctctcaaaccaggtctttggctctataacaaagcctctaattgaggcagtaatgttgcagcattcaaaaccatctacttcagatgcagctgaaattccaagcctggaagatttacatcagcttctgtttatcgaaaatgacaactcagctgagcagggaaacaatcaatcagaactccctaaaagaagtagcttaagccttctgatcagacatccaactacaacagttcactacttttggagaaaatttgatgacagattcatgaggccggttttcggtggacggggctttgttccatttgttcctggttctccaactgatgctgcagatcagaattcttgaaaccgaaagtaaccatatatgtttctaaattcgtgcctttcttttcatgtacaaaaaggagcaggggtggtcactacacaaaagctatgtactaaactaaaagtaaagcatggtagcatgtaaactgtgcacaatgagtagaacttcatcaaagatagtcttgcatttagaagtttctaaaaagccttaatcagatgttaaaataccatctggtttatctgcctataaagattgactgcaagtaactttggatactgctacacatttattttcaaacttgaaattcgtcacaaacaagaactaacaagaaaactttactgcagaattctagagttctgacatgaaaaataaggaaaagtcaacttaactgcaagacatcaacaaataaaggaaaaaaaaaacaatctcacattaatcctaagtacatattcatcaataaacatagaggtctgatcggtctttcttcacctaatgatccgctggtttcaacgcctccagaattagagtagtttgatctgcaagcaactgactcctcttagcaaaaagctccatctcagccatatgtattttcttccacttggcatccaactctgctcttttcgactccgggaccaactcaagccccttgctcaaaatatgctccgataagccaaaattgcccaggctcggagaggaaagcagctcctccattacacccaatttaggagaggaaagcaaatcctccgccggccccaaactcggcgaggaaagattctgcggtgaagctaatgccttgctactcctcgcagtgccagtgccattagccttgggctgttcagctttcacaacgagcttttcaccaccaccccaaattttcttcgacaattcaaacacttccttctcgtgaagcttcgtcgggttgtacttcttcctactagcattgttctcgtattttttcttcaacctacggagcttatctgacaactgggccttcgtgaaatcaatctgcagtgacttcttgatgaaatcttgaaaggcatgcatgtcagccgcagatgggatcgatcctttcttagcagcgtagtcactaatacccttcaaaatcactatctcatcatcctcactccacaacctctgaaacagcttcttcgactcgtcaccagtcttcttcgattcatcctccgcaatcgcggaacctccatctggttccgaacctttcttcttcgctcgcttcgagtccttaacctcgctattgctcggtctcttcaccgacgacctgacggtagaaatcggaacagccttcgttaaaggcgtggttttcgatttctgtgattcctgctcttcgtcttcttcggaagccccttcctcttcctcttcttcttcttcttcttcggacgaagaatcttcctcggcttctgatgaagaagcaacgggtgggtcgtccagatgggaaggacgcttcggtgccatggatgaaaaggagggtttcgagatttcaaattcggggttagggtttcagattcgaaatttagggttagggtctcaaaacgcgggactgttgactatgactctgagatgaatgcttttattggctaaattgctgttctttatatcttaggcggagcctccacgttcaattcattctcggtctccggtattctgcttaattctttgtttataataataataattaacggataattaaggcacaattttatttcgtaaaaagattaaattgaatttatttttatatttttataatttttcataaaaacaacacgaaaataataaaaaaaaaataatataaaaatagcattaaaataacaacaataacatacagataacaaaaatttaacaacaaattaacatgagtgtaacataaaaagattgtattttctgtaaataaaataaaaaaaatttgtaaaaatatttaatagaggtattgaataataatatggactgtagctatctaaatgagacattactatgccttatccccaaagtgaaggactagacaatggtgggagactacaggctcttaagtttatgcaatgtagtctataaggtgatctctaaatgtcttgctaataggatgaaaatgagcatggataaagtgatatctgaaaaccagagtgcattcataaaggggaggcagattcaagataatgccattcttagttttgaaagtctccattgtttgaagaagggtcggtttgggaatggaagaaagatggcccttaaattggatatgtcaaaagcatatgaccgtgttgaatgggattttcttgaagggatgatgaagtgtctgggatatgatgagcgatggattggtaagataatgggctgtgtgaagacgattactttcttagttttgctaaatggagaggctcggggtcacatcataccggagagagggttgaggcaaggggatcctctatctccgttcttgtttcttatttgctcagagggttgtcctgcttacttaatgaagcaagccgagccaacaaaattcttgggctccgttttggacatcttgagagaaggttgacacaccttctgtttgctgatgatagtctaatctttttggatgcagcggttgaggaagggaaagctcttgcggaggtgcttcggatttattcctctttgtcaggccagtgcattaactttaacaaatctaacttatgtgttggtcggaagattaaaagcacggaaggtcagagacttgctgcttctctgggggttacttttatagaaaaccacacaaagtatctcagactccccgcctttgttggtagaaacaagaaggaagctttcggtttgatttatgacaaggtctgggaaaaactccaagggtagaaacgagaggtgtgatcaaatcagttatccaagctatcacggtttatatcatgagctgttttagaataacaaacggtctgattcgtgagattcaagctcttatagctcggttctggtggggttctacaacagctaaacatcaaatccattggggtgattggaagaagttatccagagataaatggtctgggggtatggggttcagaaatttggaagactttaatcaagccctgcttgcgaagcaaggttcaaaacttgttacaaatccggatagcttgtttgctcagtgttaaaggctctatattttttgaactcagaattcttagaggctgaccttggtacttggtgttctaatgtttagagaggcattctatgggacgtgagcttgtttttaaggggatgcggtggcgagtgactgatggtagtaaagttagaataaatgaggatcgctggattcctagaggagccacattccttctcagaacccccgctttggttcctcctaatacatatgtggattctctcattaatgaaactagggaatggaagttagagactattgaggagaagatgcatatagacgacattccttggattttggggattcaaattcggagaggatgtggcgaagatgaactcatttggcattatattgtaaatggggattacacggttgctagtgggtatatcttgtcacaagttgagaaacagggagcggagacttctaacaaaacaattttgaggaaatggttgaaggaggtatggcacttgaacttaactccgaaaatgaagaatttcgtttggagagtttgtcataactgggttcctacaaagagtgaattggtgaagagaggcatcaagatagataggacttgttcgggatgctggagccatgacgagaccattggtcacactttgtggaactgccctcggctgaagtttgtttggagagatgcggggttctgacacctctttcttaaaggccttggcttgatgtcggacctgatggactttctcatgtttatgggaaaaaactgctctaaacagaaatttgaaacatttttgggtttgagttggctggtttggagccaaaggaatcaacaaattttccaaaataagagtactcctttggaaagctggactccttgggctcttgattacattgacaacgcgctgcagaaggccactgacagcagagaagtgaagaaagcgaaggggattagtagttggttggctcctccgaccggcgcctatatgctgaattgtgatgcagcgatatctaaagatcaacaaggaagtggagtggctgctgttatcaaggatagtttgggccgtttgatagctgcagaagctctctttcagaccgactgtgtttcggttttattggctgagtgtttgcctatcagggtgggattgaacctggtgcagagattgaaggttagacctttttttgtcaactccaatagccttaccgctattaatcaactgctgtcaaagaaagctcctcgggcagattggggggtgcctttgttgaaaattttttctactaatcttttagatgggtgtgtgtgggtatcaaatttgttaatagagattgtaataatattgctcactctttagttaagtgggctattactcacatatgtaattttttttggtctagaggttttaccctcttgtgct

SEQ ID NO: 184517 - DNA, 1450 bp, Cannabis indica
atagttcctataaatgatgagaaaacataaacactcatcccttcctacagcaaactagattgtcaatacaaccatatgaacctgttagagaaaccatagcttcataaactaaatttgcctaaaaggaaaaaagagaaccgattttgagtgacaaaataaacaaaagtactccatatatcgaacttgcttgtgcatatatctatcttaacgggcagtgcccaaatcacccatgtaattaaaatctacaggagaaaccaattgaatacttacattgacttcaaagtaatagcagatagtatcttccacaaaaaaaaatagatttaaaatagataaataaataatgcagaatctgaattatcattggaagaactataaaattcaatacaaaatcggaaaatcttacatcttgaggcagtttccgaacaaaattagttaaagattcaatctacaatttaagtaaagccaagcagaacactttctttctagaaagaaagcaagaataatcaataaagtgccaagagtaaaacaaattctctccctaacaaaccttgagacggtggaggcaaaattttccactacacacgcgtggcgagggacggtgcggcggctgaggcagcaccaccgaggaatgagaggaagccagtgttcggactatcttggtcgtcgaggaacaggtcctccggaaccctaaacgcaccgtgagcgcacacaatggcgaatccaaccaacagagtcgagatcagaagcgatccgacgctggagacgaagacaacgatcaccgtcaccaacaccaagccgatgagggtttccgtatcggagaacgtgcggccgagaatgaccagtggctgatcggacggccggaagaggtaaaggaaagcccaggcggctaggagtgagagaagaacaatgagagagaacggatgggagaggagcgagagtgcgagagcgatgccgactaggatgcgtagttcacgcggaaatacgggacgttcttccggatccgggagtaggcttcggtgagggaatcaggtctagataaagagctccgatcgaggagctcggaccaggggcggcgctgagagaagccatggcgaacagagttcgagaggcgtgagaggaaggcgcgcaaggctggtgtagcgatcgttgactgagacggagcgggggcagcggctccttggttggattgggaaattgggagtgtcggtggagaagccatggatggcgcgtgatgcgtggtcccgaaaatggagagagatcgagagacaagggtagagaatcaagagagaacttggttatgggagagaatatagttaacaacgctggtggtggggaaggttgtgattctctatgtgaacgaatatggtgtggacgcgtctaacaccataaaacgacttgtcgtacaaactaaaggaaatcaatcgaaaatgcccacaccgatttatatggg

SEQ ID NO: 184518 - DNA, 2700 bp, Cannabis indica
caatttgatgattgaggttacaatttccaataccaaaaacaaaagtttttcagccagttgagtgatgagaaaagaagatagagaaaagggaaagtatgtaaataaaagaagataactttagcctacagtaagaaacaagtaagaagctgactgaagttcaaaagaggccattaagggagtgaagaaggtcaatagtgaaccagaaaagccatggaagactgcttgtctatattgagtgtttagcatagcactagctttcataatgctactattgcttaccagccactttttttttttaccttcttttttgatttatttgtttcatcttcatttaagaagaaaaaaaagaacattttattaatgttatacatcactaggaaacccctaccttttgatgtgggggggacttgggatgcttcctatgtctttcaaaaggctgaaagccatgaggaatgaggaattgttttagtttgatttgatgtatctgtgttaaatattgggccattgaatgaaaagtatataaagttgaacatgattttatttgctgggaatgttgggtttttctccttttatgagtgggttttagcttctttcccactttttactgtttaaggttgcactttggaaggggttcatgaaacctgagtctaatattgacaaacaaaatcaatgaataaaatcaccaagtggatttttcacacatgttcttcctcctcctaaatatctcaggtagtgcttatcaatgagtcaaaccattgtacaacacacatcttttttttttttctcattttatcaagtggtggtggaggatatcaaatatgtaatgtgacattgttaatacactcaacttggtgagagcatatcttgggaaaagctaatgttgctgaattcactagcaattaagattgctgatggctgatgatatttgcatcacctcattcagtgaagggtagtagtgaagagtagcaatggcagtagtagtaaatagtaggaggacccaaataaactaatcatgatgaatgagaatagagacccttgttttggggtggtgtgggttttattgagaagggcatcagattcatggaaaaaaataaataaattagtgtcagaaggctgaaacccttccacatgccttcttaggggtttttcatatccagtctggctgtcatatacataaatatatttatatttatataaattatgtatagaagaagtggcagtagtacaattcattttttcagagtcagtagcaattaccatgctgccaacaactctcctctattcataacaaaacagttgcatctattatctagtattctgctctgctagctgcagaccagtgttgttccctcctcactaaaatataaataatatcaatcatgacttggtaaaagcttcttagattcattgactgggaagatgagaacaactgttggccaaaaaaagaggtaacatggtctatctatgactatgactatgattctatagatgtaaattttttagtatttttaccttgctaacagtgcctattgcattgcatttaccatagatactattggtttcctactataattttattgggagggtatgagttttaaggtcattttcattataatattgatcctttattattattccttttcaacatagattaatcttactttataattgtaaatcaggctgcattatttttagttttagttttacactttgatagaatctgatctgattgctggtgtagaagtgttgcatgtatgaattgaagataatcttttggaaactaaagcagagaagtgcagtaatattattctagacttaattagaaattcatttacttttctcaataagaaaaagaaaagagtacaattattgtagtctgtttctgatactagaaatatattattgtagtactgaaagttttgtcacatcataaatatatgaatataaatacttaaaaatataggcataattaaatatatataaatatatagagtgtttattagagctctgttttttgggttattggattcttcatgatatggatggactggaccacaataaaattaacgtatctacatcatatggatggattgataagttatttgtaattttatgccatgaagaacaacatatctcttcttttgagagaaaatgaccattttaagtattttgacttttaagaatatatttttttcaatatataaaggaaggaacatgaattgtcaccactggcaatgtgcttaaattctaaccaaaattataataatattaacaacaataataatatcaattagtacatgtacattataatctgttgtcatggccattaaggatgtatttagaagagagctttgaggatttatacattgctcttataatttatatttatgtatattttcttttattttttcgataagtccattcagtatttttattgaatttggcttatcagacctcgagttagatgtagctcatctaaatcttgacaaaggcttttttttttcttttaataattaatcaatttcttaatttaaataaatatacagctaacttcagcctaatttcttaattgggactaattgccaccactggcaggtagtgggcttaaatctaaccaaaacccataataataataacaactactaattacataataatttttttgccaatgccattgaagatgtgatcaactgctaaaac

SEQ ID NO: 184519 - DNA, 2357 bp, Cannabis indica
ctctaaacaaagtgtacacatttcccagacgtagctttctctaatgggtggagatctcatagcaaatctttctcccttacttctttaaaggatccgaatgttctgcttgattttttaatatgttggccaaaaagtactggttttggactttgcaaccaacaacattgcgagccaaagagaagataaagtaaaagagcatgaaatatgatttgatcacattatcacatatgaaacattttatctttttaatatcttatttctagtttccagtgagttaaaaagaagtttgatcagtcaaaatttagctagctagctacccaacaccatgccccataaagcatatcaataaggttagatttttttttttttttttaatttctggtctttgccttgtactcttgtagtggccagtggggttcctttttgtcattattcaaacataatggcagagaaaatatttgtttaatagtgatttttctatttatttatttacttttcttgtctttgcagagataacaaagaaaagaatcatggaccaaggacaaccatttcttaatgggttaggcttttaaggaagatagaaaaaataattttggtattaaaaggagttcaaatctagagttaaatcattgttgaaactcctttaatttttcttaatctttttgactttgttacaatactaagtatgaacacacacataatacgttaaaacgacaattttatagagcctagagttaaaacaaaaacataaagattttcaattgcaaaattttagtattcggtgctatttttattattatatattttttgaaaaaaaataggagaaaagaaaagaaaagaagaacctgaaattacattttgagtacctctaccattatctagaacaacgttatatttataagcctcatccaaatggtctgctaagtgtcccaatatacaacacaacaaatatcttttgttcattaaaaataacaatactacataatgtcacttttctgagatattttcttattgtggtgttgataatcccaaaaacttcttctatatctctaactcttatttttaattatttaattctttttcatctcatgaatacaagttttttttatcttgtacggtattattgttccttatcatctcatcatgataatcacatgatctcaataattccccacttcatgaagagctagcaaacttccaagttctcattaaataatgggaaaaaacaaaatgccattaattcattaaatatcacatatatgatatgatatagctctgctctgctgactgctctcatttatatctatccatgtctaataagtctactctctaaagttcaaaaacatttacttttagctggaatgggccttgctctaatgactaatcatattaaagaaaagatgtataattgataaatctaaaaaagtataagcaatagagtacacacacagagcttaagttttataataaaacttaagtagtttatttaaatgatctaaaaaatatatcaattacattctaattttcaatttatttataaaattgttaattcaaattattgaaaatgatggagtagcccatgttcttatatatgactcaattctttactatttatttattctatgtgggacaatgtccacaacttaaattccaatcaaatgcaaacattcaattggttaaaagaaattgtcatttattgatgctaaaccatataaattgtttattaaaactaagtgaactaaaactacaatgagaatttttcatagaagaagaaaaaatagatatatataatattattttttataaaatttttatatttttacgtttaatttttttttatttttcatattttatggtattttattaaaataaaaaatacattaaaataataagaaaacaataacaaaataacctaaaaaataatatgcaaataataaaaaaaattataataaaataacaaggatacaacataaaaatacataagaaaaattatattttatgtaaataaaatttaaaaattcgtaaatgtattaaaattttgtacaaattgtatttttgtaaatttttttttgttaaatccccaaataaatatataaatttgcaataatttcttaaaatcaattattgcaatatattggcttgattcttcttattacgtttgaaaatcaattctagcaaaaatccaatatactcaaattaaagttctctcaatactttagaatttccaatttcaataatctaataatcccatgtaattatttaagtggtacagtaaatttttcctaattttatataatttggaataattatacttatgcaagagcgaagtaaattgtgaatatatatgtataattact

SEQ ID NO: 184520 - DNA, 3186 bp, Cannabis indica
atcctcgctttaacaagctgcacgcatttatgccttttctggttgtaattcgatgataggatattcttttctctattacacaatgaatgacatcttacattgtaatttggatgaaaccttatcatctttctattaatatacaatctgtatttcttttataataaataaataaataattctttttagatcaaacaaaaaagaattaaaatgagcaaagactgtcacaattttaggaacatttaatctcctggaataataagcaattcaaggattcacattacctacaaatctaaaaccagaatttacatccaatttgatagtgggataccaaaaagaatattcataattttcatgaatgataaagttcagcaagaattaccaattgatggtgtccggaacactgcaagtgcagtggtatcattcacccagcgaataacaactccacgatctctgaaattctcataaagcttctccagttctattgttttagtgcttggtgggaaatcagccaaaacaaggacatgacgagtaccatacgttgctgaacacaacaacaaaacaaatccttaattctgttttatgacaagaatctttcactagaaaacttaaacaatctaaaatttatttattacaaataatacagagtctgactaccctttcaaataaaaatgatttaactccagacatatcacctgccctgtcacccagctccccccacaaaaataaatttataaaattaccaacaataactattatccaggattctcattttctcactttcagaaagatagtaggattaggcaatagtcgaaactacttcatagtcctcaaaatagacctcgagggtttgattgagagcaaataattattgtactgtaaggaaagcacctaattttttgcaatccatgaagacaagacactatccagtgttccatatgaaaaaccttgcccacttacacaaaacattatggtggacatggaaccaaaaaattgtttgaatttatacaataaaagataagtatcaccacatagactatcaaaactaagaaattgatttacttaataaccagtgttgtggaatgtaaggaaacagaaggcatgtatataaatccaccactaaaaagaaaatttgataaactgtaacacatattattctccagttaatggcataaccaatcttaatgttgtatttgaaaatccaaacatatatttctgcagatattcttacgccgctatcttatagttcataaatgtctaaaactcaagtaaagggaaatggtagtatgaacgatcaactgattaagcataatacacacactgaccataaaaatgaaaattattgagcacttgcagttagcaacttacatgttgttttctctgtattcctttctgaactatgagaaacatctccatcctctaaatcatcaataactgacttatcagataaattatcactgtataattcatctttcttataagaaaatgttccccttccacgccgcttagggtagggttttaggtttggtagcttccaagaaatttttgatactccaggcagacattgtgaggaaagtaactctcaggtgagcgctcggcaatagcttcccaatctgtagttacataagacagcaacttgtcataataatattggaataagcttactgattcaggaatacaactaatgacatcataaagcagagactgaagctaaaaagttacataggacttttcctattgagatacatgtaggtcaaatcatgtgatatgatatggtgcttatggataaaatgtttgatgacaattcatgttgattaagtatatttgaaactagagcataggcaaatagatacattaaaacatggttgctgtcctgcgccaacaaaatagcacaaaatctcccacaaaaaaccaattgagactgaaattgtgaaagaggaaaaaaataaaaaagaagttgatatgcacaattatgtggtaaagcttatactagaaaacctctgcatttgctttttaaaaggccactaactggagtgttcaataaccagctaagcagatcatatttagtatactgttacttttatgctttacaactattaaagagcttttctcaatctgttgatgaatgagaatgatagaaaagcaagaggtttaaacataaagaacaataaacttgacgcatgtttgcttacagataggtttcctcgacttttcttacaagtattacaaatcatcatgtactttattggtgtaatatacaataagttatttggggctattttctccctcggggagagggcttccaaggctaccaaataaataaagttaataataatagcttttatgaaccttccagagcaatattctttgcaagagtttctgctttttcaaagtagctgttttacaactctaccaagcatattccataaatctaccataaaagttgtctccacaaatgcctcctaaaaccagcaatcttatccaatagagttgatatgctaagtgaggaagtggtaaaggtcatggaaagttaacacaaaaatgttatgtaccttttctcttaaatacataggaatatacaacccaaatttaggtctttacactaaacacgtataaagtcattaattatacaagttgtaatttttgtaaagtcagcatttttatcttaaatcttttcaaattctgcaaatagcaataaaaatagaaagcccactttgacaacgtaatattactcctgtaaagtttaaacaatcccatgatgaacagttaaggcgggaaattcctatatgctagttcataattcaatctgattaatcgtagtaatacgaatactaatgcccataacattggtactcccaatcccagtcccacccctcaaaaaataaataaaaacataataatgtgcagagacaataaatacctaccatcatccgagggctccttcaattgcgaagtatcatctagaaagtttgttgatttttcgatgttgccttcaataaaagaaaataactaaatcaactacaaaatttcctaagtatgaatgacataaagaaacagagaaaaaaaaggtaccattagttgaagattcattgcgaattggagcagaattaggcgacaagcatggctgctgcttcagagtcccattagaaacactgaaattgaatataaaaaaaaaaatagttgagaatc

SEQ ID NO: 184521 - DNA, 4731 bp, Cannabis indica
ttttgatttggcgttaagtaataaagcttggtctacatttaatccctttatataaattattatatatattagcaacaatattgatgatatatgcaaagaaattaagaataattgagtgcatgaatataaaataattaataaccacctaatctttggtcgagcctccaaaagaatgacagtttgccacataatattgtaaattcattatagtaggccttaataatttatatggaaatttaggtaatgataatgataataatgaacagaaatcaactgagcatatgatgatgatgactactacgaccaacccttaatggccacaaataaatgaataaatatatagtaaaaatgagaactttataatatatttataaattatatatgatattatgattataatactcacatgcttgctttggtcgactttagagttgtgtgaccaaaaatatacattcttttagggaattcatttttctcctatactttataatataatgcattaattcagaccaagtaatactgcactataatattgagtgtaaagaaacgagtctgaaaaagattattttaaataaaaataaataaataaaaacataaatcttgtggcaaatgtggcttgaaattttttttttctttggtagtattattgtttttattgaactttgttgcgttgaattttattaaggttaatatcctattaatcgatatcttctatatattggctataggaagctacttaaattttcataaattaggtttggctagagtctccagcactaacaaaaaattacgagttttttctgtttttttgttttttctttttttttttaaggttcaatatataagataatggaatgtagtgtgtaggacgaattttgttgtatatatatttcattggctctagagttacaattttaattgtttttcattgattatattatttatatgcatataagtgtgtatataggacattgtattagtttttaaatttacaatggaatttataagtataagagctggttattttttttttcaggtaggaataaatgttctgcatgaaaattattatatttaatacttaataatacttaatgtaattattaattaggttatgtggtgagaggcaaaagttatagtaaaaattgtatctggttcgtgattgaaataaaaataattaatatatttaggacaaagatggtttattttgttattctatactaatattttgtttttctagagtaattttttaattatgcagtaatttatataatgagtattgagcaatcatatatgtgtacacaaaatcatatatgtgtaatttatataataagttgacacaaatctatgaatgatatatttgtctagtcttttttggtgcaaatatatatccttaaaaaattattagaaacttcaatttccaaaataataaagacaattgttttgaattagtatatttatgaaacgcgttattgattatgtaacatcatgatctagcctgttgtaattaaattctacatctaaaaggtataaatttgttctgtaaaagaaagtacaaatttgatctcacgatcaattgcaacatttatttatctattgaggtttctaatgctacacaaaatctgtgtcgtataattagtaaactcgagtctaattggtcatactttaagaaaatgatcagataatatccatgcacatgtgttgttaaagagttttacattgataatgcattgaaattaaataacatatataagatatatgagctacttatcttattgtcaattaattttgagataaaacttcatgcatcttaccgtacactcacctattctactaatttaaccatacacttacgcattctaacaaaaacggacaatcacctatagacctacacatactaacattttaaaaagaaaaaaaaattacatgaaaaataaaattaagagtaaattattattattattattattattattattattattattattattattattattattatcacataaaaagtacctaagatccataatgcattaaaagatcaagttcaaaataattttctgataatattcagaagaaaaaaaatctaaacaacagaaataaagaagcaaaaaagtaagttaaaagaagacagtgaagatcaaaaacaagtcaatttggcagaaatagtaaatagaaataaccattttttttaataaaacgaccaaatatttcattgatgagaaaagtcaaaagtatattagtcatatcaatgcaaggaaggaaattatgcgaattaagtaaataaaaataaccattaattttgaaagaaaaaaaaatagacatagtgtgaaactattttacaatatcattgacgacacgatatcacttttctttttctttttcttactcaatttctaatttagaattagaaatgaactcctacatgggatgcgtgaacacattatttcgataacttattaaataataaaattgataaataataacattaatagtcttcttatcccttgtgcgtgaacctggcaaaccttcatcatctaactggaatttttttgttattatttttaataaatagttggaattttccctcaattattaattatatcaacagggaccaaatgagccatactgcaaatgtccctcccaagcaaaattataaccaaagtctcatcatttttttaattttattttattatatttttcaatggactttgtattgagtctgcaaacaaaagggttatatattataatagtcaactactttaaaatcaatatttgagttcaaaatccttcataattaaaccaaaaaaaagtaggtccactctcgtgaagagatgggtctcatagtatggtccatacattaaggaggttgtgcattgtctctccatttcttcttttcaaagtctatggatgtgaacctctaatacatggccttttctttctttcttttttgcatatgtcaaatcttagaacccttttagttgacatgcaatgatgatagaatagagaggctaattaataaatttaagcttatatataatgagatacattgctttagggaatagattgaagccactccttaagacaggtatctatcactcttgctctttttttcatgtgctacttattattgtgttgtgtatgaaagaaaatgcttgtggtacttgttccaactatgaaaccttatttctcaataaacaaaaacaaaatctagtactcttttgtgtggacctgtcatcaagatttttccttcttttctttgttttaaataaacaaataaaatagtgatgaggaacttgagaaattcatccacttgcccaatcaattgaaaatgaggtagacaagtttttctcctttcacagtccctaccctataatatgatcttcatttagcaatgtcactaggcccagtcataagcaccatctgtcagcccatcaaaaagcaggcatgacaactatgtagatagatacatagttaaatttcatagaactaaccatggacttggaacactctaaactaagaattattcaagctaatataattgtaattaataacataatatcaattagtaaattatgtcttggctgaggcagacttgatacctaatacccactggtggacatggaaatttttgccaaccgaagcaaaattttaaatatattttttatttaatatattagatcttaaatatagtaaaagagttcttcctgttaccctcaaccgtcaaaaattcaaacttttctcttcaaaatctgaaataaaatatgtcaatgataaaatttgaatcctaaatttttttaagaagaaaaatagataaatttattattacacaaatttatatatatgtgggctctaaaaatataaaaatctgacactttggttaacatgaataggattacatctcacaatcaattgaaaaatgtgattatgtattttatatatggtattaaatttttacacagtggcactttctaataaataaataaatactcataaccttgcttgctatatttgctcttagagaagattctaatattgtttggagggctattatgcttgagcttatacatgctattgttgtaatcgaacttttcattaacatacaatagcggtttttctcaaccaaaaaaaatacaaagaaaaaaaaatagtttgattttatgtaattttttattaacaaaacagaaagcaggtaattttcacaattttaaaagtacacgacagctacattaaagatttatacataataaatattaacataaaaattaataatttacaagaaagtagcttatcacaaacaattcacaagtaacccaaaagacaaatgtaaaacaaaaaaatgcaacagtaaagttttagtgagtgcatgccggctgattgtcgcccaccaagaaattcctccaccacgtttggtcggtcatcctccaccacgtgcttcctctccttccattcctcatagttttttcttttttatttatttactattattattattattattattattatttgataccgacgaccacaatttaaaattttgaagcaaataaattatataataacaagctattgtttttaaaaagttactgtagaataaattctttagtgttgtttgtgtatttattttataaaaattgttctttagtataatctatataatctggacataattatgtatactccaaaaggcccaaacatgggaccatccaaccatgtattagcccaaag

SEQ ID NO: 184522 - DNA, 2996 bp, Cannabis indica
gcaattcgacgtattgcatctttagctgcaagcttaggctccatccctaatctcatactctccactacttgatagctgaaatcagatgaataccattttgagattatataaaaaaacttcaaaacttaacaataagaaactcttttctctttctgctttgcatttttttctaccatggaagaaagcgcatcataatatccccatcccctgttgctccgcaggcgccaacttcatcatcagcataggatgaagatcctggaatcggtccatcacccaccctgcatttgcattacacaaaaacatgtctttggtgatcttttctaagaaatgagttaagaacttgttacctcaaactcaattcacttactggtatataactatagtgagctgatcgggagcccactcaagtggacagaaaatatttcatcatcctctcaaagtcatttagaaattgttttacagatacttcttttattaatgttattcacatcttttttgtgaactcctaacacttttgagaaaaatctcaagagctcctttttgtttaatttttgttttcatcttatcaagttttcagagatcctgatggtatattctattgacataagttccaaaatacatatcaaacaaactcaacacaatacttataactagataaaacttctaaatgatcaataagtcggaacttgagaactactgtgaccaaactattgaagacttccgaaattaccaagatctttcagtgacatatattcacattatttttaacaaaaaaaaaaaaagcaacaatgagagaactaaaaattatggaagatggttcgggaagagcccttgttttcattttggtaggtgtaagtaagatcgaagtaaataataatctatttagagaatttaattgcgaacataaataaactgtttttattcagatatgaacatgagtgaattttgggtgatattgtttaacttgtttacagttaaatattcttttaagccttaatgaaaatataaacagacaccgcatatagcagctggctctgcctagatcaaaaggaagctaataaaattttgtagatttatatgtatttatctcaaactctcagttacatttcacttaagcaacctagatttcatataaatattatatctttatataatatacagatgttttgtgtgtaagcgatcaaaattgtaaaccaacaaagactgaaaatagtatcaagtatgaacaactagctcaatataacttacctccccggaattttaaatgtagcgccattagttgatgtaccaacagcaatatgccccaactggatgaaaaaataggtaaggttacaaaaaccattatcttgaaaaaagtaataaaaaaatgctaatgattatggattcactttatcaataactgccatcgatatggtatcatgattgtttacaccaactcgaggcaaacttgacttgaatttttccggcagaagagaggcttcaaaacatgtcctgtgactatagtccttcttaccatgataagggccacaactgtttacaggttgaacatttttccaaaaattaggttggcaatgattttgcttccatttgatccacttctcagtagattctgttgagctaaggtttgttggtcctggaagtcccattgaaattgcaaaggcggatgctttctctccaacaagcaaagtgtgtccagtatgttgcataactaacctagcagcttttattccatccttcacatatctcatagctgcaacagctccaacctccattgtcacctacacatgttcttaaaaggaacataaaatacatatcattttcaaagaaaaaacaaatatcagagagccaaaaatggaaaggaatgaacaagtaaaaggtagttactccatccatgaccaaagcatcaattgtagtttctccattctcatctggactcccaccaggcccaactgttcatatcttacaaaatacggttcaagttaaaaccaaggaggaatatgatgaaacatgctgtattgtgggttatcattgtcttgaaccacttggaagttggataagatccaattgtataaattttcatgatattccttttgtctatgaagagccattcttcagaatttttaataaattaatcacaattttacacagctagagattacatttaaacaaaatagaaaattttatagtttaaaaaagaaaaatgggaagcacttatgacttaccagtaccatcgcacctgagttcctcacaagcggaacaaccttcaacgacagcatccacagctgaaaacccactatcaacagccctccaagcagttctaacagcctccacgaacggccatgtgctcaccaccatagggtacacctctgaattcacaatttcatgtcctaatgcctgatggaatcataatggatcattagtgggtttatgatgaaatagaaagacttcaaatcagaacagaccaacaattcctaatgattctttaattatttctaaataagtaatcaaaatttgtaacatttttcctccgaaaggggcaaacagaagaagtaggtgttattaccaggaagagtagtgatgtatggacaaggatttgtgcagagaacagtgatttggaagccatggaaggcccagcggagaagcttagcagatggaaattgggagcacttctcactagtcggagagggagagagagtgtgagattcctacttccggcagcaaatggctgcgaatgggcaatggtcaactatgctgtcgttttcaactaatattgtcgttctcgggctagaacagagcaaacaaaaacaatgtcgtttttctctgtttaggcattagttgagtttttttgttttgttttgtttggttttgtttgtttttttttttagaaagaaagaaagaaaatgaaaaagaaaactgaaacctactagtattgtacaaacgtattctgaagtattaaattaacatagaaacatgtgtttatttcctcaaaaaaaaaa

SEQ ID NO: 184523 - DNA, 7837 bp, Cannabis indica
gttgtcgaggaactcagagacggctgagccttgattagatagatgattacaatttacacatctaactgatgtgctttttgtttgatacagtgagtgtattcattctaaaatttacatcgatgacattaaaatattttgaaatttaagaagataaaagaaaatggtattgaggcccatctttctcttgttttaattgctgttaaatgattagcaaatgctattgatgtggttagaacatccaatctcaatggtaatatcaacaatatcaccattcttattaggccttcatagtattcttgcaaaactgcaagtttatattgttattattattattattatctttggcattgagaaattaaaaccaaaatccatcataataatacaacaatagagatagataattacagactacatcaaaatacaacaactcactcgacaaaaagaaagctaacaagaatctgctgctgatcactgatcactgatcacaatggaagaggatatccccgcagatattcagaatcaacgcccgactctcgtaccagtgccacccttccggttcttgcaaccttttccaagaaacaaagacagaaattgaagtaaaactggaaaactacaacttaataggtttctaattaccttaaatttgtttgtccaaataaagcctctcttacctcacctcatatagaactatttgtttacttgagctatgaattctatgcatactaggctgatagtaaagtccaaataaaaactcttggatatatgcaatgttattgttaatctggacacaaagaaagactaacctcacaaataccataaggctctaataacttctgcagtgccaccatcttgttcaaatcaccagtaagctatataaatatatatatatatagcattacaaacaaatccaaaatgaataaaaacattaagaataataataataagaaaagacacacttcaggtagacctggtaataaatgtgaaaggtatgctaaatgtgtgagacagttgatgctaattggaagacaagagaaggtagaccagacctcaagggtgatcgtgtgatcagacacatcaactgctttcgcacggaaaatgttggctatatcaagaacatctctcctagcagcagggttcacagaaacctttatcaacattagctctcgctccgcaaaaggtaggtgactgatatcccgaacctgaacaaacaacaaccattttatttcagcttttctgtgcagataacaagttccaatagggatcaagagattcatgggatattatagtactaatattaacatgaatgaatgattagactaactcacggcccttcttcggattcgagataaaatccaaagaagggtttggtgcctacgggttcaggccgatcaagctcaaactgttaaattcatttcgtagaactaaaacatggcagcttttggcttgaattcggctgtatatgtttatcatccaacttagcaaatcacgtgccaatgaagaacctcacctcatgaagacctattaacttggaaagctgctgaaccaacttggcaatagagtcatcagtaccgggaacaacagtagttatacgagaacgcccctccaattcggcaggccccacagcaaggctctacaatggcaaagtgtaagaaaattatagcacaagtaaaacaatgagcactgcacctaaaaatgcctgtatgaatagagagatcaactgacctggatgttataccctcttcgagatattacacctgtaattaagttcagtactccagggtgatcattgacaatcatacacaaagtgtgtgaccgaacaccagttgactgaaatattaattagaatgtcagaatggcctcagtactagttttacaatgctattacttttgctggacacaattaaaattaagttctcttggagcatttatactggtatggcttttgctttgaatagattctaatggaatttacttagagcatgcgaacacatgatttgatcacgcacattgaactttcattaggccttaaagagatttatttgtcacatcggaacttttatttggtacaatgaccatgacatacataaccaagtggtggattttataaagcatgtcgaaaacttacatcttcatcatagagaacaccccaatgagcatcaagaacttgattcagcatatagtcttcgtaaggctcaacaggataaacatcacccttcaatgatgaaatgaaaacaaaataaataaccagcactattcagtatatgatggttatattgtaatgatatcgattattataagtaatgtatgtgccctaccatcagttcatcttcatggattatagattaccaataaaattattgaaaaccttgttggtgagaaaagagaagagaaccataagtccataataattatctccaactaattgtataatttcaattcatctatatccttataacacatcaaataggactagaaatcaaccattctacaatggaagaaatggctaacaagtttttcagttaaatttgattgatgcagaatttacaactcttcatttctaaacaatcacattgggtatctggtgtaaaaaacatattttgcatgttagtgtggggaagtcagcttcatcaagctttatttatgacaaacaaaaataaacatgcatttacattatgatagtagccaggtaaaattggctttgtcaagcagaactacttacacttgatgatatactgtcaatatcaggtgaatgactttttttttctacagcaccattaacagtaactgcactttcaagatctggataagaagcggcagaaaatctccaaaatggagctgtctcacccatcttctctcgtcttaaagcaatctataagcgaaataaaatttaaatcatcattagaaacgacatttgcattattttgtatagaaaattataacaggcgacatgagtttctaaacaatctttatggttacccttacatggtcagaactgaccagcagaatttaattacattctcaacacttgcataatcgaggagcacatgttatctaagataaaactccttgaacttccatacaagtaatcactagcccaatcaccaatcaccagccactaactgaagcaggagtactttgagtaatgtgctaaacctttcacttgaaaccgtgacacattaatccattcctgcagaggttcatgctagtatctaatctatctaccactatcaaaaaggccccacatttagagttttatatcttcatgctaacagttacatcctaatagcagttgatgttaagaaattgaggatgtcattcatttatttcagattatgacatctagtagaaataaccttagtatatgatccccaaggcccactacatattataataatcgatttctgaagcagtgcagttgtatactaaacactaatgttcaattagaattgtgagcatctaacctttccagttcttgcaatttctttgaatccaaacttcgccaagtttcttaggacagcaaccattttcccaggatctccggtgacctgacattcatacactttcatcattaggagtcactaagccctagtcctactaaaaatatagactttattgagatgattttcaggaataattcgcaatttctgaaacaggatgtcttgcaatgtctgggagttagttgcagcacttaagcaatttcttatatgattataatagctgctgaatctatgtttccaaacccaaatacagttctatatttacggccataactaggatgtagatacacacaaccattaaaaagtacaaggctttgtcaaaaatcacctcaatcgtcaacgaatgttcagcaatatccacaatttttgccctgaagatgtccaccaaccacataatctgaaagagaagttaaagaaaaacacaagagatgtcacaaaactaaaagaaattttgtatctaattcaacgctcatattcatgaagaagtaatatttagtgaaaaggaacagtatagatatgattatggattagagtccagttgcagaaagagaagtacaaaaaggtatcctatcttaaagatggtagatttcagcaacagggacctaaaataagaaacatgagattcctaaaacatgatggccattagacatttagctgaatatatatacatatatatatttaaagaactacctcagcacgggtagttggacctgcattaagtttgataagcatcagttctcgttccacttgtggctccctagatatatcttccacctaaagaaaaagaggcatcacgtaaccgagtatagcataggagctactgcaaacatattaacagatgcacagtttgagttccaaggaatgaagaagtttgagtctaataccacaattttgtctcatattaactttaacaaacaaatattctaaagttcagcacaaaccggtagttcactttgaactatcatactaaagcttcaaccttcaaaatagtaacacctcaaagatgaaaacctcattttcagatcaaatttgtgttaaaagcaaccaaaactagattttcagaaagaaaactttcagaaatgaataaaaaaaggaattaaagaagttaccttgatgacattgacaagcttattgagctgttctacaacttggcgcaatacattctcagttccagacacaacaatggtaaagagggccttatccttgttcagcccaacagcaagggattcaatgttgtaacccctccgagcaaaaactccggcaattctgtttattattccactctcatccccaacaaacacagagatcgtatgccgtttcaccctggtgaattgacaacacacatatatgtaaacaattaaatataaacacaaatatgtatatttagtttgttgagtagctagttgcaggattgtaaaaaaaacatgaacattgtgatagtgaatcaaagataaagaaatttaaaggtactgacttagagatagtaggtggtggtagtggttgtgagagtgaggtagtgatagagacagcattgttgctatttgtggcggagagaagtaggttattgttgagttgagaggtcctagtgcgaatgggtggtctgaaatggccgaaaaaatcaaaacttgaggagaacccaatagggaaatccagtgtgggagtgagttttggggtggccatggaaggaggtgtgacggctgccatggtgaactggacacaaagactgcctttggggtctatttttttgttacttttagaaaatgagaaagaaaaactagtaaaaagaggtgagatgtggtgagtagagtgagtgagtggagtcataataaattccatatttgtgaatgtgagttgatgtggggactcacttcatgacatctacacatacacacaacccaacacatcacaattcacaacaagtctttctttttttattaacttaaatttgccaaagcaatgataaagttcagttcagagaaaataaaatatcatgattttgttttccgctaaataacaaaaccaaaagaaacaaagcaaaacctcccttttttaattaaaatgatgtgttttacgttgttgattatgcattaatatctccaacacaaatttaggatgtacttatctagtaaataacttttaataagtacatttgttacatgtgtatcaaattagatatgtgtgtacacataactccaattattgaacttgaactttcaagtttcaaccattaccataaccataaagatgacatagcaagagttgtctcccactaacaaaacaaaacatgacataataatagttacctgattataacaacaaccattattatttgattgggtagcccatgaaaacccatatcagcccaaacagaaaatactgtatcccataaaagcccaagtcggcccaaaatgatttttgactcacagtcactcctttatccgtgaccaaattttatcatcttcgtcttcttcctctttcttcttcttctcattttctccagtaaaactctggtccgattatgattttctgagaatcgctattgttcttggaagaggaagacaaacttagtttggtacaattcttctccttctctctcacaaattttttatttatttatttatttatttataataaattattataattattattgaactgctgttttccaaaccctgcgcaatgagagcatacatgtagaaaaaagaagaattttctattaagaaagagaaagaactgtgtttgaaatttgaaatttgaatgaatgaatccatattccttattcaaacattatcatcatcacaactataataatactaataatagtattattattttaatttaatttttgtttaattaatcattgactctgttgttgtcagttgtgtgattaaacaaatcaaatcaaatcaagagaaagaaaaaaaatgggttcaaaatattcaaaccttatcatcttcatcgtcatctgtggaattggaattggtaattgttcatcagaaacagaatcagagatcctcccaaccccaactccatggccgcatcaattccactcgatcctaatgatgaactacacaggaacactccaaatcatagacctatggtacgattggagcaacggaagaaactacaacataatccaacaccagctagggaacgttctttacgatctggagtggaacaacggcacctccttcttcttctacgacgaccagcaggagaagtgcaggtcaactcagctggaggtgggaattctccgccctaattggcttgatggagctaattacttagggcaaagacatgtggatgggttcttgtgcaatgtgtgggagaaagttgagttcatatggtactatgaagacgttgtgagtaagagacctgtgcattgggaattctacactgggagaaatgctcatgttatgacatttgaagttggtgctgttcttgaagattctaaatggcaagctcctcctgattgtttccaatctgaatctcatcatcagaatccattgacattgccacagttttccatatcttctcatatgattcatcatcatcgtcatgactcttcttcttcttcttcttcttagtcttgtgtgaaattcatgtaattgataatacaaacttttcttcatctcattcttctcatgtgtaaaatcatgttgttgtattgcggtgcttaataatggtaatgtatcattgagaaggggattttctttgcaaaactaacatcatgtcaagtttttgagaaatgttaaaacaaacttttaattgttaacttttataaaatacaaatccaaagacaaattagtatcaacccgattaagaatgacaataagattagaataagacaaattacagcacaggcagaagcagtataataataatgtgctcaaaaataactcctttccttcattatcattcagttataacagattgcaaatatgaagtcatttgctgcttgctgctgagaaacgacgttatatattcaaaattacgacatcactaaaataacaatgatttattcatattatgtaatgattttttttaacaaaaaaaaaaaaaaacgacaatgatgttaggaaaaactgacaattcccaaacgacatttacgatttactaaaaataaaaaaacgacaaaaagtgaggtggcttcaaatcaaacatctcacccatgtccaactctcttcttcttctccacttttgctctctgactctgtcaccacaactatattcttgttttgattcgaatcctctttctgtttccacccaaaattgatcccaatcccaattactgccactcccaccaacgtataaagggtacgtctctctctctctctctc

SEQ ID NO: 184524 - DNA, 1024 bp, Cannabis indica
agatattagtgtcaggtcagatattagttctttcaaatcttcttgagtaaaaaaaagagaaaaaacattaatcactgtaattttaatttctcaagcaataagcagtaaaccaatcttaatcttaataacatgcataagaaatagtcagaaatgaggaaaatatactacatgattttacaccaactacttgtgaaaatatactcacactgagaaataggctggaaaggaatagtcgaaacatatttgaggcttcttctacatccttagaagtcactcttgagtaagggttcgctacatgtaatttgaacttgccaatacttcccccttcaatcccatcaactaaggatcttgaattgacaacttctggatcgaataggacttcaagttctctagaaatcctgtcaaaatgaaattgcctcacccctttaaaattgctaaggattcctcccaaaatctgtacatccacctcactgtatatgccagcaacccccaatataattttatcttgctcactgctctgtacaaatgctgcttcaaaaccagcatcttcaatcgcatttactatatcatctttacttactgctgttggatcatactcaacttcccctaatgaagtcgccaatgcaaccaccgcccttttcacaccaggaatatctcttagaataccttcaacagagctcacacaagctgcgcatgtcatacctcctatggaaaactgccctactagtgttccttggggctttgttccaactgcactaggttcaggtagaatctcagcctcaaaccctgcatcttcaattgcattcttgatgtcttcatcctgattttacaacagctaaggaaacacttcagattctaaatgggaataaattaaccaaaagcaaacatttgaaagtgtttgagaattagcgtcagctaacagaatcctgaagccgaaagacaataagaaagaggaaaatgaaaagagagcacaagaaaaagaaaaataattgcgaaaagtttgctcgagaaaagtgcctatgtt

SEQ ID NO: 184525 - DNA, 2740 bp, Cannabis indica
ttatttttttgttttaaactttgactttatatttttatttttttattaccgttaatataatgtaataaaataatataatacaatttaatattgaataaaatgtcataaaaagataaaatataacaaatttatttaaattatattgcaataaaaaaaatataaagtagttatttatatataaaaaaacaaattaagcatataataaattttgcaaaaatatatatatatatatcataggtatttttttttttttaaaaaaattcacattaagtgtttatttttcttatcactaccttttttttttacctattttaattttagttgatataacagaaacaaaaatattaaaaaataaaaaataaaaaagttgtaagagaagataagaaaagaccaaggagaggaggagctttctgccttttatgtgggactagtagtagtagtaatactggttcaattgtggggtgtggagtgtgaaagccacgcttccacgtatcatgtatgcttttgatgagttgaactacaaacacttgtacttaagaaagactaaggagttttctttcatctgatctctccttatcttctcctatcttctacattttactatactaatcaagagaaaagatcatggccttccaagttcaagcagcagctttacctgctacagctaaatcttccctcatatctcccactggaaatgccaccggtctccgtctaccctcagaccgttttgctctcaaatcttcctttttctcctcctcatcgcttaggctgcttctcttagtttctcctcagaatcaatgtcagcctctgctttctacggccccaaggttctccatgcgtgttgcctccaaacaggcctacatctgccgagattgcgggttggtataagtaaccccttttctttaattgatttggttttgtctaaattcgatgttgaaaatggatgaaccttttttttttaggtggaaaaatatttacttatttttggcatttgtatgtacaattacaggtacatttacaatgacagaactccctttgagaaattatctgacagttacttctgccctggtaaactactaaaactgaactctgacctcatttccttcttccatggtgttttagcttttcaccttattgaattgttcactcacctgttattagttatatttcatcttatagtgaaactaaatactttcaaaactatgggaattttaaagctattgtttgctttagttaggcttttggtcttttgagtggttttttataatgttaatggtggcaccaactataatcttaaactttcaaataacatgttatgttggaatcatctaagaaattggtggtggaatgagttagccttagattgatgcatagagtttgtgaattcctaagaggatatgataaatttggttttgtttttctatggtatgaagtttgcggtgcgcccaagcgaagatttagagcataccagcctcctgtcaccaaaaatgccaatgacaaagatgttaggaaagcccggaaagaacagcttaagaaagatgaagcaatcgggtaatacttacataacaatattttttcattataagaaaattactatttcactttccaacttttgttgatcatcataagtgtcgttaatgtttagcaataagaatgttattagtgctgaaacaaattaacctgactgcatccaattgtgaatgacacaggaaagcactgcctattgctgttgcagttggagttgttgcacttgctgcattgtacttttacctcaacaactccttttaggcaaaggataattgtaagcatatgatgttgtaccacagtccatggtttgaattgaagctccaaaaccattttgagtaattcaatagttcttccaactgtgttctcaatacctttatctaatccctgcaactacaattgcaattcatctcatttggttaaagctgctaaaaaactacaaggggagctgaactaaaaggcagttacattatattcatgtatggagaaattacacaaatcttttgaacacaatgtaagaggaaatcgatttcattgaatccttcaccatatttgttaatttcatttttcttctatagttggagacatacatttacatttcaccacaaacaaacccttatgatacataattacttaatacatgctgcaatttcctagtacagagaaccttgtagttgtatgtatgtcattcctttcccacccattagtaaaatactgcttattagatatcatgttaaaattaaatattatcaacaaacaaaaattgatatggttgacaagaaaaatttacatatcctatgattacattaactaatgatcattctcgcaaaacaaatgaaccctcgattcttttctctatggactgttgaagggggaaatttaaaggagagaacatgtctccagtactagaggcaggcgctggcttgaattcataagggccttcctttggtccccaaacctgtaaacatgacaaaagataattacctaccatgcgaaagtaccactactaagctaagtgttatgctacaatcaattagaatgaaactacattttcaataagaaagtcaatcaaggtgacaagtacaagaacaaaaatagatgatagaatgtctcacataactaaaaggaataaggagaggaaaaaaactaatctataatttctcaatatctagcatgcacagaaagccactggactgattgtagatcaaaggaccag

SEQ ID NO: 184526 - DNA, 4071 bp, Cannabis indica
tttttttaatttttattatttgtcttcctattattatttggaagacatatacatatcatattattttcattttttatattgtatggtttaataattatttagatgtgtgagtgtgagtgtgagtgaagaaagaaaccctataagacgtaatttggggtttattttctttttatattgtactgatttatatattataatgtattaatgaaaatacgaaaagtatataaatatttttagaactgtcggtatgatatttttcctttagatttttaccatcttctctctctcttatatatctaaactaagcaacttgtcatattatacattatcgtaacaaaacttttgtcgtatcccatgtataatataggtcagctaatgtgtcctttaaatttatctctgaaccaattttgtctcactctcacaacttagagcagctctaatgttaaaatttatatttagtgttaaatcaatactaaaattgtactattttaatacttattttttttttttacattttaaccacaacataaaaaattacactaaaaaatatattatttgttattatattattttattaatataatataaattttgattatatataaattattttattatttgttttattgtatataaagtagttattaaattattaaaaagtaaaaactttatactcccacaaatatagtcatttttagtgtttagttcattggttggagtaattttatgaaaaaactccactatatttaaaattttacagtaccatgagaagccctaataatcgaattaatataattataaaatgtattttattttatttgaactattgaaattaattaacctaacgaaatcactaatattaaagttttaatttagtgtcacgagaaaataataaacgtacggttaaattaatatcactaactatggagatttttagtctcttggttagatgtaatgtaactaaacagaattggttatgacagttagtttaattagtttgtaagctcggattccttttctcttttcaagccactttgttgtcaaacacaagctttgtggtaaactcttccaataggagaccatctaaaaagaattttaaatgaaaacacactttgagtgatgagggtttgtaaaggatttgacatgtgtttgattgattgcctcattggtgacttgaaattgaacctcctttcatctttgtcttcttcaattagcttgaacattacttttagcattttatttatctttgagtttactgaattgttattttaaatcaatgttcttgataggtattgttaattcaccacaatcacataacatgtataaattattgttattattttagtattcttactagttactgccaacttttaattatagtaaaaaagttttcggagtttattatataaaatatgatttttattttattttatttatttagacacaaatgatgaggactaaatttgcataatttcttggtgaccatattgtttcttttttgcattaacactgtctatatcaaccaaccacaagctcttcttccataataaattgattggggtagatgcacctaattatttcaagtgttgttctaagtttaaccaatttgttaggagcactaatatataatatattccactccactttataggaatgcacaagaatggctgcaccttatacatgctctctgtgtgtagagatttagtgataaacagttacaagtagtaggagaaataataaagagtaattttcctcaaagttaagtaacccatctttaagttatataattttatgctctcaagaaagatttttacaaaaataactttttattgtatgacaagtcataaatattcttagagacttttgaacacctaacacaaaaataattttttatctcttgaaaagttatatatgtttttggagatatttaatcacctaccgatttataatatcttcttcttctaaaataaagtctaactcccacatctcaacatttgaatatatgtttaaattaaacaagtttcaatcatatttgactatatattaaattgcatcttgagaagatattgtcattttgacgcaagagcctcttcaaagttcaaactaccataactcattgtttatcctaaaaatatgtttaaccaagttatgaactgcagtattaatgttacgggaacatgagataaaggtgccattaaaaatttagaaaacaaaattatgatatccacttacagcacactcaactcaactcattaccatattgacctaacaaaacgagacgtcgtttcaaatctctaatcgttcaatagaaaagtgtcgatcaaatgtgttggaattgaaaccaaagtccaagaggcttagttgtctcagcaaaagaattacaaggattagtggagaagttagctcaagattgcaaggctctcgctgatactgttaactcgattgtgttgaaaggccttagtcttgatcacatttttcttactcaagtttctttgagcgtaaacaatttatgttggagctcgtataaattaattttgatttttttttcttttgcaattttactttaggcacaaattagaaaaagaaagccaagaatcgagttgaacaaaatagatcaatcgaaatcaaagtatagtcactcaaagcaaactgaattcccataaaaccattttgattgcagtgcctttcttgattgagctgagcccatctgattccaatccaatccacataactaacccctacaaactaacattgaaaacaaatggcgggttggtgggtgggttgtgattgatgaacatgttgctcgactcaattgatgttggaatcatcgaagtcatcttcaaaagagttgaagaagtcggcatcagtgagcttattgtcagcaatgacactctcacctagaatttcaagttgatcaacatcgtcgacatccattgccattgtagaaccttggttttccatgtccccaaagaaatccattgtacttgcccctcttaaacttactgactgtctgagttgcaaaagaaccctaatcgaattagtgttcttggtccttaactctttacacctggaatatcaactgattaaaaggtgcaatatagcctttgggagagaaagaaaacacatcaaacttggtcattattgaatctgtcaaagtctttctagttaacactaagatgaacttactaatgtagaaactaacaataattaaacttaatgtgaaagcaaaatcagttgaaggcagcaagcactgaccaactttaaatgcaaattcaaattcattacagtcacaatacatctttataaattttattatataatacatatataaaactaacaaattttgaattttctctgaagtttaactcacaattcaacaatgtgagacagtcaagtcaagccattccaaaatctggtatataaagcttacaatttcacaatacaaaatagagatcatttactcattttaggttatagttgaaacaccttcctttgagatcaaaatgacagaaacatagatatataaatatgaccaatatttacaataccagaacgcaaaaatgaaattgattacgccatcactatatccagttctgcataaagaaattcaaaggaaagcattcgatcttaacctaaaaccttgtcatcccgcaacattgggcactaacaaacaagaaattttccgcaagtttctcataaaataaggaagtcgttttttgtattgttaactatcataggaacgatgggtattgtttgtattgggagttgaaaagaaaagagttgcgggtagagaactcaccaatggcggagaaggagaaagagtgaggaaggccgttgggttgtgactcagttccaggcggggaggagaggagaggagcgcctgcctttgttggcgttggatgtgagggagtgacttgagtagttttcagcccctttcaggtggacgatgactgaggaagacctccgcttggagagtgagaaagagttgcactgtgaaatagagcataaaaggtgaaactctcttaactatgattttactcgtaccactcctacttaagttttttttttttt

SEQ ID NO: 184527 - DNA, 830 bp, Cannabis indica
taattataaaattaaaataagtaaacaacaattatgaatttcaatgaataaaacttagggtattgatttcattaactttatttcacgaagttataattttaattaaattagtcttaatttttttagtcttaaattaatttatgatacatatgtttaataatgactctaattaatttataggatttttaaaaaaataaaatattttcaaacctctacaaatttatattcatgtttatgaccagttccaactataaatgtagcatattctaaatccaccaagttctttctagtcacatggcctctccaaccttactcgtgtccagaggcctccattgaaaataccttaaatgatttcaaacatatgtatgatcaaccttttaaaatcctcgtagagtgatatcttcctagactagtttgggattactctaattagatttagaataatttcgataataatcttgtgaaattttgggttaacatatgctttatataagaaatatatggctatagaaataagagaatttgcatgccattttttttaaaaaaatttaaatatatatatatactttcagatttttggtgtggctaaaggctaaagagtactaaaaggtggttcaaaagtagtgttcacgagtttggtacactacatatcaatccattgtccctttgcatatatgctaattaatgtagcatgttgttatatgccgcacaagcttatatagaaaaagaaagaaattaaaaaaatttagttagagatggaatggtttttgatatttttgatactttaatattactactctactgttaagaattataggattctatcttaa

SEQ ID NO: 184528 - DNA, 4984 bp, Cannabis indica
atatatggaggaagccccagccaccatgtgaggacagagaagtataaaaatggcggccaggccactctggttggtgattacgtgtaaaacatgtaagaatcatatttattctattttataataaatattaatttaattaattttttaaaaaaagatttaattaattattaatgcattataatagatagtcaaattgaagcaataaaataaataaataaaatatagtcaaatctctcttcataattaatataaaagcgtgggttgttgtaatggagacattactgtaatattatttaatttaaagaactcgagactcgagagattttatatgaaaaataaaacagactgtgttacgtaatatttgcacgtaacgttacctaataaattgatttttattgttagtgtattcttttaatgaatgaaaatttcattacgccataaccaaaacaattcgtagacttacacaaactcaagctaattataatcactaaattatcgcctcatcaaagtgagagccaagtttgagaagattatgaataatgaaattcgtcgattataaaacaaaaacttaagacacattaagatcattataaataaattacacgtcttgcaataccgagcaatactccgccaagcaaaagtctttttcacttatgagcttaccaacaatttaacagttagcagcttgtgtcaactttgatattgacatacttaagccgaaaacacatttggagacccactagaataatcatggcctcggccacaaaaggagaaagcaagtccatggtcggtgacgcaacacaatagaaattatagagaaaaggtatttagtaatgctaattaagctcatttcaactatgagtcagagctgttaatttataggaaatactcatccatgaaggatagagaggagccaagactctattacaactgtatagaacgtgtgtcactaaaagatttcaccttgcaaactaaatggctataacaatcgtctagaaaaaatgtgtgtggggtgtgtgtattaccgtagtctgacacatgggacaagttctgatcctgtgtcagaaaaagcaaaaatgtcggtgagcgaactgggtccttctttaaggtagacgtccgtgttttttttgagtggtcaacgtccgtgacaggctcttcgagtaaccttctaggtattgtttgggcacactttgaacttggtcatctctagatcccggagggatagtaagccttccgtgtcttggatggcatgatatataagacaagataaatcttcatgtatcttctagtattaatttgttcctaaatctgtaaagtttatccatgatttaattgaattggggggacttggcttgtgactgtttaaagtcgcacttctatttttatgtcacgtatcttcaatctgaaaatacatataatatttatatattgctttctcctagtgtaattgatttttatcattgagttcttagtattattttagttttgatcatattatttgagtcattttgatcttttatttctcttcttgaatatcaaaaattgcattataacaattattgttttttttcttttcgttttagacatagaagtagatactttcatatacatacccaatgagccaagacactttctatttaagtaactttttcatcttcctaattaaggttactaattttgctgagtggaaaacaggtttattataattaattaagaaatgccaaaagacaagtagtgattcaagttcaatataaaacgtgcatgttacagcacacaatcataagtaaatgactattaaccgaaagtaaaaatgtcacaaagaattagtgtatgtttagcatcataactaaaaaattattttttatttttaaaaataaaaagttattttttaaaaacacttaagcgtgtttggctttattttttgaaaacaattttcagaaaacaaagttacaaaaaaataagaattttgaaaacaacaaaatattgttttttattttaaaaacaatttatttttggttaatatttttttccactttatctcacatcattatactcattattttttcatattattttctctctcatcgctttctcactcattattttctctctcatcgctttctctctcatcattttcaaacattattctctctctcatcactttctcacattgttttctctctcttcattttttcacattattttctccctcatcattttctctctcatcactttctctcttctcattttcagtccgtggccaggccgggggccagggccgggtctggggctggggccggtccaggttcgggtccgggtttgggtctgggtctgggtccggatgcgggtcggggccaagtcggcgtccgggccggccagggttcgggttgggcttcgaggcagagccaagtccacggtcagggtccgggtccgtgtctaggttcgagtctggagtctaggtctaagtctaggttcgggtcttaataaggtcttgttcatatcgaggtctcaaagtattgaagtgattttaaaaaagtaaaataaattaaaaataaaaataaaaattatttttttaaaatatcagtcaaatgcgacttgtattttgaaaattttaaaaattattttttgttttcgtttctgaaaatacttttttaaaaataaaaaatagaaaataatgttaatcatgctcttatattttctcttttctttactatcaaaaggattagattcaacgagagatgtaaaatgtaaaatttgtgttatatttagtacaaataaataattttgtgatactatttttaagagataaaaattatattatatatttggtacaaaaaataattttatgttatatttatattaatttttagtattatattttaaatgtacaattaaatataaaatttattacttttattaaaagtataaaaagataatactttatcaataattttattatatataaagtaatgtaaaaagtttataatgtaatacaataaaaaatatttaaaataatataaaattatttatcgtcatagtgatttaactttagattaacttttattatgtgataaatttagattaattttaatactattagagtaaattttttacaaattatttatattttaatacttattcaaatttcaaaagactagcaatttttttttttattttcatatttatatatatatatatatattataaattaatattttcctttgaagaaaaggaactttaaaatgggtcaagtatcataacatatattattagtgaattttaatattaaattttatatattttaatttaataaataatataaaaaaaaactattaaccaatattacaaattacatggttttgggttaggcaccaagtgccaaatagccatactctatctagtgtagaaaactcaagaaaggccaggatggaggatatgacaaggaagaagagataagaaagaaacaaagaaggagtcggtcaacctggaaacgacatgtcgttggttagaaagaaacacgtgtctttcacagcttcattttgaactgtgttatgtgaatcttcttaggtgtcataaccacatagctccttaggtccacgttggccacgtagacctctgccatgacgtgtcagtttatggtctttcccaccgcaattcataatgagagatggtctcaactcaaatagttggacttgtttataaatacatatgagagtagtagcttacaattattatctcatctctatagaataagatacatatatatatatatataaatacagtcgtaaaaaatacatatagaattgaattgatataataataattattataatggcgagcacacggcagcatagacaagaattagatgccaaggcaaggcagggtgaaaccgtcatcccaggtggaactggtggtaagagcctcgaggctcaggagcaccttgctgaaggtatatatgtatatatatatatatatatattctgtataagtagttgatttaaccttaattgtatatttataatgaatatgtcacatttaagcaatttaagtaaatttggggagctgtcatcattctttttttgttcgatcttgatgtaaaaaatacatataataatatattaaaaaaaaaaaaaattatttggatgattgtatattggaattgggctaattgggctttttgttggatgagaaggacggagccgaggagggcagacgaggagcgaacaattgggctacgaggggtatcaagaaatgggccgtaaaggtgggctgagcacaacagacaagtctggtggagaaagagctgaagaggaaggaatccaaatcgacgagtccaagttcacaaccaaaactgataaatagtattccttttagttagatagtggtcatgttttttagtttaaattattataattttaatatgcacctagttttacatatcaggtgtgtctgtaaaagtattttaagtatcgattacagacgtacttgtttgttttgtttacttaggttgttttaatgagtagttgtagtgtggtgttttttcttgagttcgtttgtataatctttgtactaattaaatacatagtagatagtaattaataccattaatacatgtgcaggaggtccgaaaagtgaggaagtaaattattaaagcaaaacaaatcgtgtcctgaaattatttaaggttaatgtgtaaagttaaggaaaaagcaaagttgttttttagctgaaaaagcaaagttgttttttagctgaacaaaaacaaaagcaaagttaaaaatgagatgattttttttttgtgttaataattttaatctttgatcgaattggagtaattttcgaatgaggactttttagggaaggttttttttttaagggtgttcgtcaaataatcggttcaatctaataaacgattcgatttaatccttataaaaaaaaataataaatttgtaaaaatttgtatatatatatatatataatataa

SEQ ID NO: 184529 - DNA, 10392 bp, Cannabis indica
ttatggcagtgctctctgtggcacttcagtattacatacacagtaggttgaaccgcaaccctggttggtggtctacaaaggtttgttcaacaatatccgtttcagtcctctttcccaatctccctgtgtcttctaggtcggatgattcctttcctgtggagtaatcctctgtgtacattttgtcggtatactggctttcaggatacttttgtctctctaagtttatttatggggctgcaattgggtgtttgaaggttattctttctgattcaaatgttcctggtgagggagaacacaaaatcatgtcatacattcgattgcagcggaaccttcctggatttaatcctaatacacgccattgtctatatggtctggtgagtgttttgtatgttatttgtcactttctttatgtttttacaatgactgattgttaattgtttgattaaaatctgtgttattcttaatcaggatgcagatctcattatgctgtctctagcaacacatgaaattcatttctgtatactaagagaggtcagctgatactgtattctcaacagcctttacaatataaagcccttttattctaggagttggtatcattttcttattctttgtatgcaccaagtaggttattacactgcctgggcaacaggaaaagtgttttgcctgcggccaagttggtcatctggcagctgagtgtagtggtaaactggataaacaaacgccagtggtagatgaaactccaattcacaagaagaaatatcaggttggaaatctaaccgtcaacttttgccgcataattttggttttcttttactattctgatacaattttccatttgcagtttctatacatttgggtattacgagaatatttgcaatatgaactggatattccaaaccctccctttgctattaattttgaaagactactggacgattttgtctttctatgtttttttgttggcaatgactttctaccacatatgcctacattggagatcagggaggtacgtggtgtcaggtttgctgttgtagttttgagttatatattcttcttcattttctgcatcttctgagtcaatagtttctaacataattagtttaatccttattctgtaatctatatgtttaagaaagctgattgtatagattttcatgtcatcttccatgctagcagcaaaaaagaaatatattttttcttctgaataccatttataatcatgtttagtatgctaaactgaacgtgtactctgccagggtgccattaacttgttgatgcatgtgtataaaagagagtttgctgctatgggcggttatcttactgatgcgggtgaggtaattatttttattatttaaaggttgtttacatacttatttagttctctgtgttttctttttaacttatgaaagtagcaattgtgttggtgcttacatcactattccttcagtgagatttaatttgtccatttcatataagaacaactttatatattgtgtaatgttgtactaagtttctagctgttaaaattgagcattggtttatttgacacagtattttaggttatatgtctatatcttataaaggacaaactattaggaagctacggaaaaaacactgccaaaaagaaggaagccacaaggccaatttgtcaattttaaagatcacaggctaaagaaaattgtcaaataacttgggttttttctcatgcatagaatatcaatattcattttagctttgaggtttcttgagttcgttaatgctttccgaaatattaatctatagctatgaattttaggcatatgttttcaggacttaatatagatgttttcatattgactaccgtactctgtaggtgttgttggacagagtagagcattttattcaggccgttgctgtttatgaagaccaaatctttcaaaaacggactcgaattcagcaggtacctgatttatttaatctttttccccaaacaatttgatcttgttttatacttcttttctctaacaccattttcatacactcttagttattctattgacatattgtgtaagatataataatttacttaagctgtttgtgtatccctgctgctgtttgtgtgttttcttttgtaatacatatacatttttttttatgatggcaggcttatgagaacaatgaggagatgaggcagaggaacaaaagagatgcaacaggtgttcaacaggccccggtggctccagtggtagacaaggttcgttgttaagcttcatcctgtgattgaatatctcactgtagtttgtatgtgcatatttctgttgtcttcataaatggaattattttgagatttatgacaatcctgaatgaactctcatataatttattattctagtttgattcacatactgggaagacctaggacacattaatttataagtaaacaagacaaaccatgaaaagaaaaatgaaagacaaatccgagtagatccaaatgatcagcaaaaattatttatttcgttcgtgtactgagaagacccaggatgtattaagttattcatgaaaagagaaaagtattgggctacgtaatccaaacccacagaaaaatatatccaaaaagagcaaaacaattgatgaaatttagctggtttttatcttctgaatgggtaaaacttttggcttttcattggaagcaagtttcctaggattcttgaaactccaaattacatatttctcataaatttatcttacaggttaattcggatgtgtgaccctttcttaacatttcataaaaattagagaattgatctttcaagaatccttttccatttttttttggtcttccctgtaaatggtttggttttcttttctctaatggtttagatagttgtgctgtgtggtgcctcaaataatttttttctccttttctttagtagcttgaaattatatatgaataatattgacagtaatcttggaacgccaactctagttattttggtcttggaatttttattgtttcaaagaatgaacacatcaggtgctctattctgttcctttttactgcgcttcaagttgattgcaatttgcaatatatccttaactgtttgggtttgtgaggctctgcttgattgtggacttctgaaatagtggcttagtaaggccgaggtcaggtcgattggacttaatacttacgaatctgttagctgaattattattattattattattattattattatactttgttttgtttttttgaaaaataaaaagagatgctttagggtttcactattctattttacaggtaaaattaggtgaacctggatacaaggaaaggtattatgctgagaagtttaatgtatcaacacctgaggagattgaaaaagtgaaaagggacacggtaagctctgttagttcatgtgcaagaattttattcaataacataagagcactttttgtcaatacttgcatttcttgtaattgtttttttaacatgaccttttatttgttgtgaataatttattatcatgcttggataccttttacgcatattcctttgatttggcttgcatcccaaaaaattctgctacattacgttagtatttatatgtcattagcatgacataattttggtgttcattcctgttttgaagtaaatgagatttcatagttcattcatatcctggacatacttgaaaagttcaattcatttatttcatgttattgaaaagctagaagtggcagttaatcattattctgttagagcgaaaggttatcttaattgctttgtgctcattattttgatgaatttcattttcttacaggtattgaagtatgtagaaggcttatgttgggtttgtcggtattactaccaaggtgtttgctcttggcaatggttagtttattgtgagaacagctgataaattgttttaagctcccttttttctactcttcattttgctgcttaagtgaatattctcaatcagcatcaatgatctaaacaaacatttattcttcaatactgttttaggtattatccataccactatgcgccatttgcttctgatctcaaggatctccctgaactagaaataacatttttcttgggagaaccattcaaaccatttgatcagcttatgggaactttaccagctgcaaggtgtccatgctttactcatttgaaattaatataaatttaatgattaggaaatatccatctggttatatccactagctgtagtgatcattgccaaattcctgttacagttcaaatgctctaccagagaagtacagaaacttgatgattgatccatcatcacctattaatgcattttatccatctggtaaaatttggtttagctaatatttatgtatgtatatatgtatgcgcacgtttgtgggcgttgttcaactttcatttcgataataattttaatgtgttcctttttcccttgcagaatttgagattgatatgaatggcaagcggtttgcatggcaggtaatgtgattaaaagtatttcctgtcatttttgtaatgttatttggaaatctatggaagattgtactaaattctttttacgtgaatcagggaattgcaaaattgccatttattgatgagaagaagttgctcactgcaacaaggaaacttgaaagcactttaacggtctgaaatgaagtctagttattaattttttacaagaaaattgttgaatgtttgtttcaaatttcctctttagtaagccagttaatcaaagattttacctaggtttttatggtggttgagctggaatttggagacaattgaagataaaattgaacattaaaaaataagataaaagacttatcactttggaaataatgttattgtcactccttgtagacttgatgagggttgaggaaagttgctctcagcttagagatttaaattccttttggccgggcagtttgtttttgtttgtttgcaagattcttaatattctgattagtctatgtttgcgggtcctcttttatattgatgcgatctagtcgtaatttatgaagtttttcacaaattactgaaggtggaaggggaataggttaagataaaagaactgacatccaccttcagtaatttcttgctgaagtttactattaggggtgttgttagatgcaaaaacaagctcatgtctgcatttacacaatattttcagcatctgacgcttaatcatgaacactgtcaatatctgtatatgcaggaggaagaacagattcgaaatagtgtgatgcacgatttgctttatgtatatcgtgctcatcctttggcttcacaaatgtacatgtactaccaactttatcatcagatgccaccatatgcaagatttgcttatcaaattgacacaaatgctaggttgtatagtctttatatccattagacttggtttataatcgtgactgcgtactgactaccctattctctgttgatctttcacagcggtggaatgaatggatatctttggttatgcgagaggagtgggacaagaagtgtagtcttttcccctgtcagtgggtttccagacatagagaataaccaagttttgtaagtacttctactatgcttgtttgataaaataaagccttgaaaatctcatgttcagcattcctttcttgcagaagtgtctcataccttaaccctgtagcacatagacacatcccagaacctcccaagggtgtggtaattcctgaaaaggtattaaacttttgtgactttgaaaagctcctggtttgattattgtttctggatggttacaagttaaaccttctagcctggtggtgtactagttgtgtatttccttctgtcaagtacattaaataacaaaacagttttggtcattttgcaagaaacttctattccaagtaccgcactaacttacataaaattggatttgaaatctaatttaccatatcaagactaacttacggccacacatcaaataagatattggtagttgaattgtgaagtgcgtctagttaaacttgtgcaaaggtagccttgtaaaagtacttgttccacttcagggtaagcagtaaaagtgaagttggtcaggttccttgtgcatgaccaaagacagtaatcatctattgtgatttgtttaattttcttatttccatgctcttaaagctgtttttgtttttctaactatgcttagatgtgataaacttatgatttattttttttgcagatgataaatcctactgacattaagccgtcccctgtgttatggcatgaagacaatgctaaccggcggcatcaatacagggaaaggtgagaaagtatttatgggtgggtcattgaattagaaccatctctctgtttgatttgtactgctgggaatctttcaccttcaaagtgcagtgacaaatagattatttaaaaattactaaaataagttgagtaccttcaattttacttctggccttgaagttgacccttcaagaaaactggtgaagcctttgtccaaatcttcatgtcttactctatctatttctctggatgaaggaattatttttagcattaattttataatcttcccttgaactatggtcaatgtgtcaacattgcccccaattcccaaattaatttcccattttgaaattcagggggcacatttgatattgcaatccctggggatttataaaatgtatccttatttttaattgtgattaattctattttgcagacaacaagtgtatggggcaatcgctggccttcagttgggagaagcagcacaccgtcttgttaagaactccctcaatctaaaatctaatgattcatcctctgggtcttgggatcagtcaccatctagaaacttccctggccactaccaaggaacagccagatcaagaccagctggaccttctgggtatgaaaggggcttccggcaagacccaaattcttactatgataattcttataatcctcagggaataatgagtaggcctagatatccagtctcaaatggtagaatgcatagtcaagaacaacaccgcaacttgaggaatggaatggctactttgacagtggaagataacgcgagaaacagatcgcctgttgtaatgacaccgagaatgccaaattcagcaaatttagcaaatatgtctcaccaattcatgccgaacatgggtgtactcccagcaccacccccgaactggattgacaaaaccacaaatggtggaatgtataattataggcaacaggaatacatcccaggcagtacacatgagaagcaggggaagatgacttatcaggttaaaacacaaggtggtcaaggtttttctaattctggggaccaagagcgcttgtaggggattttgttcagttatctttcttccgttgtccctatcctgtcaaatacatttcaccgaacaaaccgttccaatgacagggacctgtgtaacaagaagcttcagccagtttgatgaaacagaaacagatttatttgttgggagtttgcatggtaaataggcaatgcttttccaaattatgtatgtggtttactgatcgatgctgctattgtccgaagcattgttgagaattgcaaccttttgtccctggatgatttatacttctttcccagttggacaagggtcaatttgagaggtgtattgtgtagtcagtcattttatacaaataagtatttcatagggaaaatgtagtaaaaatacttagatcttgccttcgaaagggaaaaaaaaaagaaataaaaatgctcatcttgcttaacgaatatggaatcccacttgtaatcaaagattgttatttattgttttactgtttactccttgatttacattattgcctttgcaaattacttcgactggaattcttaggcgttgcttttgttgctgctgtttattctgaataagtagtgacaataagccgtggaaatctagccaaaccctctttgttttgaattggtaatcttttaactttagagcatgtcattaccctctttattgatatcagctctcagtagagtgaacatggttcatatttacagtgaacaatattctgaagctgctgatcgactattaatttacaacttagtattattagcaggcagtcttcctctaccagatcaatctgatactaaaatttggcaactgcttacaaaatgtcaaagtccagtacatgcaatgcaatagattatagaataagtattatgtattggggtacctcatatactataatttctggagtagtaccttgagcaatataaacacttctagattaatcacgttgctcaccataaaaggcatgaaccaaatttacaaaacaaataaaatgatgatagatatggctggctttgcacagataaatggttatgatactgtttctgttttattggacagagtggaagacgatacaatgttgagaacttatacaagtttgtatacttccttagagaatcatacaagtatgcacattctatttgaatatatagtaaaaactaaaagatacctaatctaagtagctcaaacggtcagctcccacagagtctgaggtttcatttcagtctctcctttgtccttagtacctatataacaacaattgttatagtttcctcctgaccccaattattgcaaggccttaattccaaaaagggaaaagataatttagtaaatgggaaaattggggaggtagactccaaggctaaggaggatcaatattgtcatcattttactttgtaatgtaattatgcaatttaaatacttattcttaaatcgttcaccatacttgcctataaaacaaataataatccaaactcaatcacagatctccaatcaaatgttcgtttttatattcatggaaccaaccttattgcttacatggtatcgagagcatgccataaattaatgaacaaaatcttaaaaagcataaaatttgtactatataatcttcctattactcagatgatcaacccgaattctttatacttcacatgtagaagaagaagaagaagaaaacaagaaccgtacctcatcatccactattgaaggaagtaaccagacaagaaaagtacaaagaagaacaacaaagttccatatataagaatagctttctgcccagaagtgagtgtattcccaccaaggccaaactgctggttctgagcaaaaccagctatttccacactcttactcacaaaaaagctcttagaagctccacaagttgagcacctccaatcatcaggcaacttgtcaaatggcagtcctggcggtataggataagatggatcccctactgattcatcatatgtgtaaccacaagacctgcattcgaagattccagtattcaacactgcgaacttctcttcaagccggcgtttgtcgaagctctcttgctcttccggtgacagttctggttctgtttcaggttcaggttcaagcgccggagtcggtgggggtagaggagctgaagtgggttggtctgaagtgggtttgtcttcttttgagacatcaatggagtttggaatgaatttgaagggtttaaggggcttgtggggaagtgaaagcgagaaaggtgggattttggggagaagagtgagatgggttttgaatttcggaggtgaaggttgagagaatgaggttgagatgtggaaagaaaaggtagctcttgttgttgcagaagccatgaatggtctttcttcttcttcttcttcacatataatgatcgtagtttgtttttcaaagttttcagctatgtagaaaagtgttgtttttttgttttatgttttttggggtgaaattagttgattcttttgattatgtttaggtggttgtttgcatctgggtggaggagaaagaaatgggatccatggaagagcatatgctgcgtgtcctgtcgtggaagattgttggataaggtggtggtggggaaagttttgtaagattgctttgtggattatgttgattgggctttgcttcctttgttgggttacatctctcctacaacacttgtctaacccaactactactacttcacttcttcttttctctctctttttttttcttttttaattttttttatatatttaatcgtttatatattacatgcataatctagaactcgaaccaggacctccaacacacacgcactcacctatagccacttgagctagcctacttcacttcacagatgcattgcccattttacctcagaaaaattaaaggattttttttataattaactaaataaaaagtgaaaaatattaaaaacaaaaataaaattatacaaaattttaaatatttttaccgcttataatttatttttttattcaaaaattatgacttgattcatattgttgtgtttttatagtattttttattgtatttatgtttatgttgtttttatactactgtaaaattataattaaaaaa

SEQ ID NO: 184530 - DNA, 827 bp, Cannabis indica
caaaagtacttgtggcccgttttaagcaagttcttccacatataatctccgaatctcaaagtgcttttttaccgaatcgactaattacagataatgtcttgctagtttttgaattagttcatactatgaagaacaagactgagggtcgtaatggtatcgcatcgttaaagcttgatatgagtaaagtgttcaaccgtgttgaatggcgtttcctcaaggaagtcatgagaaaaataggttttgcagaacaatggatctatcttattatggagtgcttgactactaatagcttatctttcctcattaatgcgaaaattagaggatctttggttccttcacggggtctccgccaaggctgtcctttgtcatcgtaaatgtttttaatctgctctaaggggttatctcggttgttacaacacgaggaaaacgtgggaaaccttaatagtttcaaacttactcgacgtgctatttctatttctcacttactcttgctggtgactgccttcttttttgtcaaacaaatgagcgctcatgccttgcaattaaaagagttttggacattcatcgtgcctcaggtcaggttcttaactcggacaagtctgtaatgtctatttcacccaacacaacacaggctgcccaagtttactttcataggtaatttttcatgtccatttgtgagtgccacgagaagtatcttgggttaccatcatactcgaaaagagataagaagcagattttcagtgatatcaaagcgaaaatttggaaagtcatgaacacttagagtgagacaagtttttctataggaggccgagaagtacatctcaaaa

SEQ ID NO: 184531 - DNA, 5269 bp, Cannabis indica
aaaaaatatctcctaataaatatatattatgtatttcataatgtctcaataaacattaaaaactgagttacagtaaagaggttatataatatcatacctgatgtgcaaaacgagagttctgatagcccgtcttcatgagttgtccccagacagtatggaactgtgaaaaaaggccaaaagaaacaacaatttaaactctaaaacttaatctcagataaatttaacgaaaactgtcatatgggatggataaaatctctaccttgtgatgattttcccgttgagcttgttgatgacttaaacgcacttgctctctttcagactgttacgttaatggaaacaaaatttaaggaagtcaacaaacccatccgacataaggttctaaacattcaaaaaaaggtaatttttcaattgttcttttctttatatgatgtgctgagttagatgagaaagtaattattgttggaaaatggcctaacctctaaaacatctagctcagaagttaattttcgcttctcttcttcattgatatcgtcaaatctgaaacgcagaatcaaacttgaatgtaaatattttgtttttaagtgaacaataaagtataatggcattatggataaatacttacttgagagaccatttcaaatgatgaattttgtcttcaatgagatcacgatgattccttaacaatcgaagttcctgcataaactacgtcaatagatgtttgtctttaacccaaacaaatcaaagaatgtcagctcatgtttgctaactatatttaaaactttactgaaagattttaataaccaaaagttctattagacaccttgcgggtatctctcaatttccaaagtagttcaacctcctgctctagctctggaacaacaagcattgtcctccaccctacacataatggcaaatgtgagaaaacagagagcagcattcttaaaatgtatattaggcacattaatcacaaatgtgcatccaagacatgaaatagagcagcaatcctagttcattcatgtatgtatacataaatgtaccaagaactttcttgcttcgtaggatatctccgtagatatgatccccaacatagagaacctattgaaaagatacaagttaaaaagtaaatgaacaaattaaaaaacacaaactgtacaaaacattttgaaattcttactgaacaaacagttctaaccatacatatacttcaatctagtaaacatatagaagaaacaattcacctgagagcttgactcaattgtaagtaatttatgcagatggccaacattgcctccctgaacagtagaccgacaggaataaagacattagaaaacttcaaaatagcaaatgcacgtcatcgatttagaatttgtaaatattggtagcctcaattaaattaagaagggtgtgggataaatcgaaccatacctaaccgtgaaaacggatgttatctgaccacatttcaagtaattgagtataataccattggaactcttttattttattttcattaaaaaatgaatatatagggtaatgatacattctggaatattagaaatgctgttatatatcatttaaaaatggaaattagttacctggaaaactctacatgacttgttcggtcccttcactgaaaagctaggtgaagtgtctcccacctttttcatgcataataaaaagtaatcaataaaattgaagaaaaaaaaaagagctaaaacagaaggataagtttatccaaaattcacatcttgcaactaacctgaggcataggagagccattatcagtattgagtagcatcccagacacgggttcaacttcaaacaagtttgcacgactatcatcatgaaagaatcccggctttgcactgcatagacaattgattaaaaatgaactattaatatacacagaaaaatgaattatcctaagccacagatgcatgattgaagtaaaatcacattatgttttcccaaatgttacatggtctaatagttccagaatcaaaagagaacagtacctgccagtgatgacaacatcaaagtattgaagccaatcaaagttgcattttctaattccatccattgttcgggctccacagagaaaattcatcacaatgtttgtatagtcccacaaactgtaagttatgcaatttaaagaatatccaatcaataatattaccatatttgaagtagattgaccaagaaaaataaaaaaagaagctcaatacctgtttgtcaccaagaatgtagctcgaccagaatctctgagcattttgagcatgggcactatcgaagtatcttcattgatatacctagtaagcaggaccaaaagcaggtgtcacaatcacagatgctcactgtcaatttttatagggtatctttttcagattaaatggtggttgtagtacttgagaagaaaaaggcccagttaaccaacttcactttacccaatactgtagcaccaccatacaattgaatagtttatttaatgagtcataatctgataattcaaaacaaaccagtgaacagaccttttaggatcctttgcaaccatttgctttaaagttccatcacgatgacacagatcaactgctgctcgaacatctctatacatgcgagcataactggaggacataaaacataaattacagacaaaatcatggccagaatcatatattactaactgacatgctgcaccctccttaaaaagaaatagtctggcatgttcttactctgtagtgtcgggaacttttccaggattattgtcacgaaagtcaaccaattgcgcaaataaataggcttcagctagcgaaaaaagggtatcaatgagagcatagtcaggctcatcaaaagcatcccttgtaagagtacttccataaatactaactttatcttctttggacaattctttaaatccatggtaggctactttcacatacttgtgacgatccatctgcacaattttgagacatgagactcaagctaaagaagcatacttaaaacaaaaatagaaagatcaaatcaaacaaatgatgccaacctttaagatgttgcctcttttcttatcaagaaccaaacctcttaccatgtacttccaatcaaatgaccaattcagcaactgcaaaagccatttgagcttaatcaacccattacacgtaatggtcagactcaaacaacaaaaaacagaggaaactaacctcgcgtgggtatcctaaatcatacaccaacttcttgatagtgccttcataagcaagggactcaaaagtttccggcttgtattgtgctaaagtgtaatccatatcaaatccaacagctacaatattcttcatattcagtgatctgttacaaaagatttgctttccaattacgtcaagtttacgccccccttccggtgaagaccatatgcatggctcttgaccaccactactgcaatccgtgttcctaagacgaggtgatttcatgtcacttacaatagtcccgtgactttcctccattggataaccagaatgcaatagtttgattcctgataaatttcagaataaggatcaatatattagctcaaacagtggaaaggaatgacaaaaacgaaatgtttaagaaagccaaaaagcatttaatgaaaacatcacacgatacatttcaagcctataagtaagccaacataatacgtcacgtaacaatcccaacaaaacgagtgctcctaatctttaaaatagacttctcatcagaccgtttagtaaagaaactagaaatgaaatcccaaaccaccattttactaaagaactaagaaacgaagtttgaaaacaagaagaagaagaagaaaaaaaactccccaaaaacaccttaacgaacttacctgggcaccacgttaagttcccactctaacaatcttcacagctaagctccaaaaaacacctaaaaatccaacactacattaaaagaaaaaaaaataaaggttgttcctttaacagtcatctactcaatatcaaaacccaaacccacaaccattcttttctacctgaccccagtaatgactcctaaaacttcccaagaaaacccacaaacaacagtttcttacacagcaaaagaagaacaaaacaagcaatagtgatattctttctaaagttaaaatcggcagacactaacctccgaaacaaacccctcttctctttccgtgaaaagaatccgatgaagtgaaagctcgagaaacgagtcgtatacgagaagaaaaagcgggaggaaaaacgtcaggagaaaacaaagagaagcaaaaggaaacgggcttcttgggaattcgcatgttgggattaaataggcatttggggagaataggaagagacaataaggtgggtagtggaaatggtggtagtagtagtactagtgagagggaatcggattccgaaataatggcagtgccaatgagactggtacaagttggcaatgaggttggaaatgcggaaccagagaacatctaatttatacaattacaatagctagtaagtagtactaattccgattattccatcccaaagttgggattatcggataagagaattgaattcctcccccaatcagattcagagcgactcgataatcgattccccttttcttcctaatattagtactgatgcaaaagccatttggatttggagagttggttgtttccgttttttctcggggaggaacctgaaacgtcgtcgtggcatcctcacttcgtaattgaggctggaattaaagatgctgtgccacgtgtccacctcaaataagtatgcaatgccacccagctgaagagtttttttttttggtttatattaaatgacttacttactctacttcaaaagaaaaaatatgacttacttactcatcgtgagcgtcccttacacgtgccggagacgagtggtgtgtgtggactgtgcccttataaaacacgtgctctctatttctagcttttctttattttcgcttttgttgagaatctccttttttgagtttctttttagtgaaagaggaattagtaaaaaattaattagggaaaaaagaatactttttctttttaatctgtgatttcaaaaatatatattggacggtatctttcttataaaatttgaaaaagtttggaatagtactttacagtgtcaacaagtttaaatttgttaaaccgtccaagtggaatattaataaattaaagataaatattgtaagtgttaatggactcagaatttttatcttgttagagcttatttattataaataaatatttatacttatattataa

SEQ ID NO: 184532 - DNA, 1143 bp, Cannabis indica
attgagaaacaaagataaagtaaaacacaggaaaaaccagaaagctaagagtccaaacagaaaatcatagactagagaatactgcaattcaagtccataagtgcaaataaatcaaaaaccaggtcattgcattgatttacagtttaaggaaaagtagttgcctatggagttgtgtatgggctaaaatcatagatgtaaaactatcaaacactgataactgtacacacacacaaaacatactaagaagtcatcacatcacttcaaaccagaaactgccatgaaagtatcacctcagtaacttgacatgttgactagtcagaaacataaagcataggttacctctaagataagtgaggaaagggggatgtgattccacacatacaacactacttaatacattaacacttcatacaaggagggtaatctacattgtcaatgtggttgttaataccaaagaaatgatatttttcatttcttcttccctattgttacccataataacccaaatttgcaatattcaaagatgatctccaattagacagtaaattaatttcattttccttatcttcatcataattcaaattaatagggtttttcctctttacaaccccattttcactcaaaacaaaaaaaataacaagtctgattgcactagaattcaacaccagataattcttacaccaacacacccaaagctaaattatataatagtccaagcccagaagccaatttcaataaacatggtcaaaaacaagaaaaaaaagctgaattttccagatcaaaaacagaaaaataacaagaaaggaagcatttttcacaaacccagatgaaattcatggccacaatgcagcttagccgttgatctgccaccattatccgaaactaaatcaagacaaatcgaacatgaaatatccccagaagatggctgctgctgctgctgatgctgcggctgttcctccaaaccaccatctccaccgtccatttgatcatcacgatgatgatgaatatgagcagtactctcttcagagctcacccatcgacccttctcctttttcctaccaaacaaacacccaataactcaaaaacaactcacccagaagaagaaatctatgtctttctcgtctctttctctctccgacctgt

SEQ ID NO: 184533 - DNA, 3975 bp, Cannabis indica
agccattattcaaaaatctacatatattgtattttaaaattatttatgtttactgacacttttgaaaatcgaattaaaagaagattaagttaaagaaaataagaataagaaataaataagatgagattttttacgtgattgggcgttaaaaaattttagttcatgagacaatattattaagctccatggttatagagtattttatcattttttctcatacaagatttcctagccaaaacttgtaacccttcaaatgaagggttgtgactttatttataggcattttggctaatggatcgagttgatcgaatccattagggtctactaggtggaaaaagctcactgataaggtaaaatactattaaatattgactattgggccggttatgtgaggcccattatgtaggtatcgttgtctgtatgtggatatactattgacaggcacgtgtaggcgtgagccgtcgtttgttgaaagagaatgtcagattagtgggcattggcccaacaatgtgattttcttttgctgtgcacctttctgaggcctgctatagggtagaagcggccagatttctcaggattcttgtcagaggtatgccacgcaagatgatatcttgggcacttgtatcccctggacatctctttgacttctattcccgaatgacccctgaggacatccgtctatgcctcttagaatacctgttgtgtgaatgtgtgattatccttcgggaccatgcctccagcttagtccttggggaacagtttatgagatttgaacgtttttcccgactttgcgtatggattgactaatctatctttctggacctagttaatgggcttacagaaaggcctacatgtcatctatccaaaaatgtagatgaaatttatccctaagtcttcgcagctcgagagccacagaggcttgtagccaccatatggatttatcattatatccgaggccatgaacgacctgagtcttttaatattctttggtgtaaggttgtgaaaactcctgaacctttcatatcccattagtggaatacacatgtcaagtgatctttggtttgtgtgtcacacagcttgcgggggcgtgtgttgtctcaggttgcgaactgacaactaatcatgtcagcgagttactcgaggcgaaatcatcattattgcacgtgtccttgattatgtgaattgtattaaatgaaacatttggcattcccagactgttggattgaggatatttgtactttctcaaattcaatctgagcccttggatctgaggtaggaagatttccagggcctatttaaaaagcttgtgacccgatggtttggcattttagccatttctttaaattttttgaacttttatagagagaaaatcctttgcaaccccaaagttcttcccatggtgaatgtccgatattggtgccaaacttgtcgaccgcttgttaaaccttcaaaaacggttgttcccaaatgctgctccgaccgctgccacttcagaatcgtcgttcgtggactttcaaaaagcctccaacgagcttataagatggttgagcaatttctagccaagaaattttgcaccaacctagaatctgacacccccgttgtcaagtatcacaagtaagcacctgattttgtaactttgatgttgctttttgcataaatagattctaaggtagtatgttttaggtgaacatgccatgatttttggggatcctatcattgatatggtttcaaagacagtctctgcgaggccttgtcctttcacctttggctttttcccgttttacgtttaggtgcctacaaaggtctatagtggaccaactatttttaggagaaataatctcgacctccctaacttggtttatagaatttctagggcaatttttgcctgacctcagcactagagcactaggtctaccatttcggtcaaccttggctcgcagatcggaagggcatcccagccctggagtatgggtggccttatttttccacaaaggctggttgacttcattctggttagccctaggtacagcaggaaaagtctttttatgaagttcatccactttccctttccatttgtcgttcgtcacagcagaaggtcaagcgttgacggggtttgcactttttgtgacattattttccttgtagacaagctcttctggagcgttatccttcaagattttaatttatccgcgctagcattttcttcatctaacaagagacgtcatctcgtgctactaacttctgctgagttattgcaagttcttcaaccatccgatatacctcgagatcttgctcataataatatgtctttgtaataatcatctttaatctcacttttgccttcatcagggtcttattctcggtcatccatctcgtcttcatcaatggggttttcatcgataaatttctcctaatgttgagctttctcgactggatgaccactagattcgaacgtttcctagtctctcgcagtgcccggctgggcgtgcactgtaggggcaggttaacatcgtccatggtgacatcctaaccaggggcaacaagcttagtgacagcctttctagtagtcaccattgttacagatacaatttagcttaaagtcttttctcagctctcaatgaaagcaccaaaatatttattgagattttcggaaactcaatatattaaaataagaactaggaaaatgaatcaaatagttgaaaaaggagatgtagatttttatatagttcaggtactaatgaatcctagtccactagttagttgtattgggctaaaaagccttgaaatatcataatgttgttcttacaagcttaagaaccctagctttttgctatagtgattgagctatgaatttttcgaccctttgcatgaaggtatcaagtagtttataggctaggatctgggtatggatacacccatgaaccgctagagtttgcgtgtaatatggctcactaatggggtaaatacaaaaatacattgactttgagtccgcggactaaggcctagcccatggggcctttatgctctgtacgataggggactacttaaggtcaaaaagtgtcgtgcatgcgccacattttccatattgtagtgttagaataatagtcgttggataaaagggatgctccttttggtggtacacacattgtcagggtctgacatgagggacaatcccttcattcggtgggattcaatgccaaaggattgcaacgtcagcgtctcttagagctcttctagatctatcccaaatactcatccgaaaggccttggttgcctctttttatttttgcaaggggcccttctagatttcctgacatccaactccgaatgtagatattctacccctcggatgtagatatttgatgaggattgaatccattatttttattaaaaatgtcacatgtcccccaaacggaaacacaaacaacacttagtttatattttaaatgaaaatagaatattaggtaattctatagtactcccatttattgggtagtttcgatacatttttatttgtttcaccattcatgaaattttttagtttttttttcttgatcgtgttcgttgtaattatttagaattacttataaatttttagaaaatttataatagtttatagtgccgaaaataaggtttaaatattttgttacatgtacgtttttttattttttttttatgtagtaatcaattgtttgaactttgtttttaacattgtaaattatttaaaaaattttgaaaaattttacaaatggcccgtaaaaaatataatgttggaactggaatttttttctgaatgccaaaatgaaaaaggtgtactgaaataatcttttggaaaaatgtactataatttatttctaaaatagtgacactttttccaattgaaaattttctaaaatactattattaaaaagtgtatatgaatgccacatgctaattttcataaatttataacaaaaagagtgacattagtgaaaa

SEQ ID NO: 184534 - DNA, 1724 bp, Cannabis indica
tttccctaataatctccaccagatcgtattagcctccctataaataccacccataaccggtctccttccatcgtctcatatatcattcttcttctctcactcactgttctctctctctaaaacaatttcattctaatggcttcctctaacaatggcgtttcagaaaatggcaagggtctgatcgtcagtttcggtgagatgctgatcgactttgttcccaccgtctccggcgtctctctagccgaagctcctggatttctcaaagccccaggaggcgctccggccaacgtcgccatcgccgtcaccaggctaggtggtaaagctgccttcgttggaaagctcggagacgatgagttcggacacatgctcgccgggatcttgagagataacggtgtctccacccaaggaatcaacttcgatcaaggcgcacgtaccgccttggccttcgtcactctcaaagccgatggcgaacgcgagtttatgttctacagaaaccctagcgccgacatgcttcttaggccagatgagcttaatttggagttgattaaatcggtaagctctctctgtttttattttctcgcagtcttgaattttcccggaaacttgctcatctaactgcggttgacgattagtgctgttgggtcccatcacatgttgtcatttatagatctacgatagttaatcgaaaatatcatcatataatctttctttctcattaattctatttattttcttactatttttacttttcttcatttacttataattctcgtgatacggtgatcccctcccttcaaaaagcgatcgttttgaaacctgggtatgtcgttttctgttctgactgactgagtccgctatttattaaagtcccaaaacttttgtttccactttcgagtttcgactgttaaacctcacgcgtttcccatttacactcgcgcgagtagtcaatgtctctctagatgacgtgttttgtgaatttaatacagtaggcttaaggctactcgtgcagtgtgattcacgccttatctaatatttgttcgttccattattaatgtaatataataacatattttttcaaagaacacaccgctaatttctttctatatgtcaatgagtaaattttttctcagaattattgtttatattaataatattaatgggaggatatgacgtcgatatgtacaagttgacatttttttatgccattaattattgtaagttattaggtagcctccacgcgcgttgtattgtaacccatcacgtgcgccttattcttaactatttaaatctataatctatgtgcgcaaatagttttgttgacttattttttcctgagtttaccggatgaaacggtcactgagtgagatgatgtttgttttgggtttgtgttgttcaggctaaagtgtttcactatgggtccataagcttgatcgtagagccatgccgatcggcacacatgaaagcgatggaggcggctaaggacgccggggccctactctcatacgacccaaatctcaggttgccactgtggccctcagaggatgaggcacgtgagcaaattctcagcatatgggacaaggctgacgtcatcaaggtcagcgagtggagcttgtgttcctaactaaaaatgacaaaatcgacgatgcctccgccatgtctttgtggcaccccaacctcaagcttctccttgtcactcttggcgagaatggctgcagatactacac

SEQ ID NO: 184535 - DNA, 840 bp, Cannabis indica
tgtttgaaaatggattagggtcagagacgaggcaatcgaagtgatacccacagacctgaagtgaaggccctgacactgatggtatagagaatgtgcgcgaaatagctccaacaacagaaagattttttctttgattaactaattgtgaagctgcacttgcagcaactacattgcctggtcgtaaaagtgcttcaagatctgaaagacttgatagtgatctggaaaacaatctagaattttcaaaaagagatcttcccttcccaaataaaactgttacggagtcctggagggcaccatcatcacctacaatcgatctctgaactgcagatctaagccttgaaaaataaggtgggggcatcttaacctcttaaatgaaaaaaaattgctacaactcgtctacaacagagaacaaaaccagcaccagaacgtgcggaagtaaatctcataactccctataccatctattgcatcctaaccactctaataacatcaccagattggaaaacctgaaaatgacaacaaaacaaggctagtgaacaagctaatagcgttgtaaacaaattaaattagaagataaactaattctaacaaaatattctctaagtaagcaaatatgatagtatttcaatctaagccgagtatttttcttttccagatatatggcaatgaattacataaacaacaggatatttggacagatataatggaaatactaattacataaacaaatctcaatacaaataatcaaaaattctattaattaattatttggcttcaccataagccgattacgccgcttcaccaccgctttttgttcaatattaaattaaaaaaaaaaaa

SEQ ID NO: 184536 - DNA, 4640 bp, Cannabis indica
tgtttttcaattgccttgctcggttcctcttaatcctatttcagcagaaagaacaagttttgttttttggttaacggtagtttgtttcttcactgtcttaggataacattggagtacttgtggaccaaaacgggaagcttcttcaagaaggcagggtttgttggtcagaggctccctcagttgtcatcattcagaagccatatgctatagctttgttaccaagatttgttgaggtagccttataatgtccccagctgcttctctttcttatttgtacaacaatttaattcttttatgccatgtacactttgcaggttcgatctcttcggcctccatacccattgatacagactgttgtgcttagaaatgtccgtcgtcttctccgaagcaacaattctgcagttgttgcactagacaattctgtttatggtctcttcccggttcctcttggtgcacaggtatttccaaatttttaaaaattaaaatactaccaggagctttctattttctaaggggagtggttaaaggttttgtattttcatacagattgtacaattaactgcttctggtaattttgaggaagctttggcattgtgtaagctacttccaccagaagatgcaagcctaagagctgctaaagaaggatcaattcatataaggtgaataagtgggctagtgatttttgttaaagtttactgtgtgttttcctgttcttatataattattcacaaggtaatgtacttgtttctgtcatcaattcatatttggttttgtaacatatattccaatagtcccttagtaattggggaaaatgaaaaggaaaaaggagagataaaatatgctcttcatctgtttaattatttgtttgaggatttctttttttttactgatattgcagatatgctcattatctttttgataatgggaattatgaggaggccatggagcattttctagcttctcaagtagatataacgtatgttctttcattatattcatcaattgttcttccaaagacatcttctgttcccgagccagagaagttgatggacatgtctttggattcctcacatctgtcaagggcttcatcagatatgtcggatgacatggaaccttatcatgcaccccatctttcagatgatgagagtgtggcactggagtccaaaaaaatgagccataatactctcatggcactggtgaagtttttgcaaaagaagagatatagcataattgagaaggccactgctgagggaacagaagaggttgttttagatgctgttggagacaattttgcttcttatgattctagtcggtataagaaactaaacaaggtaagccaatatatttgttgtgatcaatttctcattttggtatgtgatgatacaattagatttcagataacattctcttgtgcttggtttccacactttgatagagatacaatcacaagtttgagaaagccttgtgtttctctcttgtgattgtagtattttattgatttaaaaggaaacttacattttttctcttttcattatattatgtattcatgtattttaatggtttggtgaaagtggattcaacacaggtctccaaactacatgtctttactatttattaaaattcaccgtctcacatatttattatccaattttccgtaatgatgattttggcaaattttaagtggtgggactaggaggagatgtgtaatttgggaacaaaagatttctattcattggcaggaagcttgatcaccacgaagttttgtctccaaaatcttctcttcttctaattctaatataaattattttgcttagtatttgagtatcactgtttgctatatatattggtattcactgttttttttttgtctacagaaaaagttgacatataaattgattttttttatggctaatgtactattcttctgttccttaggggcgtggtaacattccctttagctctggtgctcgagagatggcagcagtacttgatacagcgttactccaagctctgcttcttactggacaatctcttgcagctttggagttattgaaaggtgttaattactgtgatgtaaaaatatgtgaggagattctccaaaaatgtaaaaactatactgctttattggagctttacaagagcaattcaatgcaccacgaagctctgaaactcttgcatcaattaatagaagattcaaaatctaatgaaagcccagctgaattaacccaaaatttcaagcctgaatctattattgaatatctcaaggtaagtcttctctttggtttcatgccttgtatgtaatcaggagctctgatctattagtataaacttatctatgcaaaggatatgaattactaagtatttatgtatatatattttaagaaatttcattgttggttgccttttgcagcctctctgtgggactgatcccatgcttgtcctagaattttcaatgcttgttctagaaagttgtccaacacagacgattgagctcttcttatcaggcaacattccagcagacttggtaaactcttatttgaagcagcatgctccaaacatgcagggcacatatttggagcttatgctttcaatgaatgaaaatgggatctctggcaacctgcaaaatgaaatggtgaacattacttcgttaattatgaagaaatttcattagctgttagttaagagccataagagttgcaatgctcacaacctcacactattaccaatcaaaacttatggcaggtacacatttatctctcagaagtccttgaatggtattcagatttaaaaactcaacaaatttgggacgagaaaacttactccccaactcgaaagaaattactgtctgcattggagagtatctcaggatataacccagagtatttgttgaaacgtctccctgttaatgctttgtatgaagaacgtgctattttgttaggaaaaatgaatcagcatgagctggccttgtctctgtatgtgcacaaggtagttcctccttatatttgttgttcatgctgtaacctaattacttgacctagtattctaatttgtcttttcccttttgattctaaatttttgatggggctttgtggcctcttttcataacatcttattatattgcatacaggttaagatcattttatactcacttctgttcatatttcatagcttcatgtccctgagttggctttatcctactgtgatcgcgtctatgagtcagcacttcatctaccatctgcaaagtcatctggcaatatatacctcactcttctgcaaatttatcttaatcctaagagaacaaccaaaaacttcgaaagtcgtataacaaattttgtatcgcctcagactacaagtattcctaaggttggttctgctccttcatttaaaggcagaggtcgtgcaggtaagaaaattgctgagattgagggggcagaggacattcgagtcaatcatagtagcactgacagtagcaagagtgatggagatacagatgaatttaacgaggaaggaagttctactatcatgcttgatgaggtccttgatttgttgagcaagagatgggatagaatcaatggagctcaggcccttagactcttacctagagaaactaaattgcaggtatcagtcatatgatcacagcacaatacaagctcatagatatgaagaagatgcattctctgttattagtattatagttctctttaggtcttccttttgtttaaacgcttaccctgaaggaaaatgtactattttatgcagaatttacttccattccttggacccctactcaggaaatccagcgaagctcatcgaaacttctctgtgatcaaaagtttgcgacaaagcgaaagcctgcaggtgagttttttcttttgtgggatctcggtttgggaaatgagttttaggtgtcttaatgcttactgccaagtacatggaatgtcctcactcacatctaaattgctagaagaatctgttattccctccatctctaaaatcgattatttccacgtgcaaaataggttaaagacgagctctacaaccagaggaaagcagttgtaaagattaccagtgatagcatgtgctcactctgcaacaagaaaatagggacgagtgtttttgccgtctaccccaatggtaaaacactagtacacttcgtttgcttcagggactcgcagagcatgaaagccgtgggcaaaggattgccactgagaaagagataagtgactgaaacccgttaaaacagaacccatagtattctcttctctttggttttacccaagttttgctttgcactcttctgttctgcctggatagaggccggtttgcacattgtttgggattgaggcttttgagtgattttttcttcctcacataatttttctgtaaagtttgtaatattattaatttattgattgagactcaaaaacgagcaaatattttgtatttattttaacagagtttgggcaagcttgagcatgagctgtgttgtattgtgtaatgattttttcttttattggaattcatatttggtaggagctcctgaaaaattattaatcatgagagactaatcttaaatcttaaaaaacttgtaaatataacagtgactctcatgtattaacacttacaaattattattattt

SEQ ID NO: 184537 - DNA, 4779 bp, Cannabis indica
tcattacattgacgagtaaagaagtgttccagccaaaattgacgtaaatcaaacatgtcagcacaacaagtctagtaacaagcgcagagtagtgctccgtcacttttgtggtaaattttcctatccactgaagtgtttttatcttattgttaagcaatccttggactacatgccataagaatgcaactatcggttcatgaacgacttcatgaggttccttttgagtgaagtacttctcataggtcaaaagaaattcaacaaacatagatttgggagataaaaaataaccattggcagtagacagccaaatcagaaggtactcaacaagatacaggaaacaattgggagatatgtagtcaactgtcctccaattggtattataggtactttctaaagcttcttggaacctctcaaaaggacacacccccacaagtccaatcgcagacgggtcgtctagaaaatctgatataacttcaaagaatgccttccatggtttccacatttcatgacaattcaattttgttataatcttctgacacagttctttattcaccttcccagatccaagaataatcatggcaattcttccaacttctccatgagtagggttattacttagaatgtcagactcagctatgactcgattcaacatactcttagtagtgtttaaccctctgagtataatcatgttcttactcagtggtttcggccattcagggaatatgtaaccaactatgttttcagtagaaaatttaatgtacttcaacagaatctcagactcatgatgcctcagcttcagaaattttgcctccagaagaaatgttgcaacctcatagatctgagtaagaaccctgcttttgtagaaaatattgtcgattggaaagtcataaagagctaggagtctgtccaaaaccatgactccaaccgaaagcatctctgaagaccaatatctctgagccgcacaaacaaactcgtgcaaatcagcagatgtgaacttgccactatttaatgttttagccacattctttgaccactcagcctccgggtataggaaaataaatgttggatttgaattattgaactccctccaaacacctaaatagttcaagcagaactctccataatctctgaacttataagctttttgggtctgaagacatgtaagatattcaaatacgcttgcaattttgttcgtccaataattccaaaagaatatcagtgattctattgacacctggtttttagaaatcacctccacaaactttgcagaattagccaccagttcttcttcccaatagtacttgatggattttgaagaaaggtgcatgtccagaattattctagcagttagaatctcaccactaacactcttttgcctctgagaagtagccctctgactcattagtgttaccaaatccctctgttcattgcaaatgatatcagcttcattgcaaacaatctcatagaagctttcagtatcattcctagcaaatgtttttgcttttcttaagagatcacccctttctttgaacttctttaagggccagcccttgctacctggtgaccagagggacttggcaaccacataaaaaagaataagcttagccgagtccttaaattttccagcttttcccagcagatccacgctgcgtaacgtatcacctattagcttggcaatatttgcagcttccatgaaatttttgttttcttcttccaacagcaagagttcatccaagcaacacaatgaagttaagaagttccgaattgaatccatggaattaaactctttaacaaattccatcatggacctcttatcattgatctgaaaataatgaaaagcacatttctccaaaaacatttgttcaattctgtcaatttcttcgcttctccctgcaatactgcactcatttgttgtatgttgtttccaaaacttaatgtaattcaaacccatctcaaataatcttccattggagcaagcagtaagacattctgagaagaaattccctctagcataagcattagcagcaagctcatggcgccctgcaagagaaaagcattccccagccttttgaagctcagattcgccacacttttccaaataaagacgacctggcataataaatccaaagcaaagaaattattaaaattccagaattgcaaaagaaaaccaaactataagtatactgatttgatgtttttatttatacctgcattttcatactctccaagatcagataaacatcgggcagcagaatcagccttgccaatagcttcaaatattttggcagcttcgccaaggatggaattagcttctttaggattcgaaatgcgcaaacgacaagccgcagccttgagtccagcagctttggacaatccctcccaatatgcatcaccagctctttcaaagcacattgtggccatttcatagttgtgttcttgaaatagctgtgaagaaaagaaaagggattaaaaaaaatataaggaattaagtattttcaaatttctatgactagaaataattaaaaaagttcaagcataaataggtattgttgtttaattaaaaaataagccaaaaccttaatgcccctcgatctccactcttcaggactgcttgtgacttgcatggtctgcgcaaacgaatcatcaagcggtttagattgcacaagacacttcttcctccaatagtcgaagataggttcagcaatttccgagctttcacatatccacaacctttgcctcgtacgagtgacagcaacatataaatgtttgagttcagagcatagaatattatgtttggactcggaaaactttggaaagttaggtatggttttgtcaaacaaatctcgctctttcatgtattcgtatatgaccctccactgattctttagaggagaagaaccaaaaaagttgtacagtaacacatcctacagaagcacaagaattaacattatgttggaatgtttaacaatctcagaatgtgaatgcataattgaaagttaccacaaacacaagctaatgtagaaattacctgaaattcaagccccttacactccaatacagtaagtagaagagctttcttcccaacataaccagcaatttcctttcgagcattgtcatctcttaccaaaataacctgctctgcaccaaagccagcaatacttctacttgtctctccactgttaccaaaaatctttatgattgcattttcatcatccacacaatgaagcagcaatggagattccccgtatatcaaactggtttctggtttcaaaggatcaatagaatgtggaaagaaatgataaataagttcaattatgctttgtgacaatttcagaatgccagcatgggtacgaaagttttgggacaattggaaaatatcagagatcaaccctttctcttttctctctccatcttcactcttttgttccaatacaaacttcttgtagaatagatgtcgtatatcttcaaacctaaaatcaactcccctggcaattgtctgtgcagtgtcaccagaaaaaacaaatccctcttcaacatttccacatatatgcttaaacaaagtgatttgactcattgtaagatcttgaacctcatcaatataaacgaaattcatttcatccgcattatatccttcatgcttgagccgagagtgaagatcattaacaaaatcagcaagatcaaattcaccactttccattttctttctttcatagatctgaaatatatcgtatattctctctctcttttcccgacttaaattggaggaatgtccttctgacattttaagataatcctcacggcttagcttaccatcacttgcttcaatggacatcaaaccacctttgatatgagaaattatctcagtgaagactcgagaaggatcaagcttcttcgttaacttggaatcaaaatgatgccaatataaaacactaaacttctcgtaattgacttccttgttccttatcaatgtctgaagcaacactgatcttgaatttctaccttgatcataagaaagatcttccacattaaggaatctttcaaaataagatttactcaatgttccatctagcatcattaagaatttgtggagtgttatgaccaaagggtagtaattagcaggaatgtcataaaaagagtttgggatgttcttgaactgtgtttcttcatcatctagatcatcagtatcaatcaaactacattcatttagattggtgttgccaccacaaacaaatctgtccaaataacagaaacatcatgaaatcagatttaacttatactcttaaattagcatagaatcaacttatagtcacattaacgtaccttttcaagtcagaaacatgttgattgacggcattacatagtttaggactaactgtaacaaaaagctgacgtaagacttttttcccattctctaccaggttattgggtcccatgatattttcaggaacatgtccaacaatatctgtcttgactccacagatttcatccatagcaaaaagatgcaattgttctcttcgaagtagtttcattgtcaaaactgttgtttttccagttcccgaacgtccaagtatgaagctactttcattaacaaggatgatctccatttgttcatctgttacttcatatggaagatcaatttccctaccatcacgatcagataacaagtggtttacgacaccatgagacaaggaatagaacttcatcagcagcaagctttcattgaccttcgaattctcgacatagcttattgcatctgaagaggaaccaattgattcactc

SEQ ID NO: 184538 - DNA, 1867 bp, Cannabis indica
gtcatcacaattattaattgtgtattttttttttaaggaagataaatttgaaaggtatatatatggagtagtatttaggtgattggataataggttgacgcccgtgttagaaatcatcatcatatcaattttgagccaagagttttcataacaatatatatacattaattactgaatttttaaataggttgccttagtggggtgcacatatgggtaccaaatgacaacacccaaaattttgccacaaccccatcaatgggtggagaaccttgaaaaaaaaaaataagtccaaaaatttagagagccctataaacatataggtagagagagagagagagattgggtgaagtcgacatgataagcaatagagaaagcagaaggtgcactaagcacccacgcgcgcttgttagcaagggtcccacaagtgacatctatcatgcgcccgcgtttttctcgtctgcctacctctcataattttttaagtatatatacgtataatatatgtattagctattatttattactattcttgaaggttatcattttgatttgaaatttatatatttacattatttttgcaagtgtttggtgagaaaaagagtagtcgttaaatcaagtacccttccgtgcattacattgaccgttattttagggtactgtcccgaaatcatatcacttttattctctaaatgcccttaccattttcttcgactcctagttttcagcctatgtatgtacgagggtaatatggtaaatttgtatgaataagatacgatgtatgatttctcaatatgtggataagatccgtaataataagttgcttctttctgatggttgagcattgcggattaattaattaatttcagggcaaaaaaaagtaagtttctttatgcattatattatttcttatcaacagagactcttaattttatttgttaatgaggctaaagaaattctccctctttgttgctaattaattaagttgtaattattaatgttgaggtaagctaaaaccaatatatacttgaactagagaaggaaattctacttaattatttagttcattttctttggcacaatcctttatctggaaatattttgaatcatgatcatttacatgatgatgatgaataagttgttacttgcccatgatttacttttacatttgtctgaagatcatgtaattaaatccatatatataatattaaaatatggtacaagtacttgagattcattatttgcagacaagaagaattcccaaatagtagtttctaaaaaaaataaaaggcacgtgttagaattttgagcaaaaataaatattttgtggtaactactaaagtgatcagagcatttagggaaattaaatttgccatctctagttaaactcatcatacacctagctaggaggtagcatagatattcaattatataaaacctaccgggttagcctaacggtggagaactcctttgcaccataaattacaccttcaaacgggaagaatcaccaaaaattctatgtgtatgtatatttatacaaattatacgtataatatatttaggcataaacaaaaattagatgtaatgtcctataagaatataaaaggaatctagactatactttacaatatactcttaataattaaacagctacaatttttgtgatcccacactaaggtttaattttgagacgacattaataatcttgaggatgttgagtttgggaggagaaataaaattattatagatattgttcttgaagagaaattgacattaaacctcaatttcaactatcacgtttgatagggtttaggtttccatgttttttattgattaagaagtgaatttagaaccttgataagacaatatc

SEQ ID NO: 184539 - DNA, 4794 bp, Cannabis indica
caactcaactcaactcaactcaactctttaagcatcggttagaccctttaaaaaacgcgtaatatcttccatctctctttgcaatcataatcctttgttttgcttttgacgcaggattacctaaaaatccgtggttccttcacaactcgctcggaacgaggctccaatttaatcgtaatcaatccaggtattgctatttgctactgacccatcaaagttcacagtagaaaacgcatacacatgttccccaatcgagaaatttcagcttagtttggtttcattgtgcccaggttcggggaatgcagaattggccttgcttcacaggatgttccttttaatattcctcattgcattgctcgttatactaaccaagtacccaagagaactgtccaagatcaggttcttatatagtttttgctgtttgcctttcattgtggttgatcattgcttattgggttttgaatgtaacttgagaattgtactttttggtctgaatcagatgcttaattctcaaatcactactgcccagcacatggagagggaaagggcttatgatgttgtaagtcattgagtcaatgagcattcttaccttagcctttacctgtgtttattggagtgtttacatcatgccgtctagtttcaaacttgcttccttgttttttaaaaggttgcatcgcagttgaagataccatttcttgatgaagaggttgccaacaattccttgccacgcaaggtatgggtatagttcaatttattgcgcagtctaaagttacttttgatgtttgtgatattagaaatagattctgatatgatagctagtggtattaaacagtcacggttagtaaactggcttaagctgttttgcagatgggacgggttgatggatttaatccccataataacaggaaggacactgcatttgattggacgaatgtacatgaaaagaatgttaaatctccagcagcaggtggttagagaatttccatgtattttcttcagtttatgaagggatttatttacttgaaatccatgattatttcaaagttttgcttctattatgtcatgaatgcctgaataaagagagtgaatacaatacaattctatgtgtttgtttagctgaaatattatgactaaagcagatatgttatgtaacttgaatttacaatcagtgatgaaaggggctgagttttaattaatttatatttcacttgttacaatatatcatacaatttgtaacatgagtgattttactccgcagaaagttcggtcaataaaggttcaaataatgagtccggggatcaacatgatggtgcggatgctaaagaacctagttctagtggaaacagttttaaccagttcattattggcgaggaagcacttaaaatatctccagcagagccctattgcttacgtcgtcctatacgcagggggcacttgaatatttcacaacattatcccatgcagcaggtaaaaatataatttatcagcttcccgctgcaagacatagagatttataaaatcattgttgttaatgtatgtgtgcagccacacttgcttttcttatatttcttccataactgcatgaaatggagtctggtctctagttattcatttcttgagtctaattctttacttttcctattaatcacaggtacttgaggacttgcttgtaatttgggaatggattttgatagagaaattgcatattcccctatctgaaagaaacatgtatgctgcaattcttgttgttccagagacatttgataatcgaggtaattaaagtagctattatattaatgtgattgttagagatatactcttgttgctatggtttataccttatttatcatacgccttggggtgctactatttccttgttgaggacctaaggtaaaaaaaatgatttgtgacccaaataagggttcattgatgtttttagggcattctgttgtttttcacttgtttttgtattcagtcgtggcctattattatatgatttattatgtctttatattcttcatttgattgaagaagtggaaagtgttgtgattaccacttttttgtttattgaaacacagagataaaggagattttgtctatagtcttgcgggacttgcgttttagctcagcagtggtgcaccaggtgtgtactgttcattaatagctctacatgttgataattaggtactaagttttcacacagatgattgattggtggacaacgttcaatggatagaatttaagcataactactgaatactgtggacagaaactcttttttcttactttatttattcctctggtccatcatctattgcattgttccttggttacaaaatccattgttttgtatgttttccctgatctgtactcaatgatcaaaattcaccagtaaagttgacgagatttcatagtatcatataaggggtgcttcataaagagaagaaaataatatttctacacagtttactatcattattacaatcacatcgtgtatgctttggtttatttagtgggagagggacagtaggggtatttgaagcgttgtagtttaaattatatcgattgtttttgagggtagtaagatattttccctatgaaaaatagtcttttccagcttttatgcttttaagattctgattatgagtaacattagttttcggtttagattgctttttgaaaatttgcctccttgatatcatttataagatataactttattttgtcttttcccatgtgcaagcaatgcttattgagataatttggcaattgtcaatttactttcatgatgtatcaatggatcttaacatttgttctattattgtatttctgtggctacctatgcaggaaggtttagctgctgttttcgggaatggtttatcgacagcatgtgttgtaaacataggttctcaggtgacgtcagttatttgtgttgaggtaatcattgtttctttctttctcaatttcttttttgtgtataataagatttgaagttacatattataaatttatgtttataagcaaagagaaaaaagtcctgaagtccatgcttttaatctcggcttgaataagattttgagataagagatagttgtgcaaaattaaatagtgacaattttaatgtttgttccttttacaattgcaataaacgtcattagcactacccactctgtctagcactctcacatggctatcaattttcactacccaaatgtcacctaagtactttcccataattgttgttacctaaatcatgagacgttaccagaatatttcctttcttaaacttgcatgccatttatagtttttgcctgaagtaaaataagaggaagggagaaaaaaattcagctgaccactttcttttggtattcaggatggcgtagccttgccgtctactgagaagactttgccttttggcggagaggttcgttttatataataacaataatatagggtgctttcttcttaaccttgtattacttggtggttttatggctccaactttttccatggaattgagtcatgggttcctgtacatgatcacaggatatatcaagatgtttcctttggactcagaggcaccatcagacatggccgcagatacgtacagatgttttatcaaaacctatagacctcttgatgcttaacagtctgagagaatcatattgtgaaatcagagtgagtttctttttgggtctacattcaacataacttttggaactcttgaactccattactgtgattacggatttttcttgaaggcttttgcattttaactcgatggtttgtggttcttttctgctaatgatactcaaaggtggggtacaagcaaataaacagttgaagtgattctattatattcatattttgctttaacaacataattatgaaatggtgtgtaggacgtggttagatttgtggtttacctttatgtctaaccaattgtcgagcttcctattgcaggaaggggaacttgatgctgtcgttgtagttcattcttatgaagctgacgcaccagttggatctcataagacaagattaactgctctcaatgtgcgtttattattacaaagtagtcatgcctgtcttcccatatatatactttgtcaaggagaaggttaattcttattgcatatcatgtaggtccctccgatgggtttgttttacccaatgcttttggttccagatgtttatcctccaccaccgcgctcctggttggcaaaaatattgatacagttttctgttttgatgacgagactatcagacaataaatcatgttgatatagggtttgtttcacttgttcaggttcaatgactacgaggatatgctggaagaaacatggcaaatggaatttcccagaagatctgaaatgcaagatggtttttaccctgctgttcacgcgggattaccaatgtgggacaactatccagttttcgccaataaaccaaagaaagaagagaaagttggccttgcagaagccatcacgagtagcattctttcaactggtatgattaagtttgtccaacaacattattttgcatctagatccttaataaccactcgtgctctattgacaggacgtattgaactccagaagaagttgttttctagcatacaattggtaagctatggcaacaagttgaactctggatttcaatttttataaattcctctagagtagaagcatgaaaatttcttcttgctgtagattggtggtgttgctttgactggtggtcttattccagcggtggaggataggtctgtcctactcttgctttatctttaagttgttc

SEQ ID NO: 184540 - DNA, 1249 bp, Cannabis indica
atttcatctgcaaagcaaatgtgagtaagtttcaaatctttgcaccgagggtgataactgaaatttgtctgtttggaaacctttgccaacaatcttgaaaggtatttcatgcctataataaagagaagagacgacataggattccttgtcaaagacctttcttggaagcaaaataactatacattgaaccattgaaaagaattgaaaatttaggagtaaaaatgcataccatgacaagtttaatgaatttttgggaaaactgaagagcattgagcatctcttctataaatctccaatcaagagtatcataagtttttattaagtcttttttcaccatacaagatggagaggtatgcttccttccatagtgcctcacaatatcttggcacaccatgatattatgagcaataaacctactatgcactaccttggttttcgacaataatgtgtgaaaaaatagacattaacatattacaaattgttttatagaccacattgcaacaagcaatgtgtctataatcactcacatggctcagacatttgctcttaggtataagagtaatagttgtagcatttaactctttcaaaagctcactagtgaaggaccgatatgaatacacttctgtaaaatcatcttttaccaacccccaatttttttaaaaaaaccactgctaaagccatcaagatttggaggtttatcctccgaaaagaaaaatagagcattcttaatttcttccttagaataaggcctattgaggagagaaacttgagagggagatacaacatgacctccttaataattgaagcaatgaaatgaaataaaattggataagtaaattaaataaaattgttattaaaatactattgaccattttctaaaaaaagtctatctttccgcaatttggccggtcaatacctagttgagccgagtcacttttaattcaacaaattaaatttatagaaatagtgtattatattaattataaactaaatattgacttgtaattattttgtttgagtatgctaataaaaatttcagcttacttaacctaaaaaaaaaaaaaaaaactaaaataattgagtttaaataaaaattagttataattaatttaattatccattctaaaatatcgataatattcttacagtcagtagtactataacttagcaattgtcactagttagataataccacttaaatttgtatatctatatatataaatttattattatctgggctagctgtttc

SEQ ID NO: 184541 - DNA, 6600 bp, Cannabis indica
ctactgccatagctttagcatcacagccacaaaatcaatctacactatctctttccggagacgatctagacggaggtggtgcctgacgggaaaaattaatatataattcatattaaaaattatatagaatatttatgagtttttttttttttttgaaaaagataaaaaaaaaatcttgcagcaagaacaagatccgcaccatcagatctatctggaatttttcttctcgctgtctctcaacatcggaagttgttgaattcctgaaaataaacaaccccaggtgaaaagttaagacgagatttttttattcagaagatgaaaattcgaatctttttcttttggggggagagatagataaagataagagtatgcttacggtttagtagcagttgaagtctcgcgcttatcgtccaatctgtgcccagaaaattccttcttgggcgattgaggttcttctttgttcactcccaaatcccgattctctaatttatcagaaaccagcttcgactctgatacgaggctgttctctaccttaattggctcgggctgcaccgccgaagcagaggctgtccccgcctctgacatagcggatatagagtgggattgagctatattggaggcaactactccgttttcagtggctgatccaccagctttctccaaattagcagatgaggtctctgttttctccgtctgatcagctggaagccggcttgtagaaggattgggattgatctgaaccgttaaaaaggaagatttggtcatttcttcatacttagagtcacccttaaccagtcgaggcttttttctcttgggtgctgcaaattcgggaaaaaaaaattaatcagcttaatcgtttccatcaagattcaagaacagtcataaacgaccaaggcggtactctgtattgctttctgagaaaccacaaggaaggaagtgaaaaaaaaaaaaaaaactaggaatccaactacgaggcccaaactttcattttctttttttcctttcctttccagtttctcagaagtcaagcggagcatttttgaggtagaaaatacaacatagtgaatagcaaaaattgagctctacaagagctcaaatttagacccaccaacacaaaacgcccaagcgggcaccgcaccttcaacagcagtcagagatgaacgagacgatgattgaggaattccgtattgctgtgagcccgagatcggagatgaaactctggatttggagtcaccagaggatttgtttgcttcacttgttgatttgtggttcgtttctcttgattcaaattttattgactcggaagccatgatatcttgcttcgtgggtccttgtggctgcctcatcattccatacaagacctcggcgatctctatctcgatctcgtcctgagctgaagaaggcgacttagacgaagacgtcgtcgtttttggttgtcggagttttggtccattagacttctacaacagcagagaagtcgtcagtaaaatcggaagctaacaaaatccacggaaaaactagaattgagagaagaaaccaagacccaccagcttcttccgaaccgaagcattggaagaagacggtgagacgggagtttgacaccccacagtcggcaccgccgaaacgctcggtcggactggagatgtcgaagcctgccggtgaacttgttcaccaacaataccaatcgctgagctccattcgtgcgacctcttagtagaaactgaaaaaaaaaaatcagaatctcaatgtcaaactcatatctcaacagacaaaaaatcccatagaaaaattaaaactcaaatctccaccgccgctctacctgaccgtgcttttctgggtaccgacacaccaatcatctcgtctgcaaccttccacgccggcgctcctctaaaattcttcgccggtgggaagctcttccgctgatgatgaagcatggaggaggttgataaagacgctggtgggttcgtgggaggaagcatccttaaggagccactaccaccgccaacaccacctccgtcttcatcttcgtcctcttcttcatcgtttacgctttcctcagagctatcatccacaccatcttctctgttgccgtgcatcatcctatcccctcttctcctcttgctccggcttaaacgatctctttctcggtctctatcacggtctcgctctcgttctcgctctcgatcccgatcacgatctcgatctttcttcccactccctcgatcccttagtctcgccgtttcttgtaactcgactggtccatcttcctctgaaaaaaaaataaataacattagagaataaaaaatcgagtcgctttattaaacttcaaaaactgggtatttttttcaaagcacttagatctagtaaatttccaacctggagagtctctcaaactcccagttctgtgtctacgtcttgacaagccatttgtggccgccatggatgctcttcttgcttctctatttctatccatccctggttttactttctctttccaaatcaaatatacccagataactaatcccaactctcatcaccggaaacctaacataaattatccggatatggagtcacgaccaccggtattaaaagaaaccaatctattgcaacaaaagaagaatttgattcaatcagccctgaagatcttcctccttacttccccgaagaaagatcttagtttttcacttatcttcttccctcttctcctcctccttccctctctctctatctctttttcttttcgttttttttccctatctctctctacccaactccctctgtcttccttttgtgctcacatctcatcatcttttcgctatttcactatcagcgaaacccactccgaaccctaacggacggctgagatctagacctagattaccatctttcaatctagaccgtccttttaagacttatccaacggctgtcaatagctcaaaccgacatggcaatatctcaaccctatattattttactctaagcgactctcaaccttttatgtcagtactgccacgtgtcaactcatttcttccccatcaagcttccatgtctactcactaccgatttggtactaaatataatagaatatatccatagataaattattatatactaaaaaatattaaatactcaatttttttaaaaaaagtgagaacactgtagtacacgaaccaataatcaatgcttttaaaaaataaaaataaaaagtaaaaattatttattagtattataatgtggtgaaccggctatacccggttgcaaagaccttggtaaaagcaacatgacgatcacaaggaatctaggtgaccgcaaaaaaatatcatttcaaccggtcaaattcattattttcatttccacgtttttgtattttattttttaggattcttaaccaaaaaaaaaaattaatcagcaacgatatctatttaatattcctataattggactttgtagggcccaaatgaaaagcatttaattaaaaaataattgaacgaactagatatttctcttactcgtcacacgaacatttactggccgttggatgcttgatgacgtggcattatttatttccgaaccagatatccgaacctacctggtgccgaaccaagtggcccttgcgcgtcgatcagcgcgcctcatcgagaccgttaatatcggctgatcctacgactgagattaagcaaaagcagggagcaaactcgtgtcgcggtcacggaacttcagagaagtgtgggtcccgcttttagctgccgatctagaaattatttcctcgcgttggcctatttgtcacgttcgtgggatgtggcacctatgatgacgtgtactgggtcccaccctttgttcgtttgtttttttaaatgaattaaagtgaacaacctactcttccggtcaatttttacagctctagttaaaataatataatttttcctatgcaacgaaaaatgaagtttcagttttaaaacaataaaaaatgaaaagaagggctattctgctttctcgcttttactccacgcgcctatagcgggattcacattattattatcctgactattaaatgaattattatattttagtaatattttattttatttgcacaaacaaaatgtaaatatttttattaaaaaaatgttccagcgtggcggtgtctttttcaccacgtgtcataatcatctgacgtggacacacaatgcactattcacttgccgattcgtcgcctcggatcttgttattcccttctgaaagaaaaattaaaactcccttccgcttttcctcgcagtcggtaaatatctatagatgagagatttctctaaaatcacagggaggtgacctatatcttataaataggagattttcattggctaaaaagtcattttccgtttcgcaacactccatttcctttctttttgctgtcgcgggtgaaaagtctccgtcacgggatggtcaatcaaacagccctcctcattaaaataatgtattttctagagagaccagagtggacacgtcagattattgggcccaccttaacttggttgacccaccaaaatgaatccttttttctcttttttattttttttttaaaaaaaaaactctaatatctgtcgcactgtgagaaggcacttcccatctccatttctctcgctgtcgtaaaacgacatccttaggaattgccacgtgtacgaaattatgctacgtcatatgcccacgtagcactttttatcaccgtgtgtaaccctagccgtcaacccacatattttcaactttttttttcccttagtatcaactcactatccattaattaaatgattaatattattattatataatgtcaaagaaaaaatgattaattaatataatatttttgaattgctattgattagagtatacttctacgtgctattaatttttaattccaaaccccactattatttatttttatttttttgaaaaggatccccactattatttaatatatatattatgttagggatattatttaatatatttgctgactacttagaataataataaagcactttgctcttatatatcttttgccatccatgactttctaaattaatgttaatggactttaacaaaaaaaaaaaaagcaattaattaatctcaataattataataattttattaggaaaaaaaataagaaggatgttaccattacccttaaaaaaatggaaagacaatttaatagttaaatctaattgtatattagaatcggtatactaacttgatttatgtttttcttttctgaatttaactttatgtatgttgttaattttagtaatgtcaagttgtggattggattgtgatcttactttgttttttagtatatataagaaatagtgattttttaatagtattcataaatgtaaatttgttaatttctttgacccaccttaacaagaataatttttattttctttcaaatattagtttattgaataatttatgccaagtatgacaggattaaaataatcaaattgtactattttaaagtttataataaacttatgtcgtagccccctatgcaattgtaatagggctataattaaaatatataattatttttataatatataatatatatatacatggttaatcctaattgcaggcttgatctacttctttcttgttggactctccacattagtgaattactaaatataatattctttgataattttttttattaatatttgccaacagctaagaactaatattttatagcacacatattattttattttttattttccgagcaataaaaaactactaaaaatatattcaagtaagaataatgcaaaagcaaacttatagattgtggtgttcaagaaaacaaccaaacctaaataaatggctcaatatattatattgacaagctggcaagcaaactctgtggacccaaaaccctaacgcaatctttaggacactaatacaattattaattaataaattaagtaattaattaaatattattatacggtatattattcatataaatattttaagcatagcataaatatcaattactcttataaatataagtaatgttaaattggcataacctagttataagacactaatgaaccctattagattctacgtaatactataaattaattattactagtaaaacttcaaagtacctaatttattttatttatggaatttttaataacgacgaatttgataagttgtaggccccgcctaattataccaaaacaaagattaaactatattattttgttttgtaaattatgcattacaaaatatttaacacgactcattcaatataaaattaattgatatttttctgaataaaaaaattctaaattttcatatttatttaatccctgtctaattattttaattcataaatctcaatcatgtaaacaaaaagaaataaaaaaatctaaaatatttatataattaaccgacaagaaaattatattatataattttaaaaatatatactagtttaatcccctccaaattttacataaattttggggttatattatatatttttataattcaaccaataaaaatgatttaaacgattataagtctataatacacacttaaagg

SEQ ID NO: 184542 - DNA, 1347 bp, Cannabis indica
agtaaaaaaaaatgaaggcttatgcataaaatattgaaaatgttccataacacatgatataaactttgaatatcaactactttgactatggtataggataaaagaaaaatagttgggtaataatctattcaaacactagagtttctttaagccaaaatgttgagattcttttcctcctcaaacagcactcagtcagaaagaatctttaaaactacataacaaataatgaaaaaagaaaaattgaaaaaggctaaggaagctaaaaattccagaacaggaaaaacttaaaacagaactgacctttaatgcccccaaggagcaaaagcccaatgaagtaaggaagaaagcaaataaaattccagacagaagccaaaattcctttcggaggttccatctttttccacccagatctctcccaccaccacaaccactactactaaatatccatgtcacagtctaactacaattcctctctgcaaaagacctcatttttagccaaaaaaggaagaaaaccaagacacccagaaccaatttatgataacccacatcagaaacttactcaaaatcgatactttactcttggtttgggaccaaggactcaaaagatttgttttttctggtccccacaaatctttggcttagaaaaatacacaaaatggttggatgaccatatgatatatatccttcttcttcttcttcttcttcttcttcttcttcttcttgtttttcttctatctgaaaggtctaatctttaaatatgttttggagttagaaatgggtgataagcatttctagctaaagagacggcggttggagaacagttaggagggttgaacttgaattgggataaaatagggcagttacattcaaagaatcaaagcaaagaaaaggaaaagaatggttaagacttatgaaaaatctcggctagtttgtattttcattttttttttattcttttatttatttattatttattcttttatgcttaaatttaaagtgaagcattagcaacttgggttctgttcctttctgtaaggaacattgtaaatccttacttacattacataaaaacacttacgaaactatttgtttttggaaaaagtatacacaaaaacttaggaacatgtgatagttaataatgtggttaaaattgaaaatgtcaaactactacaaataccttccaagaaaaaaagagaaaaaactatggtgagatttgtggtattttggtgaatttgaaattagaacttggaaacttcaaaatcaaaactaatttgtactttccaaataaaattgtgctgagtcaatatttgtcgactcataattttatttagttattttcttaatttt

SEQ ID NO: 184543 - DNA, 2774 bp, Cannabis indica
aaagataaaactagtacatgaaattacagagtgagatgatccaaattctttgtcaacaaagttgaccattcttttctcaagcacaatgataaaactagtacaattcattggagattaccaagaagaaataataaaaagttcgaaacatgtaacctttagttcatggcgatgcttttgaagtaactttgcagctccaagaagcatggcaacatgggcatcatgcctacttttgtgctcccactccacactctcctacattaacagaaaaaaaaaaaaaaagaaaagaaaaagaaaaaagaggcaatgatgttcaaagatcacagagaacacattttgaatttaattttttaattaaaaaaaaacgaaaaagtcaacaaaggcaaatttagtgaaagtaaagtaaacctgctcatccatattcactctgattgcaacaaatggaggtgaaccagttccgatgaagccaactacaccagttttagcaactgggtatttgtaaaaaatactcattttctcaagctcagctctaataagctcactagtctcaatttccttgaaactcagttttgggttttggtgtatttttctcctgatacccaccatccaatcaaaaagttcattttcttgaatcaagtcgagaaatttaacagggattagacccagagaatcattgtgacttgaggaagaaatgggtaatggcataaacactaggaagttgatgatgaagaagtagaaagccatgagctattattattattattattattgttgttattgttgttattagcagcagcctagaagtgtttgattggtgttgaagtaaaaggaaggaaggaataataataataacaatataaagtggctagtgtcctttttggaagcactatagttggtttggccacacaaacagttgagaggttatagtccaatgaagcttacctcaggctttgggggacagaaaagaaaatgacatttgtgtgtgtgcgtgtgcacacgtgtttaatattggcaaaggacaatcagccacctagttagattttagtacttggcttgagatattttactgacagtctttaatgtttcaaatacattcttcattcaattatcccccaaaacctaatgtttagtgttaggagcaattgttttattctattttttaataggattgaacattttaacaggatttgggtacaatttttttattccaaaattcatgaactcgaaactcattatattcgcccgatattcaactttatttttctagaatacattagcttaatttatttttttggaaaattaattcccattaagaataaaaacattagagtacaagttacaatgttaaaagtgtgaaatattaccattccacacaaatttttatcaagctctaaagtcttcgtagctacttgatgagcgactgcattgaacaccctaagaacacatctaatggaacttcagagaatttgggtaaagaattaccaatattaacaaccatatcagataacactaagaaatctattttattacatataattttgttaacaagtaacttcaaatttgattcaacaacagatatagggagcctaacagcaacacaccattttagaacagatttaagagttaaaccttcagcgtaagttgagtctgaggctcctgagattggaatggccaaacgagcaactatattctcattctcatcttttattacagcccccaatcccaatatgttacctttgcaatccatagcagcatcagtacaaagcttggagaatcaagagctataggaggaacccgagactcctgggcacacatggaagctgaaaggcagtaggaaaaaccttcttttgagcgttcctgtaatcatctaaataagatctaatccaagcaaaaacattagtagccggcaaccatcctttgtcaaatagcttattattcctattttcccaaataacccatagagaacccaaaataatagcaaggtcatttttattcagattttcaaaagcacatagcataaagtccttaacatcacaatatctattatccatatagaacttctttaaagaagaaactctccagacttgactagcgctggaacaatcaagcagagtgtgggtcacagtctcaatggggcagttacaaggagaaaaactaggattacaaataatctttttggtaaaatgattagaagaaaatggaagaacatggtggtaggctctataagtaataaatgtttaattttagggggaatgagagattaaaggaagaaggagggagggaagtagacttagcaaagtggtaggcaaacttgacagtaaaagcaccagaggaatgtgaactccaaataaggcaatcctccttactagagtccccaataggcacatgaaggatttgggaaatggtatcctcatcaaaataatgagaaagcttagtcatatcccaatttcccaagtgattaataaaaaaattgatcttatccgaaggaggggttgattaaccctgtagtgaatgtaattatttttggcagccaatgatcttctaaggtcactactaatttttcaaacaaggccctttttaaggagatctctcccctaaagtaaactcctccaagtataagagggagagtgacctaggttgcatccagcagggagttattctttaagtatttggctttcaagattgtggctaacaaaaagtgaggattggtaaaaactctccaagcttgcttggccaacttagcttggttaaaagaaataagagatctaaatctcaaa

SEQ ID NO: 184544 - DNA, 6123 bp, Cannabis indica
tgagtaaataattctttaaattagaacactctcttactcataatcactagcataggtatagtttagttttagtacaattctcagccaagttcaaatactaagagtttgtctaataattctcttcatttgcagcgagatgaagaagacatgacggaactagttaggaattgcccggttgaatttaaagagtattacattcaaatgcaagcagccaagagaagccaagcacctctgctttcacaggttgcttcactttgccttgtgcttcgttattattcaattagaactccacagcctaaccttgtctattttatgcctgtgtaggtgatcgatgaccgcctaatccttgacaggacagtagctgatcaagtttctatatggaaaaacagtaaaggtttgactgatgctgtgaccgcggaccatgcttgttctggtgaaacttgttctttccatcaaattggagatgtctttctttgcgagaagactggacatattcatggtagagcggcattataaagttgtgtacatgtttttgtgttatctctggtgtttgtttttcctattgtttataattgtactgcatttcctttccagtatgcgatgatacgtgtagagaagctgttatggatcctagcaatgagctatgggtttgtactatatccgggcactgttttgataggttattgtcaccagctgagatggaaccagacattgtgagtgaatctctcttgcttacagttgtttaaatttgataccccattcattatattgtcctccccttgaaaaactagtaatgagaatgtaatatcaaaatttaaaattgagctactttgtgcattcgattgattactttgtcatataattagctagctgctagggtcgttgtgtttgttttggttattaatggttgcttatgcctctgcttactctttcatcaacaaacctacaggaacagcaacaaggcggtgtcaatgatgaggcagaaccttttatggggtccggccgatttggtaataatctctttaaaatccaacaagttactatgctttattctattacttcttcgtcttataacgaccgtgtttattgaaattgcagcgcgggcttactcgctgggatatcactgtgcagatgagaaagaactagaagctgcactgaggttttgctaagtggtttagaagaaaaaagagtgattgtatggtatggtatgttaaaacgatgcagatagagagaactaagaaagaagcattgcattttggtgtatctaagtgaatgtataaagaggtctattagtatgtactactaccggtgtgctgatgcctttatttgtattatgtaggataatgtattatttatttttcttgttagtccttttataattataactattaataataataataataatgaaggctggtagagttttcttcttttcccttcatcttggtaataagaaaatgaaagccatcgtcaagtttggaggtctaataataagtagtaattaattagaagattcttaaggttgctgccggacaaagtggagaatcacatgttataaaatgataattcatattaggaaatagtctcatatttatggttataacttatatataggaaatgacttactagaagaataaaaaaggattatatagtaattgtgacaataaaaacaaatgatattatataaattaatgagaaagtagatatttcttttttgatataaagtgggaatagatatttatatatattagattagattagattagatgatgatgcgtttatataacgcgtcgtttacgcgttatgagtaacgcgtctaaggaatatgaatatctctctttgtcttttctgtatataaatacttctctctctctttctattccttcattagatattatctggttcgactctcaaagactttttccatatccaattacatcgtcctctaaaggtaaaatctttgccccctttttcttttgttttattatttttctgaattttgcttaggttgatgatcatcttctgattttgtttattttacaacggtacctgatcgatctgttgcctttgccttttccttttcctatgtataatctcttctaataatattgaatttgtttatattaagttttcattcaacaagatctagtttttcgtttatattctttggatctagtttaggggtttggaattgagaatcaattgcatcaactaatgtatgaacattgatctgcatttacagtattagttttagtttgttaagaaagaaagaaagaaaaaaaatgggtggtggtaaagataaacatgaggagcatgacaaagggctccttggtcaacttggacacatggtgggacagcaagtagcaggtggacaccatggccatggaggacatggatatcctccccagggttatcctccagcccctggtgcataccctcctcagcatggttaccctccccagggttaccctccagcaggctaccctcccgccggctacccacccgcccccggtggttacccacccgctgcttatccaggctcatctggtggtcaccattctggaggttaggccatgtaccaattcaccctcactatttaatgtgcatcatcatattattacatgttggtctaattacattttgtgttcagggcatggaggcatggggtccatgttagctggtggtgcggccgcagcagcagccgcttatggtgctcaccatcttactcacggctcccacggttcacacggcggccacttcccacaaccatatgggggtgctcatatgatgcatggtggtcatcatggtggcaagtttaagcaccatggtggaaagttcaagcacggtaaacatggcaaattcgggaagcatggcaagcacggcggcatgttcggtggaggaaagttcaagaagtggaagtaaaccattctgatctgcctgaggcctaggcctgaaaatatgataatatatagtgaatattttgatgttttgattctgatttccctgaaataatctaatacataacattcacattggcagtgcttgatatgtatttagtcttcttctatctgtgctgtttatttcaagtttggttggttgttgagagacagtttgcatattacaacacaacaccatactattttacttgctgacttgttaattttaggatcacaacttcttgttttgtttcaatttttttatttatgaatgaacactacttgaaattgttccaaaatcatgtgattctacttgactcgtgctatatttttcttaaagttgagtcaagccaatatttattgagagaagatgttgagaaagtattaatgaataatatatatatatatatactaaatcttctctcatctttatttataattaaattataactcaagctgagctatcaaatttatatattgaagataaatttgattttagaaaatgataattgaggatatgaaaaaattctcgtagaaagaaaccccccatgttcaaatttgttcgaaagaaataaaaaagtgcttcatctaagagttattaccaagtactcctagagattacttggaattatgagtcattgtgtgaagtttgtttattactattcaaaggacttaaagtcaaatgccaattgcaatatcaagcttgagaaagttagaacacaaacttatgcatatccaaagaagcactaagaagtgatttcatcgtaaaaatgactgtaaattacattgtttaaccataaatttatgttgagattgcgtatcgagattgcactattaatccccaaagaagcactaagaagtgatttcatcgcaaaaacgatagtaaattacactgtccaaccataaatttatattgtgcataaagtaaattaaataagactattttataaattttaatatttcacattgttagtttgacaaattttacaactaaaattaaaactataaaaagtacgaaaactaaacagataataacattaaccaacataaaagtaatatcaatcaatttaggttaataatgaagatgttattttgttcagtacaaaaactacaaatcttaattttcaatccataacataaacatgttaaaataattcatcaatatatttcatcatccattagattaaaattctatttttttttactctcatcccgattatcattggaagagtttagataacatcaaaatatacgagtactctcttaaaatagcgagtactcaaataatataatataaaatatatatgcaagtatgaaaataatataaaaaggacaaaaaatataatggtttagtaggactcgcattggctagtctattgttaaaagagatctcttactttgtattttattacccaaatcagctcagccctccttgaatgaatggtgctggagcacctacttataagtagtaggcgaatgttacaaaactatgatcataatgagacagttacaaataataataataaacatactaatttgaactaattacaacgatcatactacatgtaaagcttgctttaataacacttgaatactttgactattacttctgttgattggtgtgttcacatatttttttgattgataccgcagttttaataaatattgcggggtcttttttgatactagaaaatccctattttacctaatattgccagacccattttgatactgtgagttctctatagtgaaatccttctcacgagggagtggtgatttatcccaataacaccgactaaactttagtaaagaagttaagaaactctacattcacttcaaacttaaaccaattaaaaaaaaactggttgattcctctaaaagaaacattagtttgtaattatccaagcttgattaacaaggatatcacattttgaagcataattaagacaacccacaacataaaacatattttaattttaattttatagtattttagttaattgggctgggccatatataagagaaaggcccaaaagtgatcttgacattgggccctgtgccaaccagagaataccagagaagagaagagaagagaagagaagagaaaccctagattggattgaattactccttttttcgattctgctgtggtttctctctgtaatcccataccttcgtctcttgcttactactgccaccgtctcagatcccacgctctctcactccatttaattcaggtaccatttctcaaatccaatctcatcatcttcatctgtattctggtttttatatatatatatatatattaatttttgtttatgtgattagagagccatgtcggatcggttgacgcgtatagctatagtaagctcggacagatgcaaaacccaaaagtgtcgtcaggaatgcaagaaaagttgtcccgtcgtcaagactggtaatttaatttatttcaattgaattgtgtctttgtgtgttcgatgatgattttgataatatggcccaaaatcagtaatcaataatcaataaatatatgtatgcaggcaaattatgtattgaggttacaaccgcatccaaaattgctttcatatctgaagagctttgcattggttgtggtatatgtgttaaggtctgtgtatatactattttacttactgttctttctatcttatcgttttttttattctctaaagatttgagatgtgataatatgctatttgtttcaattcagaaatgcccatttgaagcaattcagattattaacttgcccaaggatttggacaaagatacaacccatcgttatggccccaatacatttaaactccacaggtttttctttagcaaatcaatttcattttttcttcattaatttctgtgcattaagattctaaatgataaactcattgtgtttaatttacaggttaccagttccaaggccaggtcaagttctaggttggttggaactaatggcattggcaagtctactgctctaaagttttggctggaaaaactcaaaccgaatttggggcgtttcactgtaatattttctatcactatatgaactctagttttgcatatgctttttctttctaactgtatgttggatttttgttcttcgtttccagtaaatcctccggatttggcaggaaaatcttgacctactttcgaggttctgagctgctaaaaa

SEQ ID NO: 184545 - DNA, 4637 bp, Cannabis indica
taataataataataataataataataaaaccttataatattaataatcatgttatgctaggtaccccaataaaatgctctaaaaaaaacattgtgtgaaagaatttttttcaacctcactaattataatattgtcctctgtattttgtgtaagtaaatcttatctaggattttcttactcatgattgttgcgctacgttgtcgttcgatgatttttattttcttattggtggtacctcgaccatactatgaagcttcgcacattgttgctgtcttggattagtttaggagcagttgctggtgttgtgttttgataagtagattttagattcactttagagaattctttgtatggttatagctaggtgtctaggtaagtttttgtatggttttacatatgttttgagtaattgtgtgttaggtataatcgtataaggtgaagttgtgcaaaatcgatgtgaaatgacgaggctaatttgagaagatgtgagttggtgttgtagcctcatgtcttagagttgcatcaaagaaagaaaaatgccaaagggctgaagtgcctaattgaagggttataactctaatgtggggaagtagaattccgacccgatctaattaaataaatctttttaacatgcttattgtacacctatcaatccagaagagttatattttaagcatcctgaaggggtcatcgcttatcgattcataagagctattttttcagtcttcttgcaggggttgttgcacggacgtccgtacaacgaaattgaatagcaaacttttaagggtagtacaatctttgtccaaagaaattgaagagaaacttagggttttcaatgacatttttggaggagagagaccgaaaaagagacctcctcgaaggagaacaacgactagatgagaagggtacaactctgttgataaatctagttcttcttttatcactttcatttttagtttttcaattatcaactttatgaatgtaatgtttatgtttgtaatggataactaaattcctaagtgctagagtatttgatggatctattttaaatttgaattaaagttccttcaattaattgttcatgtttttcttgtataattattatcatattaattcttgaccactatcaatatgaattaaaatttagggtttatggttgaaaaagataattttagattggattaattgcatgacatagagtgattatgagatcggagattccttgaattttatgaattttatttacaagaatcacaaggcttaataatgtattgattggttaatattgaatagagatattgtaatgctcttgctttacttatatagtctcatacctacatagtacacatgagtacatcactttggctacttcctaaaatgacgactggtcttgcaaaccaacacgagtctttccagcgtgctttgtcctcactagcacgctctctagaaaaacttttcaggaggtcactcaacctaatattgctccaggtcaagcgcacttaatttggagttcataagtgatgggttgcttaaaagaatatgcattttatagatataggtaatacttatctattcatttaagccatattcaattgtgtagtttaatacttacatagtctcaaatccatcatatattaacccactccagacaatgtggaattgcacaagtctttcccactacagatcaagatcatagtcacaatctcaagcatgaacataatagggtttatcctcatttcaatcacataatatataaacaaataattgttggaactggttaaatatttaaggttaaaacattaagattagtaaagactaattaatgagaaatgtatagcctagtaatacaagttaaaaagataattacattaagagaattaagagaatgtgtactattaaactgatagatagaacttgttcttaggtccaaaaatatagttttgagtacactaagttatcctagaagtatgggtcaacagaagtgtcaaatgcatgtttcagagaaaactgcacaatgccgcctagcactaagtgacatgtcgcttgaaacatttttggaattacgaaacgaaacttcctcaaagtcctaggagacatgtcgccatgatttaggcaacacatcgcttgggaagcaacaagtctcctgaggcaagacaaaattttaattcccaatctcacatgttgcccaatgataggcgacacgttgcctagagtcttgcatgagaaattttagggtctcgtaaaatgcaagaaagtgacccaaatgacctcattaagtgatctaatcatatggattaatactaatgtcggttcatacattatataaggtgttaagagatccaaaatgacttgattacccattttggaatctctctctaaacaagttctctaattctctcccaattgttctaaaggttttgcaacacatcctaaatcatccaatttcgagttatatttagaaagttatggtcaatatactaatgggttactcagcaggaggaatctcagagggaaaaatgcatgagtctcgcccccatgaagagactcccccatctgcgagacgatgcacaagcacacccccataagcgaccaggggccccacaagctttcttaaagcctcaaaaatcaagacaattggtgtttaccccgaaacttcgcaaggggaaaaatgagccaaagaatgtgattatctcatggctcattgcccaagggagagccgctccttgcccttaaaaggagagtcccaccttgcccataaagggagagtcccaccttgcccataaagggagagtcactccatgcccataaaggaagagtcgctccttccccattgttgatcgtccaatttttgctaagtaaaaatatcgaggtcgtaacgaaaggagagaagaataagagagctcgagaggtaccacgggaaaggagcctcctcccttcaatggtatcgcgatgcaagaggttggaggggcctcttagtgccgtgccactaaggtcagaggaatctccatggtgctgcgacactaagggcttgaagtcctccatggtgtcgtgacactaagggcttaaaaacccttcatggtgtcgtgtcgttggtgcctatgtggacattgtcgttgtcacctcccctagtggcattatgtcgcttacatgcaagtggtaccgtgctactgagacacgacatggatttgtgccacgactcttcaactaaacaagataagggtcttgacgaaaccccattccttcattacaagcaaacataaggctctcctcaagaaagagtcgcttttttcccataaaaggagagtcactccttccccataaaggaagagttgttgtcaccattttggccaattgacattatcactatcttagctaagtgacattgtcgcctctagagatggaagctacaggaggaaacaagcaccttgagatatgatgaggaatttcaaaaggaatcaacgacgcgcctaagaaaggacaaattagagagtacgaccacgacacctacaaaagctgatataaagtagtggcggaggtgtgcttgtgttagtatcacctgacactcgaccaacaatgtctccattccactaccacccgtcatcataatagtagggaaactttaatttctatgcatttattggattaaattatttacataaacttaagttaacccatattggtcgaataggctaacatttcataaaactcaattctacccctcccatttcaaacacctgaccatctctcttcctccattctctctctcgctctttgaactcaccccaaggactcgacccacagcccaccacccacaacctcagtaccttctttccacaaccaccgctaccatagacccaacaacccacagacccaatgacttttccgtcaaccacgacttctccatcgacaatgttgtcaaaggaatatattatataattaatgtttgttatctgtgagttgatgttagatttagggtaaaaatggtcggatctgagttttgggtagaaaattggttttttgtcaggcccgatggttgtccaatggtggcctgatgccttcctgctattaaaatgagtaaatgttgaagacgaaggtccgatggtagctcgatgctacctataagtgtaggatatggtccgatggtagtccgatggtggcccaataccttcttgacgagcttaatgaatggaattaacatctataaatgtagaatatggtctgatagtggtccaatggtagcctgatgctactattttttatgtatagaaacataaaaaatgagtagcaacgagccacaatcgcaccaccatcggactcacatcggaccactatcggtatggatgagaatgaggagcatggataatgaagttagaagagaaaagaagggagaagagtattatgagtattaatataaagtgtgcctatttttttttttaatttcggtaagtttgtgttcaaaaaaattaatatacacactaaatgtatgtatataatttaaatttttttaacaatatatggtgactaaggaccacttacaacttgtaaccttgtaatatgggagagacattttttgaataagaaaacatcaaacatcttctctctcttacattttcacattaagatcatttcactatttt

SEQ ID NO: 184546 - DNA, 4354 bp, Cannabis indica
gaccatgagtactactactctctctctctctctctctctatatatatatatataaatatatataaatatatattattaatgacaaaaaaatattcatataactcacaaacaaacaaaaattatttttagtgataattttttaattataacaaatttttatttataactaaacataatataagttgttactaatttatttttagtcacaataagtaatgtgattaaaaatacatttagtcacaataaattatgatttttgcgactaatacttttagtcacgaactttttaatcacaatttaggaatgataatttataattagttacaatttttttatttttaatcacaaattttattgtaactaaaagtaaaattttttataacaaaggtttggtactgtgtgcatgtgctgatcattatttgatcattattacattacaccatattaatgattcatctttatgatcaatcaacaaaaatattcaagatataattattatatatatatagatatacatacaccacccttaaattgatgaataaaacatcaagtatatgtataaaccactaaaccaataactatggtagcctcttctttattcctttccccatttttcattctaaccttgagcatttttcaaccccaatattgcactagggttctttccttggccactcaacttgaaaatggtacatatatatacatatacatttatttaattatgtttgaacattttcttacatacataacaatgtaaaattatgaaagtaatttttttttgttcaaaaccctaaattgtacgtatacgtaatgcttattatattcaattatcatcaaaccctaattattattatgtgtatgcagactttagttacatgaaggtggtgaccaacgccaccaacctaccaccgtacacggcggagtatgactacattgtgatcggaggagggaccgccggctgccctctagcggcaactttatcagcgaattactcggtcctggtcctggaaagaggcggcgacccagaaacctaccaagacttgtttagggcggagaatttcgagcaacaaatgacaaaagaagacgatggagaaggcccggtggagaggtttaggtcggtagaaggggtagaaaatgctagggcacgggttctcgggggaggcagcatgatcaacatgggattctattcaagagctgagaaggagttttatgagagattaaaaggagaaggaggagtagagtgggagatggatttggttgaaaaggcttatgaatgggttgaagagagtattgtgtatggaagtgagttgttagagtggcaaaacactatgaaagaggctttgttggaaggtggaattgggccctataatgggtttagtttggatcataagttgggaactaaatattctggttctatatttgatgagtttgggggtagacatggtgctgcagagcttcttaataaagggcattttagtaatttaagagtggttgtttatgcaacggttgaacagatcttgttctcaggtatgttgtcaatatatatagtattcttttatatcttaatacataattaattagaagatatttgcaaaataatattatttagactacaaagttgtcatttaataaattgttaaaaaatataaattagaggtagttttgtcgccaatattccttactcttattattattaattaaaaaaagaatctattcaaaatattttaacaactatgtaatataaatatttcatataattgtttgtatctgcaaaaattaatttctaatcatttatagttaatacatgcacttcttttatatttttaatattttttttttcagagagagagttatatttttaatatttaaatagtttaaatcttaatatgaaggaatgcattggtcacttattttagaggtcaccatagaagcaggtctagccttggccataggcatgataagcatttgcctaaggcccacctagcttaggggctaaaaaaaaaaattcttttgaaattacacttttttttactaatttttaaaagtatcattttttttttttctaaataagggcctaaaaatattttttttatgaatatatttgaggaaattgcattgtatacccactttacttcacatattttaatttttacttgtgtttctatattatttaagacatactcacttttatagatgatgtccccatataccccttaggctaatgtgaattatgtgtaagacttaagtgggaggtgagagtatattgagcaactcacttacaaaagtgggtacattttaataaaatataacctgacggtattttagattaataaatacaaaaaaaaagtattcctcaatttatctcgtactttaaggctggcccttcataaaagcaccctaaaattttgctatcacacattatttaattataataatttgagtatacatattaggtttgactgcgaaaggagtgatctttagagactccaaaggaaaatcccacaaagcatttgttcgaaacaaaggagagatcatattaagcgctggcacaatcggtagcccccaactcctcctcttaagcggaattggcccaatctcagacttgtcatatttaaagattcctattattcaaccccaacctcatgttggaaagttcatggctgataatcctcgtaacaacatcaacatagtaatgcctttcacactctactcctcgtacttacaaatagttggaatcaccccagatttctaccttgaaaccgcttctttcatggccccatttacttcaccatttgctgccaaacccagtagcctcacaggaaacctaacttcttcatccattgatttaagtgtggcaactatatgcaccaaagtccccggaccttcttctcatggaacactctctttgtcttcggcagtggatgtcaaagccatccctaacattcgttttaattacttttctaatccgacagaccttgctcgatgtgttaaggccatgaggaaagttggcaatttgttgaagactaagtccttggctaagtttaagtttgataaaaatattgatgatgtgttagggtttaagtttttcggtccttctttgccaatggattactcattaagtagtaatgattcgtcgttgaaagatctttgtcggagtacggtgacaacatggtggcattaccacggcggatgcctaccaggcaaggtggttgatggtgattttcgtgttattgggattaaagggcttcgagttgtggatgcatctgttcttagtagctcaccgggtaccaatcctcaagccacaattatgatgttaggccggtaagttgaatgaatttatatatttaagtattaagaagcattattggtgttttttttaagtatagcgtaatggtattacaattaactaataatttaagggtcttaagttcgagtacactgcctccatcactactaagctagtgttagtagctaataacttaacatttactacttgtgtaattttgtatcagatttcatacatggtatttaagtttgaccttggatataagtgggtcaaacttgaatttagggccctcaattaaaaatgctttatttattttctaaaatgtcattatttgatgcgaaaattacacattttataagtttttatataatgtgtgtaaaaatatgattttttttaaaaaatatacatatatttaatggaaagaattaaagaaaattaaaaaaaaatgagaaattgtataaatttaccctagggaggtaaatggttactttccatattttttaattttctttcttttctttcttttttttcttttttgtaaattttatttataatatatatttaaaaaactcatattttgtaaacttttgtcaaaaaagaaccataaaaaatgaaaatttccctgatttaatttgctacatatacgaaaatgctttaaattaattttgaagtataccacttataacttcttttaataatacaatattttgcattggatctcttaatctttttcattaaaaatatgtaaggtataattaatacataggatataaagttgctcttgtgacatttgttaatgtctctacatatgatagtatgttgtttttctcttgacaggtatgtgggacttaggatgcttaaacaaagaaccaaatagaagtattacaatgtatttcaaataccttttcataatttttaaattatgataaagtgtaatcaagtaatctttatatatttcaaataccttttcattatgtttaaattatgataaagtgtaatcaagtaatgtttgtatatgtatgattatcctgtaatgatcaaactaagttatttaattttttttttaaa

SEQ ID NO: 184547 - DNA, 1106 bp, Cannabis indica
ataggggaacaactttaatctcagggcatcctccgtaaaaggcaatttgaaagaatcactcacctccataaatagatgccgagattggttcaagttttgtgctcagcctgatgctgcaattgttcccatggttatggagttttatgaaaatgttatcaaccatgttaaccatgaagtgaaaatctgaggtagaaaggtatctttatcatgtcaggaaatcaataagctctatggccttaaagacatcgaggatgatgagtatggcaaaatagttcaagaagctgattatgatctaatcattaaaagactttgcaaattgggctctcaatgggtttgaattgaagatggagaatgaaggcactttcattagaatgagatggagtatgatggtcgtgtttggctctggtttattggagctaagttacttgcaatggaacactttttgactgttgacaccaccatggccaaactcctatatgccatccttcagaagaagtccattgatgtgagcagtgtcatccagcactcgattatggattatattcaaaatatgaggaagggattttctcatccgaatctaattacaacgttgtgtgctaaagttggggtgcaatactctatttcagatcaaagtctgcaacctcagcacatttttgacagaaacgatgtggcccgatttatggatcctaaaacaaaaaagatattagcatccgaatctagggaagagccactagaggaaaaggagcccagccaaatgactatgccacagtgccttgagaaaatagagaataagttggcctctattactgaatacatgaggcaacactgataacagatgcaagactgggcaatgtaccagtattcatgtggttggatgaatgccatgaacttcggagtcaacatgtctacttatctccaccacaatggatgcagcagtacaacccgtatgcagctcaggagtctaatgaggatgcagcacatgacatgggagatgagcatggagatgacatggagtgttgaaagcgtagttcagaaagtttttctttactttttttatttattttatttcaataagttccattagggacaatgtcatgtttaagtgt

SEQ ID NO: 184548 - DNA, 1442 bp, Cannabis indica
tttttttttttttggtaaaaagataattttgtaattttaataaaagtgtcaaataaatataataaataaggtggtgaatggtgactctataggaattgtaacacacaacatatagattttaatagaataatattatggtccattaattaataaaataaccaatatcgaatctatgaacaatatttgtcaccatttcttttaacagaatctacaatttggagttttttttagttaattaatctaatatcaaacaatattatcttttgtaaaagatgtaaactttagaacctttgaaaaatcatcctaaacaacatatctacatatcatggatccttctctttttatttatttatttgattttcaaattattgttgattctaattctatatttttggattattatgtaactttactctattgtaatttgtttattattctaattttttaattattttctgtattctataaatcaatataaaattatatcacttagggtgcatttggtacttcttattacacatatttatcgagtttttcaacaaccgaatatttttaaagcttaagaaagtaatgatggcacatgtaatgaaataacaaacaagaaatttttacgtggttcagacgttaactatccttagtctacaagtccattttattaggctcgtcgaccggtgattgtttatacaaatacgaatacaataaacttttactcattttcaccgtgttcctcttgaaaacaaaagaagcttagtaggaatattctagagttaatagcagggttacaaatatatttttgcttgatgtgatgaagaatcaattccctctgaaggtgaagatcctaaaggaaaagtcttaaaagaaaagtccccttctctatgtgcttcaccggggtatatatatgtcaatcctcatgcatgcactgccttagatagatctcagtggggacaaaattcgaccgttagattggtaggtggtatacttcttcatatagcatttaagggtgtcagatcgtactaattagacaggttgggccttggacacgtgtcacttcgggacttctcttatttgaatccccttgtccctggctgttgaattatttagctcagtacacaaaaaccatgccttgcacgatagtatgttgtgggagataacctctaaccttgtgcataaaataacgtactaaacgatcacttagttctcaattttaaccagaacactcctaactatattaattttcaaaatacaattttgtattttattaatataaattgatgaattcaacaaagtatttaataaatcacaagagaattcgattgtgtatatgtttcacatttgaaatatatgccatatatattaagttataaaagaatgtaatataaattgtgtatatataaataaaagagaaaatgctaaaacggcgtagtcaaaacaaccaaaaaaaa

SEQ ID NO: 184549 - DNA, 4253 bp, Cannabis indica
aagtgttcaattggtgaatgatgtaggaggtaagactcttaattttaatgattttgatattctgcatttacagcatgggtgtgataaaagtgacattgttactgagagttcaactaatgataattgtaatatcttaaggtggaatgttagaggccttaatagtaataaaaagcaagaggctatgattaatgtgtgtagaataaggagaattgggtttggtgctttgcttgaaactaagatgaggggtaggtaataaaatgattgatgcaattttagctaatttccatggctagaactttcattctagtccgattgttgaagatagaagtctgcttatatggaggaataagtttgttagagtctctgtgttagaagaaacaaatcagtatgttcatttccttgttaagatggcttgttatacgagtgagttttgtgctacttttgtttatggctcaaataccttagaagagagaaagttgctttagattggcttgtctaagcttcagtttccagataattcgtggtttataatggggaactttaatgcagtatttgaatatggtgacaaatgtagggctaatcagatcactagagctgaaatagaagacgcgaacaattgctggctttagggttggctggcagattgcacagatccatatcacattttacttaatctaataatcaagatactaaggaccgaatatactcgagaattgagcatgtgctcaaaaataaagagtggttaaatatgtttcctaattcttctactaatatgaattgaaagactgtgtctaattattgttcttgtgtggtcttttcatctgtagtctaagatatttgtttcaaacctttcagattttttaatttctggactgaacacaaagatttcaaaaaaatggtgatggagagttggagcaagctagggcatgggtgtacttcgtaaatgtttggttgttgcccacattgcatgtatcttctgtggattgatgtttggtggtgtttgctattatgaccaagctagattgtgacattggccgcctcatatatagaaatttcaagttcatttctcaaatgtgaaccgcaagtagaatggcacatggtgctctaattatagccttgcgctgtcaacgtggcacacagtctatggatggggatatcattacaatcaacaaaaatgatttcgcgaaaatatttctatgatttcccccagccatccctcactcctccaaaagagactcgcaagcttcataacgagaatgacccaactgagggtgaagaaggtaaagatgaggaagatgttgtatctgaaccaagtgaattgcaccctctaccattgcaaattgaggcgtccatcgatgtgcatactcatgccactcatgaccggttggattatttgattcggcaaaatcaatacataatccagtcgcagcacgcttaaggttacgtaatatgtatgtatatactatactagtgtataaccattcagtggcggacttagaatataattttagggtgggctaactaaaatttatactgaaaatttaaaataataatttttaaaaacaatatatattatatttttttacttaaatctcagataaaattattatatagattggaacaaattttagcatttaaataattatatgacatttgataattcttgtgttttgtttttttatgtgggaatttgtattaattaattatagattaaatataatttattaaaataataagtttttttccaaaaaaaagttatttgtacttcaaatactctatgtttagggtcgaccctaagtaataatgggctttaaacaaaatttaagtacgtgttttatctaaagtaaaatgtaagtattattggacctcttttacacaaaattttcaaaaaatgctatttttttttcaatataaaaaaatatgttatataaaaaatttggacactgggttaaagtgggccctaagcacaggcttagtccgccttagcccggatcgggcctgcctatgttattactttgtagatttttttctaaaagagtagattatatatatatatatatataaataaataaaaaagaagatagagctaagtggaaaatcagattcaaaatcaagtctaccaagtatcgaaaaaacacctacacaaaccattattttataaaaatttatgccttatataccttaaatttataaatatttttttaatttagatatttttaaggatatatatatatatgatatgtatggacaatagtagataataattagtaccgaatgtatggattgagtatgcagtatgaactttaaatttttagtcacaatttattttgacacaagtttgacgaatgatttttttagttttgtattattagatttacgcttctactttgaatttcaaatgtttttctttttctataaagaatttgggtgataaaaaaacaaaataaattaaataacaaaaataaaatgttgaccaagagttgatcgggtcaacacgttgatcctaccaacccagtcaacctgaacccgcaaatcgtaaaccattttacaaatcgggtccatgaacaattttttaaacgcaaaactcgcgaacttaaaatttgattaacccgcctgatgttcaactctattagctataaggtagaagaaggaaaaaaatggaaaaatattgatttgagaacatacctcgaataaaaacgaatttagaaaaaaacaaatatttctaaattaatgtattaacgtagttaattcatttcatatttttagtacacatttcaattttacttttaacatacttaaaatggaatttttttttctctaaaaagtaatttttttttttttttttttagaacagtggtgtaaattgaaaaggcattttgattaactcaacggtaagatgaacaaaaaaaaaagtgtgattataatatcgaatagcagaaatagttgtttttttttcctgaactgttatctttgtataattttggtcctcaaattttgttgtgggcaacacttgcccaaactatagcaaatgtggttacatgcatagtcttttcttttaattgaaaaggattacatgcatagttatgatttatttaactatctgaactggctaaaatagaaattattatcactgaatatgtaaacattagctctaaatatacaaatacatattttcttaatttgaagtgtacgtatttctatatggactttcaaatcacacaatattagtctatcatatttgttacatagcacctacttaaaaaataaacaatatgcaacaaaaatagaaaattaaagttcaaaattctactagattaatagttaggtagggaaagaactttttgtcctagtaatacaaatataatttgaacaactacttaatccttaaggcataagtataaagataattcttttatgagtttttgtggcacaaaagaaaagagttgggcggccaaaaaaagagaaccaaatgttgaaagaaaagagtgatctttcatctcatcttatttgagagatgcaactttaacttctactgctaataactactgtacttgattgatttgggtcaaagaataagaaggataaatactcttcaagacgtttctgccaagttaaagctaatacaacaaccttttcaaaaaaaagctaatacaacaagaagcaagcatagcatctgtgctgatcatgaaagttcaatccccaaggattgcattcatgaataacaagtttcaagactccttaaccatcttagtcagactagaataaaatgtacatgagcaattatgataagactttttaaggtaagttatgttacaaatgaatcatatggagagataatttattcaaatgtgcccatttcccctttcatatatatatatctttttatcttctgttctttttgatgggaggatcaaattgaatcagatgagagccaagggtttggtgctacataagtataaccttggaaatactcacctgtagttggtgtggatgctggtgaatcaacaagaggcattactgtccagcacttgtcaaagttggctatacaatctttcccattcacctctggcttgaactttggtgtgatttccctggcttccaatttcttccagttaatggttcgaaaccatttatgagctttgatctcgtcccctccgctaagtccactgcctaaccttcttgatggttccttttgcagtaactgaagcaataaagagagtgagtagagtactcatccacaagttggaagtttt

SEQ ID NO: 184550 - DNA, 3848 bp, Cannabis indica
aaaacaattttcagaagtcaacaaggatgcttcattttttttttttgggaaagaaccctaaattttcaataagaataagaggccccatgtaaataaattcctaatataaacaaaagtaggaaataaaactttaccaatcgggtgagtacaaaagtctaccatagcattagaggagagcttttattttcaatttaattgaaatccataaatgatacataatgcatgttttggtttctaaattctatcaacttcagaaaactatgaagttaaatatctttacacaccactaattttaaataatcttttaacacacctgagtcttggcgctgatccatgagtctccccatatatagatcccatggttgcgaacaagcaccgctgttgttttcgggtaggcttcaatctataggacagatcaagataacaagaaaaagtatttcactaatgacaaagtaaaagggtaagaagtagtcagctaaatgaaaatcagctctcaaacaaattcatatagtggaggaaagccaagtcagtccttttggtaggtggaaacatgccctactgggaagtgaacatgcaggctataaagatttgaaatagctcatcaagattaatgtatgagataataaagatcaaattataaactagaaatatcaccatagctaattaaacaatatagaaacacaggccaccaaatgtctatgccaatcataaatttattagattataagttcccattgctatacatacagctttggcaagagattctgtgagctcatattcgtaggcagtgttctctataatgggtaccacaagttcatcattatacccatgcccttttattcctttgatcatctccatatgactgatctgcggtttttttaataaaaaaagaggagaaacatttcaatatatatgtagtaggcataaccacaaaccaattataatatgaaagattattacatgtcatataaaaggtggggtgttttgttagcttgtggtagctatcaggtactaatgacttcatttttttttctcttaacttggaaagggaaaaaagaacataaaagaggagatttataaaggaggggaccctgtgctatcacttggaatgatgaaattatgttcctttagcatagtataaagcttaagcccatgttcaataaaaaaaatctatcagctcttccatgtattccaatggccattaaagatctagagccaaccctttcaaaaaaattaaaaaaaactgtaattgagtatgattacagcttatttttcttaaaccttagcgattataaatgtgttcggacaacattcatatactaagtttacaatatattgccatctggttatattttgagacattccatatggtctttttatttcacatttgcaaagaccataatgagatgaacaggaagaaagggcatatgcataatttatgccattgtcaactttcagttcctaatactggctaccaacctgttataattatattttccctcttcaggtaatgtatttacgcaacctacttgtacctatttcctatcagtcactatgctactagttaccaaaatggatgttgaattttaaagaacatttggtggggaaaaagggcacccacaaactcttccaagaaagaaaaatatactgaagaatcagaagtatctctacatttgccttctgtgcacattaaggactgtttttttaactgaaagatatcaactacaaaaaaaataaaaaacatactctaaattcatttgcttgtggattgatcattgtgactaaacaagattccatcccatgactatgaataacagctccagcatcacgcatttcatatgcctgtaaatataaggaaatacatttcgcataaacaagaaaaaacaaaacaaaataaaacatagagaccagaaagagatagaccttcataaattaaatcataaataatggttctagaaaaattcataacatagccgctaacgaaacgaaccaacaagaataaatcagattggacaaacaaggcacacgtgagaccagaaaaaaaaatgggagtttaatgatgagaagattatagtaactgacaaacgattttcctctccatactgaaaattatagtgtgtataattcaagaaataaggtaggtttacatcctaaactttttaacacacaaatgaacaaagcaaaaacaaaagggaatcaaagtaacaactagaaatcctattcaaataaaaaaatagacacaactagaatccttatttgaattcatgttagaaacaatgttgtccagcatgagcataggctgcattgtacctcgtacttgagattccttgatctctttccccgcaatatcaatcgcctcttggctttctgatggcgatcgaacagtcattagcagtaaactttctaggactccttaatttctctccaaccaaaattaggaattatttgaataatattttcattactgagaatgaactacaatactatctacttcaagctataataaggtaatggactttggttttgataattcttttaaaccttaaaccgtaatagtatccactttgcagcattctttctcgcattgcaagagagaataaagtgaaaaagtaaataaataatttatgacaagaaagcaccataactaattgaattaataatgagttcagagcagtgtttccattgtgcagaagaaagcactccctctacacctgcaaacaatcttaaaactcaaaatggcaccaacagaggctttacattatggctacataatcacttatgagcgaaatattgaatcacatcgggctcttattcttaagattaatttaataagcaagagtaacactcactgttaatcaatggttattatgaagataagtttatccaaagataatagctctcacaacaaactataagaatgagtacatagtgatttaccaaaatcaaacaacacactatactacctattgggcataagaataataagctggtaccttcataaaaagcggaccacaatcagaacatttgggaggcttatgtgggtatggcttgggagatggagcagacaacacagatccattgggagatattatatacatgtcttcaggtaccattctttccttctgaacacctacactcgtcagaaagtacaaacaactgcgagatttataacttttccatgtagtcaaacgaaattcctatctgagcattaaatgcaaaccaagctaaaatactacagtttcaaaaactcaatccggtgcacagagcaaagcgcaaacaacaaactccacaaaccaaacagcttagttatgcattcgcaagctaaaataatcccccaacatactcaatatattagagctcacataacagagtatcaaacccataactaagaaaacaaacacgcatgaaaccaaagttcaaccacaattgaataaaaaatcacatatcattgagcctggtaaaacaaaaatccataaatcgaaggggaaaggaaagtaccggaaggagacatgacgattagctgttggggcttaggaatggaatcatcgtggaccttgattgtgatgcttccaccagtccctgagacccatccgagagtgtagaaatggcggcacaggtcggataacagaaccctggtgtcattcactgccttgctctccatgtacgcctgcgatgtcgtccccagcttcactccgtttacggccgccgccatgtttgtctatggagataaagactagtttttagagggagaataactgaagaaggctagcttgagagaatggttgaaattttgtgtaagattttggagcaaggaagatgtgatgcggttactctccggtgactgaaag

SEQ ID NO: 184551 - DNA, 6872 bp, Cannabis indica
gcacatcattctgttcgtgcggtctcatggattatttggtatgtctgcacaaatcgatcgttaacaaactttatttagttattactattatcattattattcttcagtgtggtgttttcaaagagaactgtcaatgagtgattgcttctacttttgctttatgttctacttaaaaaaaagacttgaatttgttttgtagttaaagcaaaaaaacgaaagcatggaggttgataaagagagagttggagctgcaggaagggatagggatagcgttcgtgctgcaatcttggaggaggctgttattgtatgcaactttaacttaactaagattcaattgtaaaggttttctctctgaccatgttcttcattcacaggttttctccacgttaagtttcagcggttcagctcttttcagtaaatggaatcgcggtttcgatgttgttataatagatgaagctgcccaagctgtaagccctgtaatattttctagtttaagtgttagtcatcagactaatctcacttaccgtctatatgttttgtttgaacaggtagagccagctattcttgttccattggccaatggatgcaaacaagtatttctggtaaatttccggtgctactcttttattgtaacttttgttaacatgttggtttcgtaccaaggaactttatctcttatctcacttctcacattctgtttttccccatcggaatgtaaaggttggtgatccagttcaattgccagctactgtaatttctccaattgccggaaattatgggtaaaactcatatactatcttgtatctttattattttttgaaaaatgctgaagcataatttctttcttgattacctcattgaagatatggtatgagtatgttcgagcgatttcagaaggctggctatccagttaccatgctcaaaacacagtaccgaatgcatccagaggttggtaacattcagttaaaacatatatgaatttttgagataatggaactggagaccaatatctcactgatccacatgactgaatttctaaacaagtttagaaaaaaaaaagttttttgctcctcaaacttttttaagctgttagaaatttttccgaaattattgaaattgttagattgaaaaactttcaacgaattccgttcaattttactaacaaacgtctaatagagctattgtccatataccaaatcgtgttttctgaacttctatccatgtcaggcgctcgttagtaaaattgaatgaaagttcttgaacccaataatctcagtaatttggggaactttttatagcctgaaaagttcagagcgctcaatttgatatgtatcgaaatttgggggaatgctaattagcctgaaaaaaaaaatgtactgctggatgtcactgaaagcaagtttttgtgttgatatagtattgataaagcttcattttatgagtatatgattaatgattatattgttgtgattgttaaaccagataaggagctttccttcaggggagttttacgcagagtcattggaggatggtcctaatgttaaagatcaaacaaagcgcttgtggcatgattatcgatgttttggaccattttgcttctttgacttgcacgaagggaaagaatctaaacccgcaggaagtggatcttggataaataacgacgaggttgaatttgtgttcctcttgtttcagaaattaattagtgcacaccctgagctcaaatcaagtcagcagtttgcaattatatccccatacagtgcacaagtaaatctcttgaaagaacgttttaagaatacttttggagttgaatcagagaaagtagtggatattactactgttgacggttgccaggtagaactcgaatatattattttgtaagatatggaacctttgcaagattatggaaacatatttttgttcctgtttcagggtcgtgagaaggatgttgcgatattttcttgtgttagggcgagtgagaaaaatggcattggatttgttgctgattttcggagaatgaatgtgggcataactagagcaaagtcttctgtcttggtaagccattatatcagacctgaatgtatcacctaccctcctatgcaagactaacgtctagtattcgatcaggtggttggatcggcatcaacactaaaaagaggcgatgagcattggaataacttagtgcaaagtgcagaaaagagggactgcatgtttaaggtaaacattgtctctcccgggtattcatttttcatattaccaatcgagacttgtgaatttttcttgatgaagaacaatttttcacattcccaccttaactaacactatactagccttgacaacttttgctccttcatgcaaaatttccttcatttcctacatacactgcattctgtacccctccttttcataaccacgaatcgcagttctttttttcccagcaatttcacaattatgaaatcccgaaagctgactcgcccctctggtgcagtcatcgaaaccatatgcttcgtttcttcacctagtgttcattattcatatttcaccaaagcactagctaaaaagaaaaggacaatgtcaccacttcttgatcttaatttggtaatttttcttgattaaaaacagtttttcactttctacattagtgtcaaaaccctttaaaagacaaaatttcatggaaaatgtccttttcgactttacacacacttcattctcgtttaacatagataaagctattcgaaaattataatagctgactcgtcgtccccgacacaggtatcgaagccgtacgcttcatttttcagcgaagagaatctaaaatcaatggcagtaaaagaaggagcactagcaacaactcatgatgatgaagatgagaacattgtaggaggtggtgcatacaatccaggggaaggtgatgatcatgctcaacctgaagataataatgattatggagatggtgatatggacattgatgatgcaggtggaatggatgatgattgattcactctatccaaactccaaacacatgtaaatttatatctctatattttttatttagtatattattcaattgggggtgtctacaatactgccttaaaatgagaaaaagaggtgtaatggagtatcctcgtgttttttataattgaatagtcataattaagaataattgcaataagttgtatttttgtaacttttatagtagtgaatattcatgttttatttttttatggtatatttaaatgaatttataaataaaaaataaaattttaataacttggaccaaccaggaacgtccatgtggtcattgacttgatactttctaaaaatataatttagatattattatcttaaaaattaagcttagatatttatttgtaatcggaagttaagtttaattatttacaccgcaaattactttataatttatatgttatttgtaatcggaagttaagctagatatttttcatatattatttggtattgtattgtatgatttttttataaaaaattacgtttttgaaatcaaaatttaagtaatttatttcacacgttataattatacacaaattacttagagcactctcatcagcttttctatttcatttttcgcacatttatttctaaaaatactctaataatataacattttcaataatattataattatgatctcacacattattatatacataaatcttttttaattaaactactatatatattgcacctttaattttttattttaaaaaaaaaacataacatcaatgtcattgtgtggtatcaatacaaattttaagaataacattcttttatctccaatagtataacatccctataatttgtcacctaaattttaagaataacattcttttatctccaatgatataacattttctatctcattttttcttcaataaaatttcacttcagttatattaaaaaaaattaatttacagtataaatatttaactttaagttccgattacaaataaatacttaaatttaatttttaataataataataattaacttatattttcattaaaaattaaattttaatattttttttttttgcaaacaataattaaatttaggtattatgatgtaaattactttttaatataaataagattttagtttgtttggcatttatttaatctcatccatccaaacactctctccaaaacccaactcagctcacccaacccaacaatggcgaccatggcctcaccttccacttctctaatggcttcttcctcctcccgacctctcttcacttccaccaaacctttcctctccctccaattcctatccctgaacaaattccccctcacgcgccgcccccaaatctcactgtccttccccaatcgcaaaaccctaactccaatcgccgcagcttcaaccgctcctccttctcctcctccgatcgagtctcaactcgccgggtcaactcggactctcacaacgctctgtgccctaatcttcgcaataacacgtaagctctccgttccaattctcaatctcaattcccaaactcatctccgccttgtttccgccgccggacccttgtttttcgcggcgctccgagaccggcccagcggctacctcaacacgccgctgactgtggtcgccgcggggctatcgaagtggctcgatatatacagtggggttttgatggttagggttttgctgagttggtttccgaacattccttgggatcgtcaaccgctttccgccattagagatctttgtgatccttacttgaatctctttcgcaatattattccgccggtttttgatacgttggatgttagtcctctcttggctttcgccgttctcggaaccctaggctcgattctcagtagcagtaccggaatttagaacggagaaagattggatttttaatcgccggccatagtaaggtgttaatttttattaatttcttttttttcaatgaatattttataattatatataaaaattttgacttggaaattatattgaatttcttctaagggatttttaatgttttagtggttgaatagctataaatatatagaatataatttgcaaagtttgagttttttaatgtttatgttatggatatgattcaattaaggtttgtttttgaatgttttgtatttattatataattatcttagggtagaagaaactagcattattgccatttggtaccaattgtgtctagaatcaactagtggtatttttcgattggttagtgatattgattcagatacttaattgaccattattgggcacgagtagtatttatcatcttctttgagattaatcagctatattaacacatttaacacataacaggctgaactttttttgttaatacactaatagcgaatgagttgaattatgttttaagtttataatttgttttatttacattgaaatacattttgtttgcatatagaaatttgaataagttaatcacatatttagttatcacatttgtattttaattcaactatttcatatttattttttaataataaattgtttatttgtggtaaagttgttttaaaacctctataaaatttaggtagcacatgaaacgtgtataaatttgaagatggaggacattttcatcatcccattttggatgtaggactctttctctagaagaaatgactattatgactattccaatgtgtagaagagaaataactattccaatatgtacaagagtaaccaaagaacattttagtaacaatgtatgcacacaaaatatgcactaaaatattacatgtaatattagtttagtgtatcttttatgttcatattctattactcatgaaatcatgtttaaggtgcttgttccacataaattctttgttcatattacttccccaaccgagatttcaaataatatacaaactaaaataagagtatctccatgaaattcaaattggtgatttattgttaaaatgtagtttattttgtaaaaattttgttggaatggtgtgtcaaaagttatttaaattgagatcacaatactaaataatgtaaattttacattacaattagggtggcaattcgtatttgtggttttgaagtttaggtataacaactttaagatgtttacaatcttgttaggagtcatttatgatcaatttaatatgtttatgtcttatttaactcaaaagagcatgtaaaaatatatatatataagggttagtattattttagacttaatattttgtaaaaattattgatgtaaatatatcacaatttttacatttttctttcattgttaaatgtgtgtattataggaatgtcaatggggcgggtcggatttgatccgactctgatccaacctgatccaaatcatgtacggtattatattaacttggtggcttgttggtcctcacatgttttcattaatgaagatgtatggtatttcaaaagcttttaacaaaattccataccaattatttgagaactaaaaaaataattaaattcttaaaatcttttcattgagcaagtttgaccaaacacctaaaatcttactaatgtgccccccaaagttcattaaatcacatgcattgtctcattgtggcacaattttgagctcacaacaaatataagtgaaataaaagatattataagcaaaatgcaagaagaatgacgtaatcctaaccacaaacttgagtagtcctgagattagacggccttaaaaaattattagactctttatttaaaaaatatataatatttttaaaaactactaaaatatatttataattttaaataaaaatattttttttagggtttctgggcttagtgcaccttaggcttaggcttaacatgccttagctcaagcctagggccggccctgaaacaaa

SEQ ID NO: 184552 - DNA, 4511 bp, Cannabis indica
attattgccatctagaaagtcttctatgcaactggcaagaatgacattctcaattggtgctttaaaaagcacataatgattaattgagagcttgagcaaggatagctacctgcgtttttttattgtttgagcactttgcgcagaaacatagattggcttgtgtcaatatggtagccatgtgagcagtgaagagagaagcaagaacggaaagcataaaaaaaaaaagaaggattcaagatcttgtgggctcttgataccacgtaagagtttgaaagtgagagaataacttagaactatgcctcaattctcttgaatgaaaagtgagaacataagctttagttatagagatggaaaaacaagaagttatgcaagaaagattacaccaaacctaaataatcaacaccaatacatggatagctgaattaactaacatgtcttccctattcagcaagaaaaagaatatatatatatatatatatataacatgtctttgtattattatttattaaaacacctgatcaattgaattatattcttgttggaaatatttttcacaagtgaaaattagctgagggttaaaaagaaaaggatgcatgcaaatattttcacttatttatcttaagcatttattttttgaaagggaaaggattccattaaagaaggcaacaaccataaacaaccataccagggccactgaggccaaacgcatggggcagctccagccaccacaccttagcttgttccactgataaagcaagtttagttgagtgagatacggagttgaccagcccaggataatgcctgctaaaataaataacagagatatccaagcaagctttctcgacatcactcaaaactaatacaaaattagtagctacaaacacaagaagcaatagaatagtacacattagaataaagacacagaacagaacagtgagaagtctaggccattttatccatgggttttcattgtatttctcaaaggggaaagtaatagcagaaaaggatagtggtcttttcggaccttgatacagtgagaaatctcaatacatgcatggcgcacactctatcactaccaaccattataaacctttccctactactcataattacaaaaaagcccctcactcaatacaagtcacaacaatccatacaaagtaattcccccctaagtacccttggcccttctagagtatgtgaaatggataggaggcctaacaatgtatatcctagaaaacatcctgcaagttagtattttatagttacttcacaacagaatattagttgaaaacaaaatccatacgctctactaaaaaaattatatgaagctgaggatgggaatggttgaatattttagtcggtatcatgtcaactttcatgcagcttaatcagaaactgtactagaggaagaaagacttcaaaattcacaacagaggaagttcaaaggacttggaaaaggaatccaagagattgaaaacataccatacctaatccaccaagtattgcttgaagtgaaaataaaagaacagagtgcaatcacaaaaggctaaattaatatctttatttcatataaatctaagttattaaaaaaaaaagggagtttagtttaaggaaaatatataaaacaagagttacacatttaaataaatgacacgtgtgaccttcagatggaaatattaaggatcagtacataaacctttcattgcaacaaagagaaccaacgatcctactttctcaggaatgcaactcaaacatggatcaaaataataagttgcatactgcagaaagcttttccatcataaaaagcacccattataggaattctcttgatccaggtttagcgaaaatagtgaattggtaaggcagcggtatcaagttcaaagaagcctctaagcttaccacctctctcttcggtcagacagaatgcaggaacttggtgagagaacttgaaaaaatcagcttggggaatactccacaacgttgatcctcccaccactcgagccttaaatactgaggtaaaaccatcaacacgttccaaagacaaagcgtttattagtaaaacagtagctgacagaacttccactacctcatactcacagtttttcaagtcactgcagtggagattgggattccagttcctgtacaatgcccaaatttcacccttcctaggaaggatgtcatactcatttcttctacctgtaagctctgctttcactggatgtgaaaaagaagttacactatcataaacctcagcctcaacatcgacaaccttaaatctaccgcacgaaagaggcatgtccttatcagaccatctaatgatgttcgatgatgagacagatgcaagccatttaatatgcagtttgaaagatgggcgaaaatcaattttcttgatttgaccataatattttggcaaggaatcctcaacacagtacaatgcccatatctgaccaacctcaaacttgtgtttggctttatcaaaatcgaaattgtagaactcagtatctggaatttccacttgttctaggcttggagcagaaggaatggtagaactgtcatgctgaagcaccgaatgcctcgttcgcaagtcactgccatccactgtcatgggttaattggaggcaaagcagcaggatcaagttcgaacgatcctattggaactcctctttcattacctttcattttataggacggaatcatgtgggaaaacctcaatagctcaactgggggaacaagaaatgtcttctttcccatttccatccgacagaaaatactcacaaacccatttactttgctcaatacatcaacatgtattccaacatctgcagcataatcagacaatacttcaacatattcatattcacactgacgatgagcagctggatcacaactccaactaaagtcccagtttttaaaaagagcccaagtctccccctttcttggatatatcacgaaagtattcatacgactacctttttcacaagaaactaaatgacagaacatacgacaatcatctgttgtcaatgactccccgtacttgaacttaccacaagaaaatggcatccccgaagagtgccattttgattcattctcatcagctggttctggctctaaccaagttaggtggacactgaacttgggagaagatacccttctgatctgagcatagaatcgtggcatagcattaaaaatatcataagcagcccatacctgccctacggcaaaacactctgctttcctctccatttcaaagtcattaaaatctggatcacaatatttatagaattcctcgtatgacatctcctcaaggcttgaatcagtattagcactactttcagaacttttcttcaatccatctacattaactggctctttaggttcttcactcttcctggctctgtgtactaattctgcattcaaatttccagtgccaaagttaggacagacttgtgctttccctttgtgcgtactgcctttttgtgtagggaatacagatttactatttggtgcatttaggtcacatgccaaaaatgacttctggcaactatgacatcgaaaagatttattaataacatctttacagaactggtaccttactgcacaataggggcagacagtccaaaaagtttctcgtggctgctgcttctgagcattcagaccaaaaaggttgcttctactattgtttggaaccacatttgaggtccaattggccttatgattggggacaaaggtcgcaggctttctgctctttaaatacttgcgcctgacattatgcaagagacgttgatctttgtccaaaagtattgaacgagcttctgcaatcagtttaaaagcgatttcagcaccagccaacttgtttctatcaggatgaagttggaggacaaacttccgatattgcttcttaattgttgcctcatctgcagtctcctcgagttgaagaattccataccagtccatctcatcccctgataatttctgtgcagcagagcaatgcacatgacacaccataagcaactgagaaatattctcaacattaggataaagtcgttgggccttcaaagcaatcttttgagccaccacaaactccttactttgcatcttcttctcagcaaccctcatggccctcagggcctcctccaagcgtgaatcaatactagcattaccttcaaagcctttcttcaatccatccattttaactggctctttaagctctttgctcttcttggcattgtctcgattaggtacaccttctttctgtttaacccctttctcatcatctttcatactagaagctacatcagacatcacattagatgtctttgcctttttcaatctttaaaggactcacattcacatagccatcatcatcacgacttaagcttttctgtaagagacctgttgtttatggtcatgaaatctccgtatatttttctctctagaaagtcagtgcccagttcactctgtaagatcatctctctcgtcaatcatcatttgtcatgttcacttcgtccccc

SEQ ID NO: 184553 - DNA, 3081 bp, Cannabis indica
caattttcaatttctatgactgaatttttctgatgattcgtagtcagggtcttgaggtgtcaattaaagacctagatggccttatttctctccttacggataagaagaataaaattgagcaagaagaagctgagactaacatgcatattatgctcagtttcttacattgcttgaggaaacaaaagcttgaacaactcaatcaggtcattattgattttgtgtccttgttgtggtcaagtcttttattttcttatccacttttggttaatcataattatgatattgcatttttatggtgattttctgttgcacaacggccactgagtagatctgagtgactttttctgttttaattaatgtagtcagtttggagattataagggtctttgtttattctgtttgtttttaatagatacactctgatctccattacattaaggaggacatatatgctgtagagaggcgtagagttgatctctacagggaaaaagagagattctctggaaaaatgagaatgcttatggacgaaactatttcagaaaaagcatcctcgtccttaattgacaagcacgggaatggcatcaactatagtgccaattctgctcaagcccttactggttcaggtaagtcacacaggaaaacatctaacgtaaatgttgaagcaaactgccatggactctaccggaaggatgctcaaaatgaagctggcttgcagcctgctactgcaacaggactggctctagagagaaaaaggcacatctattcacaggtatcttgagttcagttcttattactaagccatttagtttcataactatacattatgatatattttagtagcttggttacctgttcgtttgcatggattaacctcaacctgcattgatatgagtaggcttgtggattaacttcaatacttactaatttggctcttatccttttcagctatttctttaatttttattttaaaatattgtgatgctacagtttgatagcttacaagaatgttacttgcaaaaacgacgaaatttgattgaacactcacctaaagtggaagaacagaacccgaatctgatgaggaaggaaggttatagtgcaggccttgaagattttcaatctgttctgtctacttttacacgatacaggtatagacttacacaataggcctcattcatgactttcttatttttgtttccttttttgaattatcatctacaactgtaacttatacctttcggttgcttgagttagtcgattgagagtcattgcagaattaaggcatggtgatcttttccacgctgctaatattgtgtccaggtgattagaaactcgctctttcatcattcttcagatatatgttcaatgtcccaatttcttagacaatctagaaattttgtatcataactcattacttatttgagtccttaggtaatgaacactacaatatgtgttctcttcccagacatgtatcaaaatctttatttatttgttgtttcttacaaatgatgtctgtccataaataaaaatgtgttatgaaattgggtaacttttttattttatctataagaatgaatgttgacaattatctcataatgtttgttgcagtatagaatttaatcaagatgatgaattatttgccacagctggagtttcacggcgcatcaaagtttttgaattttcctcggtaggtggtaaccactatactgcatgatatatagttgaggaaaatgtgattgtcctataattgtgtttatgcatcttgtagtaagctaagttgtaaagaatatatacttatgtcctttcagaaaaaattaaaaataatatacatttgtttagattacccacccaaaatgactcccaaagtccgtatttatcctataaaaattgaattctctatcataaaagagaacatgagcacttaacatagttatgcatgcacagtattcataatgatacttctaaaatgatatccattgagatactttttcaggtggttaatgaaccaaatgatatccattatcctattgttgatatgcccacgcgatgtaagcttatttgcttgagctggaataagcacacaaaaaaccagattgcaagcagtgactacgaaggaattgtaacagtttgggatgtaactactggccaggtgttactctcttcacatttcctcccacttccatgttcactttgtcatgcacttatgctgtcatgatttgctgcaggccaatcaaatattgtcagagttctttcctttaaccatagtctttcttcttgcagagtgtgatggagtatgaggagcatgaaaagcgagcttggagtgtagatttttcactttctgaaccctcaatgcttgtatccggcggtgatgactgtaaggtacctagaactagagtaggtcttatgtatgctatctattggacgttatgttatgtccaacatattgtgattgatgcaatttagtattgtgttgaaacttgaagaacctaatagttaattacactaatgatggtatatactttgaacaccataggatatgccttataacaacaccctttgtttagtcagttgtgcctgaattatgtgcttactgaagagtgatggtaatcgatatttgataagttatagcttataggcaatgatggaaatgtcactagtccattcttataaattttacaagtatgtgtctataaaatgatttattttaaaataaatatttaaaatgtagaaacgtattcaataatgaacgagatagttagaaaggaaaaaaaaaaggggtactaaattaagaaatcatcccaactataattactcataaaaaattgaaaatgtatgaatataattttaatttcaaagttcttgtcttacttgaagatttctcagcatgtatttgatatgaacaggtgaaagtttggtgcactaataaagaatcaagtgttcttaacattgacatgaaagcaaaaatttgttctgtcaagtataatcctggatccagcttccacgtagctgtacgtctctgttctaattcttctctctcaataaatgtgcacatattttggcagtgctgatgataccactgatcat

SEQ ID NO: 184554 - DNA, 7435 bp, Cannabis indica
ttatattattgtactgaaaataaagtttaaatggttgctttaccacatgtacatgaaaaaacaaaatatttgaacttcatttcttacattgtataatattcaaaattttataaaacttgtaagtcgttctaaataattttttaggggttagtactatagacttacccttcatttcatatcattttctttctttttcttttcaggagcaatagatgatttggttgtgggggcaattgagttcatggcatcatgaaatggtggattattcttgtgttgttctttagtggttgttttcattcaatatcatattgatgggttattacactttgttatttatatttgtgtgtgtaaaacaaagtataggattaagtgagagtgagaaagtgagggcttgttaagaagcaagataccatgtttttttgagtctcttgcttaattagagagaaattaactataagtctgtctcttataattatcattccatcttaagagccctaatctttatatttaattattacctttctttctttccaagtaacctgattgtgtgagatttcactttggaaagcaataatatatatatattaatgtaaggatcccacatcaaaatgtaaagaaatttgagttgatgatgcatatgatatgtattattaaaaatccaactgtaattaccttgaacctagttttagaaagagaaagctactttatcacacaaaatcaaaaatcaagttgtattttgatatagtgtgaagtgttttatcataaattgatttcatttagtttagttgtttgtagtgagtgcattcataacattccttttgatattatttgttgagtaaactggttgggttagtgtcaaaaaaacaattgtaatgattttttatgtaaaatttatataaaaataattgaagttttaaaaaaatacttattatttcattaattgtaaaataggatgtgaaaaaataaaacccgaatttaaacttatgtaagagagtggatttgcttaagtaaagcacgatataaatcttaacatgacacgacacgagtcatatttcaacactacatcacacacgacccgtaattttgtatgaaacaactcatatttatgtcacgacacgtgtttacaacaacactagttggaatgaaagctagaaaggaacgacaaagaagaaattgtcgttttcatagtcaaaatctattactaatactattgtcaataacgacgtcgttttaatattacgccttatcgttttgagaggttagatccatttgaaacagagatctcagctcagcacacaatagaaaaagagatctttcttcttcatcatcttcagctcacacccaaattgatttgattcgattccaaagagagaaaagttttgaattcaatctcaatggaatcggcagtagaagaagaagaagcttccgtacccatggctgaacagctccaccatacctctctcaaaaacacaaccttgctgtcctctattggtaatggtaatggaaatggactcgatgctactgctaacgatcgcgatcaagatcacgatcaccttgtacagactgtctttgaactaggatttcagaatgaatatctcaagtctcagttccgaggctttgctgaagattctcaatttattacttccgagaacgatggacaagctattgtacagcttcaggaaaccatcgaatctttgaatgcacagctttcggaagagagacttactcgtgtggccgcagaagaggctttgaagcatcttcaagtggctcactcggaggctgatgctaaagccctagaactctctctaaagcttactcaaggtctgattttctttctttctttctttgggttttttgatgtgagagatgctacatttgctctaaatcttaattcaatctgaatctttagcactcttttcgattttttcacagctcaacagaagtttgatcaagaaattaaagaacgtgacgataaatatgctgatcttgactccaaatttaaccgtcttcacaaaagagccaaacagcgtattcaagatgttcaaaaggtaaatcatttttacaaagtttaaacaatttccattagttcacgactgtgactgaagcaaatttttttagagattagaaatttaaagctttcaactttaatcacacttgttgtaactacaatcttgtttgtagagttcatattgggatatttatgcagaatttaaatctgaatgtctttggggattgtaattttcaggaaaaggatgatcttgaagcacggtttcgggaggcaaatgaatcggccgagcgagcattatctcaacaagcgacattgcagcaggatctggagcgtacaagacaacaagcaaatgaagcattgaaagcaatggatgcagataggcaacaattaagaagcacaaacaataagtaagtatctacttaacttcttttcgatgtatgcttaaacacaacgataaagaataagaacaaggagagattgtgtgcgtattttgagggatctgctgtttccatttgcctccactggactatttagattagagcataagaatagtgatcgaatagtgagcatttgaattaaattctataaaagtttcttcatattgtatgtgccacttcacttatctgcactataactatgttgttgacatctagactccgggacaatattgaagaattgcgacattcattacagcctaaagagagtgctattgaggcattgcagcagtcgcttctagagaaggatcaggtatgaaattgaacttttgaaacattttccatggatctaaaggtatcttgcatgatttggtgtatgtgtatctatagtggcgataatcatatatatgatcaatctttgtctattctttgttcaaattccatcttgcctccacgttattaatgtaccagatgtttttctcatcccttccatctatcacatggatggaactttaaactcttagagaaccaaattattcagttttcgttattagaagttttattttcccaatcaatatgtgcaaaatttggccagttcgtttatgccataaaaatttcagcacatcatcatgataaagttgtatattatcagcttgatttttcttgtcagttgacacttttatttaaccatctgctaggcaccaatagagggctcacactatcctagagccgtgaaattcttgtttatattccctttgtgtcttagttcttttactcgtgtagtagtatgttatccatttaagcttaatattatgtatatattaatccacattaatctcagatgttggaagacatgcaaggattgctacaggctgccgaagaaaagcggcaagctgcaatagctgaactcttagctaaacatcagaaggttcaaagatttgaaaaaccagtctattggttattaaacttaaggcatctttattatgcctttttattaatatgaacgataatggtggcatatttttaacttcagaacttggaaagcttggaagcccaacttgctgatgcaatatcagacagaagtaaagcaactgaaaccatttcttctcttcaggtgagaaataggataatgtccatttcatgtcaagttacataaggattttaattttatatttttggaatgagaagctcagttacaagggtggagtacaggttaattcccttattactttaaaaacttatacaataattggatcatgttcaagactagtgaaattattttccttcagatgctggttgcagagaaggaatcaaagattgcagaaatggatgcagcatcaacgggcgaagcagcccgactcagagcttcggtggaaactatcaaaggagaaattgctcacttgaaacatgagcatgtgagtattttatcattcaatattaacatgagcatgaatttatcattcaattatattggggactcaaggatgtgattttatttagtttttattaatttcacttttgtgttcattgctgaactggcatttgattcttcatatcctacttttactcttagtaatttttgttttactgtttaagggttacttgccttttgaactgacttcaggggcatccttgaatcacaaactttggggatgcagttctttctacatttataatattggatcacttcttcttgatgttaatcgagttgttggaaattggtttaagacatttacttttgaagatatgatttgttttagtaaatgagaaggggagaaagtattgttgaactgacctttcaagtcatttaccaattacagagtgagtttgtacttaagcatatttttctttttcaggagaaagaaaaggagagctgggaagctacatctcaggcacttaaaacaagactggaaaattctgagaataactgtatacgtgctgaagttgaattagctaaaatgagaagtatatatttatcccttctttagattttatctactgacatgaatatatgtataatagtatccctgatttttttgatggggcaggccaactggaatcagatttatcctcacaaactcaagcgctcaatgcaaaagatgctgaattagaagctgccaaaaatgaggtatctagaaatgaccctgagtgcttgatataagcaacttcagtgtttacctgagatatttatgcacgaacatcaagaaaatattaataacctgtcaactaataatatttaccgtagcaaagacatcaggatgctctcgcaatctttcctagttaactaatgtattgttcataatttcgcaatattaggtcattgaatctttccttgggaaaatggaaatttggttgccctgaggaatatttgcttttgttcataaatttgactttctaagaacctttcttaatttgcagcttacttacacatataaaagtatataaaactatcttctgattccatcttcttttaatttgtttataccttgcagatcaaacgccttgaagctgacttttcctcttacaaaatccgtgctcatacacttttgcaaaagaaagatgcagagctagccgccggtaaagattccgagcaagtcaaagctcttgaggaagcactgaaagtacatgcttgtactaatttcaatttctgtattttaaatttttaataaaaacaataaacgtgcagctctggctaataatcacatctatgtcattctttaggaggctgaaaaggaagtttcattggtttgtgctgaaagagacagagcccttcaagatcttcaagaagctctggctaatcatgataaagaacttgcagaaaggtagaattgttgctgagaagctgctgaatgggttttttgtttgatccaagtttcctagtttaatgagtttcttaaagaaagcttttgttatgaaattgtatatttttttcaagagtttaatagtctatgaaatgccttcagatattattaactttcatcacttcggtaaagatttattaatattatcctgtgaattatttgcaatcatatccaatttttcaattccattttttttttgtctcagagagtcagctcttattgatgtcaagcagcagataaagagcttagaaacgaagcttgattccgccaatgctcgcaatcaatccgacagagaggcatgggaaaggaacctccgtgacttggaagaaatgtggcaatgtatatatttatatcctaatccaaatgattttttttaaaaggatggggcaattgcatgtagctcaaaattgactgaaaatcatacatgataaataactttgcagcaagatttgatgcgttgaaagttcaaaatgaagcatcttccggagaagatctagaaaaggaattaggagatctcaagctgcggtataaaaaactaaaggtacttcacatccttctgtcaatggctttgacatcaacaatgacttcctattctctcattaactgaattcttaaactgtaggaagaacaccattcatttcgtgatcttgctgataaaatgattgaggaaaaggataatgaaatctctagactcacagatgataacaagaatcttcagcgatctctggaatcaagaccaaaagtactcctttaagaatattcatctaacctctattgattatagtttttctttttctttttttcatttctcggtctcttctaatgttttaaccttctgattatgtactggggaaacaggttgacaactacaactcaggtaggaagacagtctcagttgtatttatcttcttttcgtttacttgtcttgtaggaagtcctatcctatacattgaattattggatgtagcatgtcatttctaattttgtattattacaaaattgtgttgtcaggcttgcagaaagaggatgcatctaataatgcagcagaacagcagattttggtatgaatgtattttcgtatgcttttgttataaaaaaataactatatttgctattgaattttgttttctttacatcctttccaagatttaactcccaaatcattaagtgcattccgggacatcaatttttcctttaaaatacagattttggcgaggcaacaagcccaaagagaagaagagcttgcacagtctcagagacacattctggcacttcaagtatgtatcataatttacacacgtttagtttttttgcagtgcagttctaatttatgtcataactcaggaagaaattgaagaactggaacgtgagaatcgcctccatagccaacaggtacttatcagaaagcctggatcggtgtagatttcttcttttaatacttctttttgttatttcccctgctatgttggttttaatttatttttgttattttaatacacaacaactacaggaagccatgttgaaggctgagcttcgcaacatggaccgaacacagaagagggaaggggtggatttgacatatttgaaaaatgtcatcctaaagcttcttgaaacaggtatttgggtgaatgattgatgtatgaatctaaaaattaaaccgttttatacccactcattttcttcctaacagtgtgctcaactaaaagaatatttcattattttgagattgaaaaggcttattatagtctctattgtaaaaacacaggtgaagtggaggctcttctgccagtgattggaatgcttcttcaatttagtcctgaagaggtgatatactatacttattgcattggtatcttataataacatgctgttgttttaagcgtggaatttatttagtatgggattagtcaaaattgtgagtttttgttatttggaaggaaaatccgttgatcacagggggtgtagtagtaaggttcttctttctagagaatgaaaaatatcatacttcttttttaaactataagatatcatatgggaaattacaatagcatgagcaacatttgagtcaatgtgaaatacaattatacaataggttttaataacccaatattatccatgtcctgaattactac

SEQ ID NO: 184555 - DNA, 5026 bp, Cannabis indica
ataataataataaaataaataatcaatattgtcttttataaagattccaggtgaaatgaagacgaatttagtctgttaattgagcaggtataaaataaataatattgggttgtttgcttcagtcacaatcatggcattttatggggaaattctcctatttatatagatccaataaaatcacttaattctataagggtattgtaagttgtaacaccaacagtccattttgtactcgtaataataataataataataataataataataataataataataataaagctgacactatatatatagtttatgcaaaaacataataatgatttttttgcttaggtaatataagttaacaaagaatagaccaagtactgtctaatactccataatatcatatagttataatattttagttatagtggtgttaccaacccagaattagtcaaactaaacaagggttaatatatatgtctattaatatatattatgtgcatatttaaaaataaataaataaataaataaataaatgagtggtcatttttatttgtacattaatgttaataatatttgacattaaaaattatttgaaaatcttgagaaaacactatcaaagatgagcttttacagctagctagatcaaaagcttattttctgcgtttgattattacgtttggttgtttttatttgatattttttatttttgaaatttagtggcgcgcagatatagatgtttgacttttagttatatattaatttgtttttattttcatttctgtaatatataataaggataattttatatggtgcatctttttgttttatttcaaggatgaatatgcatgaagtgattgagagtgtttttataattatggtttggagaaatgatgaattatttatatatattttgttttgaaaaggaattcatttaaaggcaacaaacagtagagggaagatcatttcacatattagcagatgcttaaatattaaaagttatcttattattagctaaacaatgagccatgagaaggttaattgttagaatttgggattaggtggatagggtttcatctcaaaaccaattgacaatgggaagagtagttcatttcttttatatattctattatctttctacacattgacaatgttgggactctctaacaaaactcaacaattaattacaatattaacctaaagtagaaatatcaacaaaaaaaatgttatccacattgcgcacgcctcttttcttgttgtttagcacaatgataatcagactcgaccctgttatttaagaccttaagtaaaaataaaaattctgatttaaactcaatctctaattaggttattactacaagacttaacattgaatcagtggtgtctgacagtcttctatgtgttaatatcgctattggtctaatttagtatcaggtctcatatagtttaatataataacttgtaaagtattgctaatcaattaaaaaacgatatatttagaggcgctaagcaccactaatgcccaataacaatgctcatttagcaatatgggtattatttttttattactaactgtgctttaattttctttttctaaaatggggatactgggcggtgggggcctaatgcggccgcctcactcgtctaatctcaaagtcggccttggtgataacatgtaagcaatctgaaagccacgaccatattagacaaacaagcatcaacttccaacttgaatccatacttaatagcccaaagctcagcagtaaacgaaccaaaaggcctttgctaatcaccacccctacactacaactgcctgaggcactatcaacaccaacatccacgataaccttacaaatactatcaggtggaggttaatcactaccttcatcttctcacctaagcattcgagcccctaaaaatccttaatcaatgaagcacaccactccacagtgcagctatagagtttgaataataaccctcattaatccaataatttctctctcaccaaatttgctaagagatggcaacaaagagagcaaactcatatttggaaagaaaatttatacagctttccaagaacttacttggattagttgtggaattctctttgatagtcctctgatgaccacttctcttccaaaacaaaacaaaacataatttgtgggtaggggctaaattttcataaaaagtgtttaatattttgggaactctcaacttccatgtatggttccatatatgttagagtgttttaaaatgttataagaaaattgtaagagaaaccaaaaaactctataagtacaaataaaatttagaactacttaaattaagaaaagataattctaaaattctttagagaataatagaaacttgtaaagaacttagaaatattagaaaattctagaaaacttgagatgtttcccttgtatcctataaatagaagggtattgtgtgccaaagtgcaagttggagcaagagagttaactagtgtgagaaaaagagttcaaagtgtgtgaatgtgtaagagtgttctagagttattgtgtttagagtgttctaagtttgtattagtattttcaataataataaaagtgttgtaatttttttactcaacaagtggtatcagagcgaggtttgtcaagctcgtggtggtaaaagagcttttcggtgtcatacacaatttaagtttgtgaagcttacaagtcatgttaagcttgtttggtaatttatttgccaatgatgagtgatgctcaaataattggctgtattaagaagctcaacaattagaattataacacttaatcaacgacaatggagtcatacctacaagggcaagatttgtgggaggttgtcaatagtagtgacataaacccacctaaagatactgcaactttgaagaaatagaagattaaagttagaaaggcattatttacaattaagactattgaagagaaaatgttaaaacacatcaagaaaattgaatcaccaaaagaggcttgggacactttcgtcacactcttctgaaagcttacagagatgaggagaatggactattgagagtgtgtgtggggtctctctcatttcgtataattggccttatttgcaatttgtgacacttttacacttccaaatatatataatatatatatatgttttcctctccatgaacaaatcaaatcccatttcagtcgttagattttacagtcagattaagcaatggtaattcttacgttgtgtcaaaatggcaaaaccattattacttccacaatactccaaaccaagtcagaaataaactagtggcaccagccaaaactggctggctgggatcgagagaaagaactatcaattctgtacactaaaacggtagaaccatttagggtcattaatttattaaaatgtgcaggaaaaatgattaccatacagatattattattatcattcctaaagaggacgagtgagcactgagcataaacattaaacatgaccatgatatgtactttgacatcgatgcaaaattctctatacatttggcatttgctattctaacaaaagaaatattatctagcacttgggcatggtgtagagcagtaacatttcagattctcagtatggcggaggatatgttccgggataaggacctataattcaaaagaccaaaaagatacagtaagtagcaataacacattggcagccatgaacacataattaattgaaggtgaagttacctggtggatagtaaggagaagtttggggcggaggtgggtatagagattgcggataagctgatgtcggtggataagctgatgtctgaggataagctgatgtaggtggataagctgaggcaggtggataggctgatgcgggtggataagctgatgttggggggttacggttggggaggataggcagctggctggggaggagggtacgtagatggtggatatcctcctgaagttggtgggtatgaagaatagtgtgatggagctggatatgacggggcttgatgtgggtaaggagcagcggctggcgggggtgtagaatacaaggaagattgtggtgttgcaaatggtggtgctgagggagcatgagtttttccgggtttctgcagtaacacacaagtgtgaaaattaagattatatcaaccaaaaaaaaaaggacagccttaacaataaccaaacaaaacttgggaaagactagcttacattggcattcccataatgcaatatgagtcttacttctccagcatacctacaagaataaaagtttggttagatcttgaaattttccttgcaaaagattttcaacactgtagttatcggcttcacaaacttaaaacgacaagtttctgcagacttggaaactaaaagaagtaccaactatctattttatctcagaaattcgaaagaaaaaaaaaacagaaacatctcatgaaagggatgaacgatgatgagacatacgaatcatcatccagtcaacttttaaacagaattagttaaaagagataacctcttcacaaggtaggaaaacagtattttggatgcctctgttcaaccatggtcattataaaacagaggcatgccaaaagccatcatcagagaaattgttactcctccatttcttatcattaattattcatcctcctcttcccatttggctacgtaaaagagaagaatagaaggcaacgcgaatgaaacccgtctttaaattgtaaattagagattttgaattatggttacaaagttattcctgaaacactttcattgtctaaaactaaagagggagtggagtgcccacaaatataaaatcaaacagaaactgcctatttcacaaccccaagaataaaagtggaagacaattcacaagtgaataacccgaaaatattctcttctgagcttagcatagttagaaatgagagagtaacctacattatcaatcctgattaggtaatggtgtattttgctttttattttttccattttctcttcctaacagtctctacaaccaagcattctctagaatgaaaaaaaaaacaaataaa

SEQ ID NO: 184556 - DNA, 8977 bp, Cannabis indica
atgttaaggatacatctcaatctgtcacgtgacattttattttctggtttttctgttgatctgtttgttctctgtttagttaagttgttggggcttaactaattctgttaattgtaatgttcagattttgttattctttcttgtattttctgaatataaataaagggactaagctactcatgttgagtaatgctttcattcaatctttgagttgatactctgttctttctcctctgctcactgagctttgtttctcaaggttactacctttcacagaatagaatggaataaattttagaatgacaataaaaaaattgataaaaaaaaattgataaaaaaataaataaattttttctcttgttacattagaatggtcattccatcaaaatagtaaaaagagcattccattagaatgtcattccagtactttaaagtacaaccaaacaaagaaatgaaacaaaaattatttcctttccattccattcaattccatttcattacctctaaccaaacgccacctaagtttcaaaaaacttaactaaactagataacataacaagaggtttaatttggagagaacatgcttataatattatagctaatgattatagcaagctagaaatgagtaaaatataattgttcttctccttagtttccacttgatatatatgctttgagaatgtacatgagattttggtcaaggactagattgagttaagatgttcttccaataattcctaaatctaatccaacaatggtgttattgaagggaaagtttcgtttaagaaccaaagcctgcacgcaattagtcatacaccaaatccatatgaaaaggccatcaccatcattggaaaaactctggctccctttgatgaagacaatttaattccttgtttcggtttcggtgatggtaaactcttctatatctgttttatactagcatattcttatttctttcaaatctaacaactgatactaaacatttattttcactaaatagcaactactcatgatgaagaagtgtttagcttccacagtgaccattcaccttgccatggtttcgaagaagtcttgtcctgctacagaaaaatagttcccaacttacgactttcgggttagttcaattcttcttttagaaatgagattcaaattgaactgaatgttagaatctattcacatattcataaaaaatatattgtgtttaagggccaacttcttatggtccggttgtggatgcggctgtagacattgtggagaaaagtggtggccaataccatgtattggttatcattgcagatggccaggtttgaacctataactctctctcaatgttttgttttcttacatgtatgatcttgctaagaattgatgtgtttggttgctaaggttacaagaagtatggacaccagtgacagtgaattgagtccacaggagaaggaaacaataagatctattgttgatgcaaggtgggtgattgaaactttgtactgatattgaagttcatctcttcatgtttcgaaaattgaactcatgagttcctagttttgaagctgagaaaaatgaaaaggaaaactaaactcttaaacttgtttgaataaccagttcacatccactgtcaattatccttgttggagttggagatggaccttgggatgacatgaggaaattcgatgacaagctcccagctcgcgaattcgataactttcaggtatgtcattacagttacaaagtttaaacttcaactgattaactacaaattttctaataacatgtgtgtttttgtatgtaagtttgttaatttcaccgatatcatgtctaaaaataaaagtcttgaggagaaagaaacagcatttgctctggcagccctcatggaagtccctttccaatataaagcagcgtttgagtttggtatacttgggtacgaagtgctgaattctgtctttcacaaacaccatttggttaaatgtttttctgcatacatattgattagtgtatctttctattcgataaagacgagtgacaggaaaggcgaaaaaggttactccacgccctccaccggttccttattcgcgtccttcactgccaagagaaccaagctccttaccgtcagactcgggagatgaacgaaatcagatggtatgtactctaatcttgaacaagaatttggtagtttgttggatttgtgaatgagaaccggctttatttttgaatgcaggcgtgccccatttgcttgaccaatgggaaagatttggcatttgactgtggacacatggtaagttttagcaaataataatgtcttcttctttctaactcaaaactacaaccaaaacaaaacaaaaaaaactttgtaaatatcattttgctagcatgatatttactacactttcttgcagacttgtagagactgtggctcaagagtggctcaatgtcctatctgccgcaaaccaataaaccatcgactcagggtgtatactggatagccagtggatgtaagttgtaaatttcagaccccagttgacagtttggatttgttttatgactaatatttgtgtgacagtatgtttgtatgtacattcctagacttgtgtaacacacatcatatatacatatatgaatatgtataaatttgttgtactgtatctattgttactatttctagtgttattaagtatttgttaactattgttccaaatccataccttgtcctgttataactattgttcacattcaagggccgtaactgttataaagattactctatatcaacttgctacatagaagtttcaaaaagctcgaaaatgtttgaaaaaaaaaaatcaaagacaaataaatgcagagaattgcaagcttaataaatggactaaggtcactgccagtgagagaagtgcaacattaaaactagtatggaaaggtggtggccttttatgggaaggaaaatgtttcaatagaagctccacttatctttgcgacctcatcatttcaattctaaacacgaaagctagcctagccccgatgattaagcgaagactaaggaatgcgccaagctcaatactttttgttgaggctcaggaatcatacattccttgtgttaaaaggagataatttcatctttttaacatgattatggttaacatgagctctagcatttggccttccaagtatgtggattgggtggtttggacaaaagaaaatcgcagcaaaagcctcttcactgaggtgatctttgtatttttgagcaaaatgctgtaatgatctctcatgtggataggttgattaaaatttaaatgtgttttaaaggctagagttttgtgtttcaaaaggggaactcttactagtagggacatagctcattaacaatttgtagtgaggttgaattgtgtgctctcttgttggttgaattgtgtttggttgtaaagtgctaatttgattattgaaattcattttcttaaaaaaaaaaatgattatggttgtataaaccatgtcaaaatagaggccttttgctacttcccatttcttttaccttagcatagaacattcatgtccttttttttccaaaagataattacattaaaaacttagcaatcctcatcaacttgatgagcaatacattgtgcattttcatcaaaagatacaacattcatgtcatatgccttctaatttcacaattttgcattgatttattaatttcttgtcagtttagaattggattgattcactctcttatcgactcatttgatgagaaatttgctcaatttcgtttaaaatagctcagtgtcaagatttttttttataattctttccaagaattttatcttataggttagttgatatgcagcagaaacatcataatacttacaatgcaaagggactccccaaactagatttaacaaacccgtttcctatgcacatgcaaaatctgaaaaatcaagggggactctaaacatggacacaaatcctgcttactctgcttaaccagtgttatcttgaccgatgccttccattaaaacttaacaaagaatttagaattaatactaatttctctagacatagaatgattttctaaaacatttacagatagctcaaaagtcatcaactagatttcctaaaccttgaaatgtaaaatgattcaaataactatcaacacaagatgaataacacaaaatagttttggggaacaaacaagataaggaaattcatatccaatacagaaaatgaatacaacctacaaaatagttgcataagtccaaaaccagtatttgtatacagtacttggcctgactcagcttatggtgactaaacataaaacttcatacccaacatagaaaaacaaacgaagcccacaaaatagttggaaaatacttggcttgatgatcatagtcaaaacaacaatagccaaagtacatatagtattcacaccaatattgaaataaattataacatccaaatggcagtggtttgtggtctgtaaactgtctacgttctcacaataaagtgatgagtgtcctacttacttcttaggcagttgcttagtttccaccttgttggcttgggtgctggtattggtgttgttatcaatatctttgggaattggctggattctcacatatggttttctagtgagtgtctctcctctcagagcagcaacataacgatcatttgtatcctctttcctttccaactccccaagaaactccgcaagcctttcacgattcgtctgtcccatcatctggggtttcacaatttcatcaaacactttacatgtcaagtcaaattttccaattcatgatagatttcaaaccccccaaaaaaaatgtataaaaaacgaaatggtttaaaatttcaattcatgatcaattgaaccgactttctttcaccgaaattcttggcaaccaaacagagaaagaagatattaataactctaaggatgatgaagatgaaacttacgagggtatcgggacgagctttgcgacggagttgggcctcgagctgctcattgcgagagttggtggcctgcatgacggcgtagcctatgatacccggaataacaccgcatacggtggcaaaagccaagaagaatggctttgagtccctgctcttcctcaccatccatctccatgtctcgctcttctcccacagtatcgacattctctctctctctctctacacacttctttcacctgtaatgtgaaaatgaacagccaggtctatactgggcccttggatttgagtccatctcatgagttttcggcccacttaattctaggttggcccattcgataaggaaaagtcgacccgactccccgacttttcataaatatacatctttttaattttttaaagagaattacacacatttttcaactgcttttttcttcaatttcagtaacttattatttatttatttttttaaaaaatactttttgaaattacaattttcttacaaaatttctaaataaacaaaacaatgtgaaaaaaagacaactataaggtaatgaaaatagtagcaagacattttttcaattgtaaattaactgtaacgtttggttggaggtaataatgaaatggaatggaatgaaaatgaaacaatttttattccattcctttgtttggttgcatttaaaactattggaataccattccgatggaatgacatttccatcattttagtagaatgactattctatttgaaatagaaggagagactattctatttgaaatggaaggagagaccattccaatgcaagatttgaaaaaatttaataattttatttatcaattttttttatgcattttaaattttattccattccattcctattccaatttacattctcattcctgttaagggtgataaagttagttaaggtggttacaacagttagttacaactatctatgtttagttagactaattcccttatttatctactgcatataaatagctgcttgtatctcagtactctgtaatcaattcaatacaatacacaattctgtttcaacatttctctctcgttctctctctctattgattagtcttgacatggtatcagagccttgatcgttcttttttttttctttaatggattcagctaccagcggcaatggtggcaatggaggagcatcaagatcgaacgctgctcttcttcctcgttcacaacccgtatcgttcaatcactcactgtctatcaagctcgatgagcacaactacttaccctgtaaacaccaggttcttgcttcaattaaaggaagtcgtttacaaatgttcctggataatactcgaatccctcccaagtttcttaatgctactgatgaagccaacaagaacatcaacccagcctttgaagattgggaacaacaagacaacttactggtttcctggcttctttcttcgatgtcggagaaaacaacaaatcggatgatagggtgcgaaacaacagctcaaatatgggaaactctgaatgaatactacacagctctaaactcagcaaacatagggctatacaagactcagctcagaaacacaaaaatgacaggttctctcaatgactatctgttaaagatcaaagggataattgatcttcttgctacaattggacacaaacaatcggctcaagatcacattgaagccatcttcaatggacttccaccagaatatgatgtctttgtcacttctgttactacaagaaaagactcctactctgttgcagaaatggaggctttattaatggcacaatcggtgagaattgaaaagaatgccaaatctcttgacatcagtaaaagtgaggctaatttagctcacacaaggccattttatggaaataacaatggcagaccttatttccccaattcacacacatctggtggatccaatcgtggtcatccttttcgatctactgagaatccaacttagatgcaacattcgtctcgaggtgttcctaactcaagccgtggtccaaatccttacaacagtggcagaggctatggttcaacaggtcgaggagcctctcaatcttggacacaaaaacctcaatgtcagctatgccacaaacttgggcacacagtcaagcaatgtttctatagattcgacaaatcttttactggtcccgagtgcttcaatcagttcaatgcctcagccaatgttgcacaaatgcaagcttgtatagccacaccagaaattgttcaagataacagttggtacccggattcaggtgctacgcatcacctcacaccagatggcaccaatattgcctcctgcagcagctattctggccaagaacaagtctttgtaggtaatggtactggtctcgacattgaaaacattggtaattcctctctaatctcccccttctcttccaaaactttgtctctaaccaatcttcttcatgttccttctatcactaaaaatttacttagtgtatctaaattttctagtgataattctgtgttctttgagtttcatccttctatttgctacgtcaaataacaggacaccaagaagactctattggttgggaagcttgagaatggcctctacaagttttcatccacacaacttactcacctacaacaaccatcttttcctacactgtccagtaattcctactgttttacacataatgtctctactactgattccactttttcattatggcatagtaggcttggccatcctactgccaagattgtaaaacatgccttacaatcatgtaatatccatgtcaataataaaactgatatcgatttttgctcagcttgttgtcttggtaaacatcacaaattaccttttctattttccactacagtttatcatacacccttacaactcattcattcggatttagtgggggcctgctcccataaactcattaaatggatatcggtattacattagttttgttgatgcttactctcgatacacttggatatacatgttaaggaccaaagatgaggctttaattctaagttcaaaacccaaattgaacttcagcttgaccataaaataaagactcttcaatctgattggggggtgaatttagggccttcaccaacctattagaacaatgtggggttattcataggcttgcctgtccacatactcatgaacaaaatgggattgtggaaagaaaacataggcatgttgtggaaactggcctaactctattagctcaagcatctctacccctatccttttgggatgaagctttcagaactaccacttttttagtaaacagaatgcccactgccactatacaaaacatctctcctttacaaaaactctttaactctccacctgactacactatattaaaagtctttgggtgcctatgttatccaaaccttaggccatacaacaaaaataaactcaattaccgatccacaccttgtgtattccttggttatagcatgtcacacaaaggctacaagtgcatgtcaaaagacaaaagagtttacatctcaagagatgttatttttaatgaaaattgttttccatacactgaatctcaaaagcataccaccacaccaactatacctgtcccaaccagtggcctaccccctgtgtcatcttcccttcaacccactacatcaccatcatcaactagtggagactcaccatctccattcgctcaccctgctgctgtctttgacagcaggcctgctgctactactcctatcggccatttggttgatgttcctattctcaccaccacaaatttaccacctttagacacggttaccaatgttcatgtcactattgcaccaattcctactaatattgctactgcaggtactcaaaatcctacacaaccagcaactactgcatcaacacatcctatggtcacaagactcaaggcagggattcgaaagcctaaggctctattagctcactgtgaaccaagatcagtcaaggctgctctccaaatgccacaatggaatggagccatgactcatgagttcaaagccctcatccgaaacaacac

SEQ ID NO: 184557 - DNA, 1607 bp, Cannabis indica
attttatatagaatagatattatgctctaattaagtacacaaaaactaatcactaaacaaaatttgatcatttgttaattcaaagcctaaatcgaaccatacctgtctaaacaccttcataataacatcatggtactcatcagaattcaaagtgagataacaagccaagagttcttcaaactcctcaggttgtgtaatctttttctccataatcatctccaccatggattctttaaagtccttatgagggtcgtatgaacactttaccacagcaaagctttccaaaccacctgtcgttgactgaacccttgtactgatcacttttctgtccatcttcatcttcatcttcaactttgctttcttcatatcctctagtgctttcactttgcatgtttcgattctcgacaatgttcttggtgaataagctctcatttttcctcgactctgttttggctttggtctcttcttctggtcctgaatctgatcaagaccacattctctgcttacgtgaacagatttcctctgtttctcaatcttgtcaatcttcaactctctcaactttctccaatcaaaactcattttctcttcctcacattcttctaaattctccgcttcttcgattgttttaagcctcaaatttccgtccctcccagtactcgttctctttggtgtcgtcgtttccatctctctcgtaccaaactctcttctaagctctaaaactcttctgttctcctttgtttcacatatttcatcctcagcgtctttccctctgcaatttggacaattcgagaatggaacttctcgctcatcataccaaactgacttcaaacaaacattgcttggcttcttcatcgtcttcttattcctgttctttttcttcttctccacagagctattatctttcctaaacgacagactccaaaacgtatcgtcgtagaagctaccgaggccagagctagcaacagtttcagtggccaaagcagcaatctttggtgggttagtggagggaagagaagtattccagtttccttgtggggttccctttataggttttggccctgagtgactgctcttctgtttgaacttcgaaagccatgacagaggaaagacatgagagatcacatgtggtcgaggagcaggagatggagttgaagaagacgaagtaaaaggaggagggatggtctttttccttccccacttcatcattcggtaatgggaattgtagtaaaagaaaacaaaaattggccttgttcgatagtatgtaattgcttaatatataaaaatatttacgaaaatctacttctttggctttttgtaagaagttgcagagaacaaaatgattgaaaaacaaagaggggaggagagagttctagcaacggaggtgggacagttagaagaagagagtaaatactaaaaagaaacgtgggtttcacagtaggtttattttttttaattattattttatttttcaaaagagagacccgccctaaatcttgtgaccactctcccacttttttgtttggcaggttcacttgaaaaagatttctgccctttatggggccaccaacctcacatatagccaacaaattaaaaaaaagaaagaaaaa

SEQ ID NO: 184558 - DNA, 1649 bp, Cannabis indica
atggtatttccagccattaattcttttgaatatatataaacgagaaactaagagagacttatatatttatatattaactttctctgttgttttggttgtaatatgatgaaattagaggaggggatactgggtttatatatacacggatttgacaaggaatattatcttttcctatttttattagaagatggaatattatcttaataaatgttttatttttaaaacacgtgctaatcacgtttccatataaccttgctataaataatttagagccgtcagattagatgactctgttaagttgaaaaaagttgaccgatagttgaaaattgaaaatattgttaggttaggattaggaataggaatataggaaactggagggaataatagaatattcgagaggtattgaattgaattgaagcaatgtagtgatttaatggagattattattagaagggaatatagatgggtgggagtgggaatattcggaggaaggtccagtgcttatatatatagatatatatatgattctatggctggctgcttctgctatacgtactcccttattatagcctcatataaatctaaatttattaattataatttagttaattatttggactaatgttcctttcatattacgtttttataaaaatacaagtaagtgatgagatgaacctaaaatagaaatctaagtacgtctcatactcatagtcgacttaattggtgataaagatgacattttgcgttgaataataatgataaaagtttctttagagcttggaaaataatttattttttctctctgtatgacacggaggaataaaaatcgttttcagactgccagcgtaagaagtttattataagaatgttaattaataatgttatatgtcatctcttatttcatcatctcataatgttatcccttagttattatattaataaaataaggatttaattgaattaattagagtttataattgagatgaataatcttaatgtttagacttagaattgttcaaaaattaaaaaaaaaaaataacaaaattaaaaaaaaagaacttaaaattaataaagggatgtactttttttctatacatatgagcccgcggcggttatttccaatctaaatgtgaaatagagtgggaacgaagattattttttattctctgaatagcaaagagagcgcttactatattagttatttcctttttttttttttagttaaataaagtatgttattaactcaaatcaaatcagctgttacaggatcactaataaatctaggacaagcatctgcccacatatgacctctattaaaactagtaacaaacttagctagtgcgtgggccacaccattcccatctcgcgaaatggcacaacaagaaccaccaccaacagcagctaaaagagaaataatctcctcaacaattggtttaaacaaagaatattattaggaaattaatccaagaacacaccacagaagaatccgtctccacacgcgtcaatgagaaccccaactgagccacccgcttcaatccctcacgtaagccaggacaaagagtactctcaactatactcgtcgtatgcatccctatattaataaattgaaagagtgtaaaaaaaacttaaaaaatttaatgaattaaatt

SEQ ID NO: 184559 - DNA, 3977 bp, Cannabis indica
ctttttttttttaaaaaaaaaaacctacttttagaggcatttgagcttccatggtttttttttaaatgggagcttctatgattttaatatctacttttctcgaaaacaaaacaaatttgtccaaacagatccaaacaccgttggaaatcatgtccgaaaaaatcctaagaaggcttgtatttgatagtatttattttcctaattaaacgacataaaactttagaaggaatgaaacgacatgtcgtgcatggagagtctgtccacgacaaaaatagtgtttttccaattttttttttttttttttttttaaagcaaaacgttaaaaaaaaaaaatgactgaactttcttttcttttctttttttcaaaaaaaaatatatggaaaatagttatggaagtttggcacaattttaaaatagattttttttttttgttttctctctgaaaacaaatagaattttgaggaaagtttgtcgtttatctcagaaaactctgtgagaagtgagaagtatcgatggagccgtctatttggctactctgaaaacactcctctcctctcaacattcatcctcgtccttctccgttgccatcaggtctatatcttagctccctctctttggttccctgataacgtttctgtagatctaaaacacctttactttcttatctgtttgtcttcttcttacttatttcatcacgcttaactctcttaatttctgttttgattcgtgttaatcagtgtaattagtgtgttttcgttagatattattgactattgtccaccatctgtttgttataatgttccaacggaaaaaattaatttgtagctgaacttgcttctgaccaccacatgttgttctgttcaaactagatttgggttatgttggttttttgttgggatacattattttttttttttttgctaatttttaatcttgttctttggattgggttctaattattattttataatatgttgttttgcaaattttatccgtcgcaatttaaaaaataaattaaaaataaactgaattacagtttgtttataaaaaattgttaacttgaatgaaaaatattaatttgacagtatcacaatactggttttgagtaaaggtatagaatttatacatttcactgacagaaaacaacttctttgagtttcttatgtgtatctgactacagcacactagtgttgaaatgacaaagtcccacataatatagttaactgaatgttatttaggacctcttactattttttggggtgaagaatgaagttctttgttgttgattattggaaatatacttctgagtccattacatgctttattaatattatttatgagtttgtttcgtgcttataggtgattggtttattttttaccgggaaaacgtttttccttttaagctatatgcatattttgaaaataaaccatttagtagtgtaaagaatatcttcaaacagtaaactatatagaatctgggtccaagatccaactcaagtgggaacatatacttctaaagttgtaactatattgcatgattattaaatctaaagttgagtttatatatttaagaagtaactaattatttaatggagaaagtaagagaattaaatagttcttagaactctaggataccaatgcttaatccctatatggggctttttccattctttggataacccaattccttccttatggtttgcttaaaattgaacgtggtcccttggcttcctgcagagtggttcatgatgggatcagagtacatttcaattatatttgttcgtactatggaggatgtagtttttatatttgcttccctggattcacagagaccggaataggcaaatcaatgcatttggggagttgagtttctcaatccttatggcggaccatacttttgttgttggtcaagagttttccgatgttaaggccttcaggaatgcaataaaagaagctgcaattgcacaacattttgagcttcgaattattaaaagcgatttgattcgttactttgcaaaatgcgcaacagagggatgcccatggcgaattcgtgctgtgaagctttctaatgcccagacttttacaataagaagcctagaaggtacgcatacttgtggtagaaatgcacacaatggacaccatcaagcttctgttgattggattgtgagtttcatagaggagcgtttaagggatgacattaattataaaccaaaggatatattgcatgacatacaaaaacagtatggaatcacaataccatacaagcaagcttggcgtgcaaaggaacggggacttgctgcaatttatgggtcttctgaagaaggttattgcctgcttccttcttattgtgagcagataaagaagtccaatcctggcagtgttgcagaggtttttaccactggtgtggataaccgtttccagcggctctttgtttcattttatgcgtccatttgtggattcctgaatggttgcttgcctgtcattggacttggtggaatccagcttaaaagcaagtatcttggtaccatgctttcggcaacttctttcgatgctgatggagggttatacccacttgcatttggtgttgttgatgaagaaaataacgagagctggacgtggttcttatcagagttgcataaggcacttgagatgaacacaccgaatttaccgcagcttacatttttatccgatggacagaagggcactgttgatgcaataagaaggaacttcccgagatctttccatgcctattgtttgcgctacttgagtgaaagcattggcaaagagttcaagaactcaaggctggtccatcttttgtggaaagctgcatatgccacctctactagtggtttcaaagaaaaaatggctgaaatcgaagaggcttcttctgaagctgcaaagtggctacaacaatttgatccttctcaatgggcatcggtctattcggaaggaacacgctatggtcatctctcatcgaatattgaggagtttaatagatggatacttgaagctcgtgaattgcctgtagtccaggtgattgagcagatccacagtaaattaatggcagagtttgaagaacgccgtgtaaagagcgattcatggctttccgtacttgcgccatctgctgaaaaacaaatgattgaatccatgagccgctcatcaacataccaagttcttcgatctgatgaagttgaatttgaagtcatttcagctgagcgatcagacattgtgaacattggtacacatagctgctcctgccgtgattggcagcttcatggaataccatgttcccatgcagttgcagctatcatctcatctcgaaaagatgtatataccttcacagagaagtgctttacaacagctagttaccgtgatagttatgctaaagaaatataccctattcctgcaaaactcaaatggagaaagactgatgaggctgctacagatgaagatgatgatgatgctcgaattgtacgaccgccaaagttccgtcgaccaccagggcgccctgaaaagaaaaggatttgtgtagaggaactgaaccgtgagaaacacacagtacattgtagccggtgtaaccaaacgggacattacaagacaacctgcaaggcagaggtgatgaatagtattgaacaattttaggtgtctaataattttgtaccatatatattatagagagagtagagcagagctgctttgtctggtttatgtaaagtaggaaatacccagtagtgtatcttaaatgtctgcgtgattagatcttcttggattggataaatctgactgtctctaattgagttttagatgttaagagggtgactagattctgaaatggaattgcggaactcctctctatacataatccgactctaatatttagttgcttgatggacagctttagtaattgccatttttctcagcacaaacagacagcatttgtatttgtgcgtccctgttggttatatttatatctgtat

SEQ ID NO: 184560 - DNA, 1320 bp, Cannabis indica
actacttgactggaaatgggtaaatagaaattattatgtcaatgttctgttttggacagtgacccaccttatcaggtcagctgctcacaactgttcacccactggaaagaagacactactacactcaaaaggggttatacttacttaccagttgtagtactgtatatctaccattttccagcaaattaaatgtcaccctttgttatactacaaaaaaaaaaaaaaatgtcaccctttgactcttaattctcttatatatatataaatatatatgttgaatttcttcatatattatcaatataagttgtgggttttggttcctagttctgagaaatatcttttctttttgaatgatgtgtttaaaaatattctttatttttaataatgttttaatcatgggttttggttcatagttgatgtaatgttttttttaaatatctatatatattttcgatgtataatagttgttttagaatcttttaccatttcaacattcaaaaattaaattaattaattaataaataagaatgttgttgaatctgaagctaaactgaacatatcaaaaatcgaaagaggttaattcatagtattagttaggaatatttttatgatttttgtaattacggttgtgaattttcaaaatataaatatattaaggtgaattgttgacgctgatcagagaatcttacatgtattattatttttaattagcagtaactaattttatggaataaaaaatgtttttctttttataataattgccaattgtaatcgaagttaattcttcatacatacatcggttaattatgaattatatatttgttggagaatatttcgatacatattgatgaggaaagatggttatataacaaccacaaacaaaaaaatataaataaatgtataaaccaagattaatatgagaacttttgaaagaagagaatatattataacaaagaagtgaaataaacaactctcaacaacttttgttctcatcaagtttatattttctccatgacaaaaatattaggaaattttatatagaaatgtttcaaatgatataaagccatacacatgctcagcctaacgccctacctacggatgagcatattgccaacacaatctaatccactaaatgtacattaagctttcgtttgatcactactacaaaaaccccctttagaggcggtttttaagccctttcagcgtcggttttcgcgaaattcgctaccgacgctgatcagggcgacgctaaagggtttatgaaaatcgacgccatacgtacccctatggcgtcggttattattaaataaccgacgccat

SEQ ID NO: 184561 - DNA, 2982 bp, Cannabis indica
aaaaaaggaccttatatgcagcatctttcagtgtttgtagattctccaatttcagcttgtaggtctttatctcctgattttgatccttgtgaagtttctttaagacctccaatgcttttgtatatctgattaacagtgtattgagacatatttgaaacaccaaaatcaacatgttgaacaaaagcgtaagcactaaatagtgaaaaaaacaaaagaagtttgacaaatatattaatgttttgttcataaaaggatgatacaaagtttaaatgtaaacttattatattactccatgttaaataatttagagggcatttatgcaagaaaaaaaaattgttctctcatccttccatttttggagggataaattttgttagattagaagggagacctcatccctccacccctcatttccctcccattttctttctttgccaaactatggatttttgctttccttctgctctttccctcctactcgtctctattcttccaaaatccctctttcagaaattctatgtggtacagaaactacttaaacccctgaaactgatgcagactactaacaacagctactcgtacaagccatggaacaaatatcagaatatgggtatgcgtgcgatttcaaaaaatgggacaataaaatagggatatatccaacctaaaaataacagaataaaacataagacctgaggaaagaattttctaggtctaggaaagacaactaacgagaatcttgctacgatacaagattcttaaataaataaataaataatctggtattaaaactagattcttacagcaataatcaaattcctatttaggagatgagtccacaaaatgagtgcatatagggataattgtacctggtagcagagaatatgtcatcaaattttttctttagagtagacgggtcttgcaaaggccagttagcttcatcttgatgtacaaatataacattttccagaattgccttggatacacccattagagcagggatttctcgatccatatcagcacatctatagctgaggcaaactttctgcagttcagaaacaaagataagaaataaaaaactgttatcgatactaagtacatatacatatatatataaatgcaatattgcaaattatttgaaaataaatttgaatgttatatttatacattgattctacatctgcaaatactaaaagtcgcatgttaagaaagtgtaaacaatctaattcatatacttaatgaaaaaaagtcatttccataatgaaataaaaagcacataatccatttttttaagtagtttacagttacagcttgctctaaggccatcaacaccttataaggcccactattcagattaaagattaacaaagtatctcacaatctaggagtaagatttttgttgagcttttacccaagacaagtgtagttcaaatggttaggcatgtggtacgctttaacaaggttgaaggttcaagtccctcctctcgggtatctacaaagcaattgatgtagatttccgatcccaaaacattataggattaggaagggagcctagcctagtattaaaataaaaataaggcctaacttggacatacacaaaatcgccaatctcataagtcacatctcagcgtttagaataagcaaattcagccaacaagtacgaagaggcctaaaagtctccctatgctcttaaaagtaattccaaagttttactccttattaccttctgttctaagaagatggtttttatcttcttgctgctactatgagtgaaaaaaatatcctatgagaccaataattaacatagcttacaggctgtaactatatttacactacaacaagcaaaataacacacccaatctcacactcaaatatagcattccgtgccttcatttttcattacacatagttagtagtcttacttatgctacggctataatataatagcattccatgtacacaaggacattcatgcatatttaacaaacaaatcaatcacttccccgttatgagaaaaagcctctccttggtctcatacatgcatggtagttgtttgatgaatggaatgatacttgtaaagttgtagtagaacaatatattccattcaactaaatcgaaaacccataatgggttggcaattgaattctccaaatgcagagttgaatctcattctccagttaaaacacaattccaagccacaaacaacaactataacaacaaaatcaacaaataaagaaagaaatagactaaataaaaaactatatattccattctactaaagcaaaaacccacaataggttggcaattgacttctccaaatgcaaagttaaacacaattccaagccacaacaacaactagaacaacaaaatcaacacataaagaaagaaataaactagggggcgtttggacggaggtaatgaactggaatggaggcaattttcatttcattcctttgtttggttacatattaaagtattataatggcattcctttccaccattccaatgcatcattcatcaattttttttatacattttaaattttattccattccatttctattcctatttccaccggttcttatttctattcttatgtttctattcctcccaaccaaaagccacctaaattctgtaaaaggataaagaaagcaaaggtatatacctctccagtatgaggattcaaagtctgaagcacactctcaatagctttaaactccatcttcgatgctttctgagtcaactgaaaggacctaatacatacaacatctttagccgctgccgtcttaaatcgaagctttatttgccccttcgtctcagtttctcccgcaacctacaacctcacgattcttacttgtttggtcaaataattaatcaaccccaaatttatagagagagagagagagagagagagagagagaccgttagggtcatgaatgaaactgtcgaccggacctcgcagttgggaggcaattcaccagtgca

SEQ ID NO: 184562 - DNA, 5949 bp, Cannabis indica
ttagtttatgttaaagagtttcttacacgttattgaagatgattagaaatttgtgaaactaagatttgaacaaatttttgttcaatcttatcctcaacgcttaattttacaaatttctagattgaatctcacaagttacctcattcagtgaataagagcatttctagtggtattgttcttttagttaagatagctaaaaaattaaaataaaaaagtcatctttattgttgttacttcaattatacttaccattagtatttgattattttaatgaaattttataattttactctttaaaaataaattaattttataaaataatagtattttgattaaaatactattaaaaaagtacttaaaaaaaaagctatttagccttattctctatttttattaagcagtatatttagagaatatgattggagatgtctaacaaattgaaattatctttaggattaaggtgtaaatttatgcacaagtaactatttggattggagctttaggatacacatcttcttgtacatttcttttttcttaagtaatgagctctcagttaaataataattacattgtacaaatatttttattgaaaacaatgagagaaagtctccaaagtgctggggagaagtggaagtgaggagctattttatagaaaaactttaatgaaatggcattgcaaccaaaccaatcccaagccaaccccaacagtataaaggcaatctgaagccaatagaatacaaaacaagtctttggaaatatatgtgatttctttatacttagttgtattcaacgaggaagataggggtgcgggagggtggccatggcccccaaactctttttgtataatttttcaaaaataacataaataaaaataattaaaaagaaaattaagtaattggtttattttcttttaatgtattggccgttgttaatttttaggttagcttcattgattgtattgtagctaatggttttggttcatcccttcttttcatgatcttcttctttttctacccaagaatattagttggggttgagttttataatcaaagattagggagttacataatgggtggagggtgcattctcaagggcctatctttctagttagcttattgtattcaaatgcttataaataataataatattataacatagggattggaggagtggtcaaacttgtattacctctctctcctttagcacatttctttttctattgggattccaatccctttcgctccctttctgctatcaaacaaagaaatttcatataaatgtgagaaaaaggcctaatatcatcatagtcagcaaagcaacaatttcagcaattgcgggcactttgtctctttcacttagtctctctctctagttttcctcttcacatttttttattgttaatttttattatctctaatctctaaagattaatttacttaaaatcgcaggcgggcttttgttctattccctttcaacgttggactacacacctagccgttttggctagctacacaatgctttgcatctaggtttttatattctaaaattactcaaaagccagaaatatgggcacaaataactattttatttcagagttgtcaatcccaattcattactttcagcttcaaatatccaccgttttctgaagattctttgattgatttgtcttggctcaaattaatcatgacagcataaaattattaacgaacaaaatgatagatgactagacagtacataccaaatgtataactaaagtttgaagagtattcttaagaagaaaaaaatggggagtttctagtttggtttactccaaagttgagcactttggagcaagtattggtgccaagaaccaaaaacactcaaaacgttggtacaagccaagagaatagaaatgagatattgttagaacaaagttgttattgtagcttttcatacaaattaagctatttgaaaacaaagatgaaattttcaaaaataaaaaataaaaaataacaaggggagttagtaaagtagtcagactaactagctagtaaaaatcaaattaatttcttttttttgtattcttcttcactaacaaaatttccttttcatgtacaacctcaattttttttttgcctttctcacattctatttgttcaaacagaaagacagagagagattcaactgtaaaaaagaaaatagaaatataaaaaaaggggtacgatatcagaaaggcatgatatgagtggtcttagtatcataacaagaaatgaaagatttggaactaagccgaaagattttaagtaagtccgccgacatttgacgaacagatggcgtgcaattgctctgcatcagaagcaatatcttagtcacgccgttggcctttgccacggcctcttgcgccgccctctctcggtagaggtaacacacactccacaacaccgtcaccgcgtgttcggtggccgcactcgacaccttcagtaatctctgaacaatcctcgccacgcaattcgagtctccgccgatctctgaccacccttccttgacggacgacgccgtttcaagcagcttcagcaccttttcggttacagaaacgctcagattcggctctgatagcgatttcgctagggatttcaccgcgcctagttggacaagtttaactttcactcgccggggctttgatattgcgattaggcacgataatccggcttcgattaggtttggatctttttcgggactgattagtttcaacaattcagataatagctcttctttatcggcaataatgagtttcgattccgcgtcgatggcgatggattccaaaactctagccgatccaattcttgattctacgctcccttgttgaagaacgagaacaagcgagcgcaagcaatcgcggttgctcttcaacatcgagtttctcagcttctccatgtctttaatctcattacgaatcatatccatagccctaaccacaagctccaaaaaatcaatgcctctggaagctccagcactggcattgcaaagaaattcgaccagcatcgaagcgaagtcatctgctccggcgagaaatttacggttctcgtcggactccctggcgaaacaaacaatctttgacaagaagtcaaaggaggagcccgcttcacggtccgctcgttgaattaactcagtgacttggctcttggtaaggcaagacttgggagacgattcggcggagtctactcggtgcttgactgattcggaccagatctggatgagccgttgcaaggtccgattggggaccaattccttgctctgaagtacctgcatggtggcgggacacgtgttattgccattgtcaagccagcgctggatgctagagcgatcgtaggttacgccggtagataagctcacaggggatttcatcacgtcaagtgatatcggacatctaaacaagctcgggacagtgatgtacaaatcgtccctcaccatcttcttcttcttttacttcttctcgttcctttcccactttggaaacttgtttggctgaagagaaaacaccgagaaactcaacgggaaagcgagagaaacggctcctatgaaaaaataaaataaaaaagacaatgaaaaaaggaaacagaagatgaagaaatcaaagacaccagtgagaaagagagagaaagagaaaaagagtcaaaggtacggtgacgtcagcatttactttttcgtctgatttaatacattaatttatttttatttaaaaataataataatattcttcggctgggttattggtcaaacaagaagactattttagtgatttcattccaaatttaaattagtagggaagtgtttccgcgtagagttacgtatattaatgcagtgaagtttccaccgtttattacaagtagagtttggaaagttttggatgtagtgataatcaacggctgagatgagagcaaagcttacacgtgggttgtgaagtgaaaggcgtataatatggagaagaacgtgggggtagtggggacgaggggagactggagagtagtgaaataagtgaggagacattttgggtaaaaaaaaaattatttgattattggtggttttgggcttgaaggtgggcccaaacgaagggagtgtgtgtgtggtgggggcccaggggagggttcgctcggtcggactcattacatcatttgtacgtttgtagtagggaaagaacaagtagaaggaatacaaaagaaagtctttttgatttgtggttgtgtaattaattaaggtttttgtttcgtccttcccttttttttatgtaaaaaaataaaataaaacaacaaaagctggagatccatcaaatcgatgataaaaaatgataacgagcaaaaaaatttataaataaaaatatggcaaatataattattagtgctaattgactaatacatgagtgatgcaagagaaaaatatgatgaaatagttaataatcttttagtggggaacatctatcaagtcgtgatttttattttttaatcaccagtagtaatgacggaaataattagtgctatctacagttaagttggcagatactatatgttcatttatgatatggtgtggattcatttattaagatttgtctagtaaagtagaagaaattatatatacgtgtggtacatatagtgtcaactcatatttctaccgcttgaaacatagatagtgagtattacgtccacaccatttaactatagaataattacacaagatatcattttttttatttcgtaaaaaaattacatttttacgtttaaagatttttttttttatatttttacggtttttcatagaaataacatgaaaataacaagaaaactacataaaagtaatatgaaaataacatttaaataacatcagaataataacaaaaaataacatacatataacaaaaaatcaacaacaaattaacaagataacaacataaaaagaccgtatatattttctgtaaataaaataaaaaaaacggtaaaaatatttaaaattacgtgtaatcgtatttttgtaaaattttttgttatttttgtgtatttgtgaaattatccctcttactattatcattgctactttttatttacaaagttgatctcctttaaaaaatataaaggctatttataaaaatattgaaaacaaattgatatatttagtatgcaaacataatttcattaatatgatattttctttaaaaaaaacttaaatcatgattgataaaaagaattaccacacaaaaggttatatataaattttacttttctataatcagaactagtttgttgataaaaaaaatttaatttcttaataaaaaatcaattttttatgaaaaaattaaaagaaactagttaaaaataattttgttaagccaataaattaaaaaaattagttatttttatgtaatcaaaactagtttcttaattattttttttaaaaaatagttccttaaagaagaaacattaagaaatcagttatgaatattaaaacttataaattttacgtgctttgtattctattttattgtatggaatattgaataaatccactacaatatcaaaattaaaactaattacaaacttcttagaagctccaaaactcgaccatgaaccactaccaaaatagtactatccattaagacaaaaaaatagaatgagaatagttgccgaagttgttatcatcgttagaaaaatcatcgaacaagtcgttggaattgtcgttgttattagaaagttgctagagttatacatcggaattgtcaccaacgttggatgtttgagttgttgccggagttgggcgttggcatctgagactaagaaactagttatatttatcagctagttaaaaatataacactgagaaagaaattatgcaggttaaattgaaaactaaagaataattagcatttttgccctctaaactttcgacacaacctattttattccctaaaatatacggcttgtt

SEQ ID NO: 184563 - DNA, 664 bp, Cannabis indica
catgaaaaggcttgtctacgcttaaaagtattacatttagtttttaaggctgctcctccaagaatcaacctagttccgttttttttaagaatctattaatttggtaacttgtgttttgatgaaatgcaactttggtaacctatattttttgttatagtgatgactgatgatcattattagtgaatataggatacaaaaacttactttgttaaaacacaagctagcaaatcaaatggatacctgccttttctttatgcatattaataaataggtcaactacttgggttccagcatgtgtaattaaggtgtgattattagaacataacataaggattagatataggcaaaagacaagtgggcctaactaggttagatacccttagtggacaaaaaagccataaagtgggaatgcattccataatgatgagcaaagaccagatataatctttcaactacttcagattattaacttccttgagaatcaagaagaagccaacccaacattgtcaaagttaagatttgctctttcttttctactgctggtaattactttacttatatggctcttcagtttaagtgtaataattgtattctggtgtaacatgggagagaagagtctaaacaagtacaccagaatactgagacaaataataattaaaaaaaa

SEQ ID NO: 184564 - DNA, 7272 bp, Cannabis indica
aataaaattatatattggaaagcatatgttaagcctgctacaatggtgagagagaatggttttgtgtaagttgagtatcgtctatgcattagtataggcctgctagtgttttaccctgaactcttttagtcttaaaattatcagtagaaatgcaccttctcttgttctggacgcaggttgccatggctacagctgctaaagcgaaactactacttcgagagctgaaaacggtgaaggcagatctagcttttgcaaaggaacgatgttctcaactcgaagatgaaaacaaaatccttcgggagaaccgtgagaaaggagatcatcgtgcagatgatgacttggtatgcaaactcactctttcttctcttaacattgaacaagaaaactggctgcagactgtttttttatagtttctttgcttgattgattggtttgattctcttgtataaattttacatgctcttgtatgtttttgttttcttcattatttcagatccgccttcaactggagacactattggctgagaaagctcgtttagctaatgaaaattcaacatacgctcgtgaaaaccgcttcctcagagaaattgttgaataccaccagctgacaatgcaggatgttgtgtatctcgatgagggcagcgaagaagttactgaagtttacccagttcctggttcctctgtagtttcaaaaatgatttctgtatccccaaggtcatctacgtcagattcattagttcccgaggaagactccgcaaccgatgatcctgaagagactaaggagatgtttccccttaacagacagagtcaagaaactctggatgtttttgaagagaatgagcctacaacttccgacttattagtcctggtggaagaacctactaagagacctgaatcttctaactaaatgttgttctctgttttgattttcataccaagtttgtgcagcatttgttgattattattattattttttttgtgggttattttccctgcatttagggagggtaggtttggtcttggcggcagttattttatgtaacatttctttttcatggcttgtttagttcagtgtacgatgaaactaaagcatatattgtcagtgctttccttgttcatgagtgccgagtatattttttttttttttgcttgaagagtgcagagtacttgtacgttgaagagtttgcaattttatagaaagaaatcaggacttttgagtagatagattactcttgaactgctcatgctgtttaattatttttctttagacataaaagctcaattgtcatacaatctttttttctatcaccccgcgtaatcattatcttgacatccaacatcaaaatagcattcaaaccgtaatgtaacaaacttttcaatctagttcgttaaccagtaaatgttcatgtgaagacaaaagaataagtttgactaatggcttaaacaagtgcacaacttaatactaactaaaacgagctttacaagtcgtgaattcacgcagtaaccaccgcacataatatttagaaagcacttccttactcacgcatgatatagaatagaggtgtaagttatgtttccattagcttattttagtttctaaaattaaaaaggaccgagttcaatcctcatcagtcacaaacgtgatcacgttgcccaaaggcttttatttgccttttgccttgtgtatcatcaattccaattacttgtgccaaattctttgttctttccggggaaggaaaactagaacattcgatgcgccaaccaattactaatatcaatacttttaacaaaagagaaactagatagatacataacgaaataatggcattacttaatacccggaaatactaactattgccctcaaaaaagaaaaaaaaaaaaaaactaatatgtataaaaggagtgaaaaactttcatatacgaaaagggacacacttaatgcttgaggacaatcctctgttggttaatggacgcattactttacaatttccaatttctcaataaaaacatatgaacaataataaagcatgttaactctaaccaacactttaaattaatctgcaaggccgttaaaaaggcaaagctaatacaatcaaattttacctgtgcattttgtataagtaggagaaagctgctttgaaagaggtcttcaaacttcagagcagaaaaactccccagttttatggtaagcgttttaaaacaactgaagaaatagactggttgatccatcaccaaatgatctgagatctgcaggtttcaccaaagccctgcataacgggcatgtccgttctctctcgaacctaggaacaagaagtaattatttcaaaaaaggtcatttaggatccctagcttctccaaaagactcttatgaattaaataaaaaacacttcctaaaaaacaaaagatataaataatcaaaatattttctgagataccagcacggtaaagatcacctcaaatgtacattaaactggtgagatgcccgcttaaaagttgttagttgtttttcaaataaagatattttattttgaaggaaaataaaaagaactcacataacagctctctttctttctctctccatgggctaaaatgtgcatgtattttccagagtgtgtgtgtgcatttgaacttctatgcttatgaccacagcctcaaaaagaattcttgaccaatcaaaatcccaaaaatggccaagaaatcctatgtaatgcagtcaaaacaataatgattgataattttcaccactaacaaaagtccatccaagtggaaacacttaaaaatgaaattcggacaaaccataagttggtcatttcccataagtatacatgagcatgaagaagaaaacaagaaataaaaggttcaaccgatccaccagaaaatgcactagaaaaggaaccatttgttgtgagagttaatgcaagtaataataggattgcagaaacagtttccccaaaacaaagtataagcaaggacagaataaatttagaaagcaggcaaaaactcaccactctgacacacagtcctcgcaaaatatgtgcttgcagcgaagtaggataggagcatgcatcttttcttgacaaatagcacaaagatcaccagctgcattgacctgtacttggcactgacaggttagaataacatttacagaaaacattatctaatgaaaagttacaaagaaaatttgagtggaagcaacaatacaccacactgactccagagacttaaagaaaaaagaatagaagaaaattatcggtaagtcaagcataaagaatcatataaataacaattttaagagttaatgctaggttctgtgaaacacacagacaccgtccaggcattcaactttgtccacaaaatttatcactgaaatccactttacctgctcagatgttgcatatgccccatagtgtacttctttgcgtgataatgccttcaacgcagcaaaaaaggattgcacctgaggtaagaaaagtgaaaagatatagatatagcttatactgaacggtaaaacactaaagctttagcaaagaaataaattaattttaaaataatacacataattaaacaatacacctaccttttcaactacagaagtgagcttaaaagttaaatataatcctgtcattagtgaagaaaataggcttccatattctttgtttaagaaaaaacggtaccacactggtgttggcaacaaggcacggtacaagaggagtaggtactcaatcaaagttagcatttggccctgaaattaggaatttacaagtttacaatagttagtaatattagttaaagaaagaaacaaatagagaaaacaaaagtgaactgtactgtctctattcaactctatgtaatgatgtatcaactctagatacatcatacgttactttctcactcacaccctctccacacaacctgcccccctctcccagctaaagtttaatttataactgatcctagtattattacctcacctgtttacggtaatttcggcctctgctgtttctgtaatatatcagtaacatgcacttgaataccatcgcaatctgtcgaaccaatgtatctgaagaaaataaatttttagcaactactgctcagtactgaaaagattaccatacattcaggataggaggagatagaaatataatattttaacaataatatcaaaggaacatccatagaaacaattttataacttaagaacaatcagattatacataaatagcattcattaaacggtacaataatttgtcgagaaaaaaaaaatgtacaataaattatactataatgtaccaaagaaatgaaatctttattcaaatatatgtcaaacacagatgctccaacatactgttgcatgcacaagtaaaaatttttagtaagtaataagcacattcagtatatcctagaattctcgctctgtcatcaaaccaattagtcctagacccccttttttttatagcaaaaccaattagtactagaccagtgatactaaaaatagttaatctttagaaaatgcaacaaagttatatcggtgacaaaatataaaagcagccaaatagcttaataatatagctcaaagcacattattatagcaaaagtctcattaaactcaagcaaaacttaggctcatttagtcattttttgtttcttaagctgcccctttcctctctaatacctctcatgagctcccaatctgcaacatttcattcctccctcacctaaaggtttaaccacttcttcaaccagaaatcagatattctctgttcctctatttatgcactccattcttgaagctgtaccctttccttgaagattagaagtcctacgaaatttcatgaacttcattttttttaaaatgatgacatctatctacattattttacctcaatcgcattgatttttatttatttatcttaatttttagtaatgatgacatctaactacacgctacaaagttattgtgctttaagtaattagcaacagaggaacttaaaataaggacacaccattcactaagatgataaaaacagcatgccaaaatggtggtatgattttgggaggaagcatcgctaatgggtacagcagatcatcattctgataccaccagtacacaccaacaacatgaactgtgaaagcaagacagatgcctatcagaacagagatttttctctctccctgcaatcagaaacaaaaatatgtgcttagtaaacaaatgttgtactaagttaaggaacgcggaaaatataaaagaaagatcttagcatgaaattatacctttaaagctgtctgttttcttacaatatcatttgacttaaacataacagcagcaatccaaattgtaacaaagaagcctgaaattcaacccataggatacgaagaaaaacaaaacattaatacttgcatttcattttcgactaataaaaaaatgcagaaaaattgttcatctacagctgccataaacactaaaagaaaaaaaaacgaaaaagaaaaaaaatgaaggaaatctccttattttctaaaacataagccatacatatttatttgtatatcaatctcgttcacttgtaaagcatccatgatttagtacttagtttcaaactaaaagttgacaatttagtgctaacaccttggcaaatgatgcgaagcaacacagccaaaaatgaacgttttcatataaaaataacagaacagcctacccacaaacaaaaatgctgcataattatttattgaggtatgtgaatataagtaagtttcatttcccacaatgtttcttaggtcaagacgttttggaatcagttaaaacataattaacttgtctcaactttctggcaaatgtaagcttcaaatggaccttgtattgcggtattcacctgactatatcggaaaaactttatttaagagaagtcgttttaataaaaccttgttctctttccgaatcgataacaatcttgattttctttttgaataaatcataatctcgatttaaatttactaaattttaaataatcatacgacggcccaccaaaatctgacaaatcttctaataggtaactccataatcattataagaattgttgtacaagacctgttacagacactttaacaaagcataatgcacaattcaagaagagtaccttgcaaatgctgtcggataaagaccaccaacagtagcaaagaaaagggcagaacctgctcaatccacctagcagcctgctgaatgtcatatcgttggtaagacgaatctcttccattggtaccagttccatcccctacttctgcgtcagaatttccatttaacgactgggaaatgccttctcctgacccacgctcagccctagaatccggcgccaaggtagccattgattgggccgaaacctcattctgagtggaagtgacttcccctctcgcctgcccaaccaccaaaccagtcccttccctgtcatgctcctgctccgttgctccaataatcctaattgaaacctctccatcgttactggcagtcgcaggctcatcgagttgaccatggagatgatcccgaaatcccgaaacgcgtccgctgatcagaccctcgttttcttgataattagaacgactgcgaagaatacccgaatactccaataaggcggagagcggtgcctggattatgtttgaagcggataacaagccgaatcttctagaactgccactagaagaagaagacgaagaagaagaagggctgcggtacacgtcggaattgctcccaggcgcttccatttgtcggagtgccctaaccctaaaaaccatagcgatgaccgtattgaaaaaagccaagaacaaaatacatttacacacacgcatataaagaatgaaattgaagaaaaggcagatgaaggaatcaagtaaaagaaccttcgaaagcgaagctccgtttgtagaaagtcaaaatcaagaaggatgttacgtcgcaaaccctaacccaaataaagagaaagcaaaacaagaagaaatcgcatggtagttcgagcgatgaccaatcaggccacgggcgaaatcgatcgaagagaaagtttcaatcaaaatcaacgtggagagataagagagagaaggttgaaaggtgggtctggtctggtctgcactgctctctgctcctctcttctcagtctgagcacctatcaattatttgtttagagggtttggtggtgtcttgttgttattttaatattttaacaaattccttcctctattttctcgctcaatttaataacagcgcgagacgagaagagaaagagaagagat

SEQ ID NO: 184565 - DNA, 2618 bp, Cannabis indica
cagactaagtaacactgtggagctagaactagcagtagaaacaacagcagagttcttgaacaaagcagtcaagccaatccttttggctggaccgaaactccgatcagcaaaagctaccgaggcattccacgagctttctaatgcgagtggttattcggtggctatcatgcctacagcaaaagggcttgtactagagaatcaccctcgcttcatcggtacatactggggcacaataagcactccctattgcaatgagactgttgaactggccgacgcttaccttatcgtcggcccagtattcaacgattatatcaatgtagggcactcgctcttacttaaagaagagcgagccataattgttcaaccccatagtgttagaatcggaagaggtcctacctttcgattcgttgagatgaaagacttcttagtggcattagcaaagagaataaaacacaatacaacatctcatgagaattatgagagaatgtatatggcagatgatggaggtcatcctctaataatgagatcttcttggtcaagtggtgatgagatcatgatgaagaaggaggcgttgagagttaatgtgttgtatgggcatttggagaaaatgttgtctagtaacacaactatgattgctgacactggtgtctcatggtttagttgccaaaagctcaaattgccacaaggatgtgggtaagtagatcgtttctaatattattattagtgtctttgtgtgttaaaatttattagtaatattctttatcaaacttttatacatatttattcttacactttatatatgcaaacaataaatattctaacaaattggaaaattttgggggtgcacaaatgttttcgatatgcagatagttgttgtcttaattttttttatatgaaagtgtagcaaattctagcaaaattcaaaataattgaacgcgctagaaataaggtttaaatatatttttgcaatcgtactttattttttttattttaaaatatttgtgaattagattgtttgaacactactttaatttctcaaatatttatatgtcttaaataattacaatatatactatttttcaaaaatttaaaattataggcatatgcgcatataaaacatacaaagaagcatgaatcgctacacctattttttatggatgcgcactgtagaaacatcctatatcatttacactacatttggatgattatatttaatggtgtaggtttgaagttcaaatgcattatggatcaatcggttggtcagttggagctagtcttgggtatgcacaggcagcatcaccaaacaaccgagtcattgcttgcattggagatggcagttttcaggtcttatatataattaataattattaattaatttacattttaattaatttacatcttaattaatttattatataattatatagatgggtgcacaagaggtgtcaacaatgcttcgttgtggacaaaatagtataatatttctaattaacaatggaggctacaccatagaagaagtcatacatgaaggatcctacaatgttattaagaattggaactacactgctttagttgatgcaattaataatggtgaacacaaatgttggaccactaaggtacatattaattaagaaaataaaaaccactacaaaaaatgtcatttttgtcagtatatttttgcgtcgacaaaagtttgatattgtactggtaaaatgaaatttacttttaatgtgttggcaaatcattaacgttgatattagaacttttaccagcgcaaaatgaaagcactggcaaaaatgacctttctcagcacgtaaatgtgctggtaaaaattagacttttgacactgtaaatgtacactagtaaaactttgaccttattgccaacgcatacttttaccagcacagtaggaaactacattggcaaaagtgagatttcttgtagtgaacgtaacactcaattaataatattattaattgtttctcatgttatatttttaattattttcaaattattacaaggtttcatgtgaggaggagcttgttgaagcaatgaagatggcaacagaagaaaaaagagagtgtttgtgcttcattgaagtgttagtacacaaggatgacacaagcaaagagttggttgagttctgcttaagaacatcccttttcacttctcgatcacctaattatattttataatcttataaattaattacaataatatctcttattttaatttagtctcaataaattgaacttgtgctaaaaacttatcaatcataatttatataatatgcatggttattatatatatatatatatagacatgacctttacagaggactactgtatgttatgtataataatattaaaaacaatttgatctactacttttttcgcttatttatccccgaaattatacccatatattgattataaattaaattccaatcataaaccctaaaaatacgccaatttctcgtcgttttttggctgaaaaatgttaagacccgattgacaacgggccttgtcgtgtgggtattgtagcaaggttgaagatgactctacgtgggacgaagcccacttgcgactgtcggacagtgagggagagtgtggtagttt

SEQ ID NO: 184566 - DNA, 3927 bp, Cannabis indica
acaggcacggttgagattagaaatcagggaaaagaggaagaacagggaaagtggggatcaacaaaaattgtaaataactgaaaactgcctcagagcatgaacatgggcagacactctttcatatattgcaataaaaaatggccaaattaggcagagtgtaaatttccctaaatcttttgaattaagatcccacatagaaataatttttttcttatcaagtttgttgagggttttatttttaccatctaaagtaaaaggtcattttaagaaactttattttgggttaaaaaggaaggtaacggtctaatttcacggacaggcaacggctctctaaattcaaatttgaacgagcaatcaaatgattcatcttcgtagtacaaacatttctatcctgtcctttcttctcaaaaactaacgactacttttctttctcagagaaaaaaaaaaaaccaacgcttttgcattaattcgtaaagtccagatttcatggaacagacccaattcagagattcttatcaagactcagaaaccctaacttggacctctttgggttctttggctactgataccagtaaagacgattcgaagattcaagattcgaaagatctttccatggccgagggcgaattttctatggtggattcaatgctttgcgattctggtgcaagggtaatatcaaccgggttaacgagacccacttccacaggttagtgttttctcgtagttcttgtttgtttttcttggaaaatactcgaatccgaaaataaactttaggaaacgagaacctacacttactaatatattttctcagcgagcctaagtagtcccatttcagaggaacttagttacgtccctaaagtagtcccatttaagttagtgaaatgtaagatctagaaattgataaagtttgctctttgttcctcaaaacattatccaagggatattagctgtatagttatatgtgtataattggtttacgtatgaacttgactgagtaatcggaaatcaaacaatatttatctaattgtaacgatttgggaaacagctgaatatgtgatgttcatcaatgctggaggggaggttgttcatgaaacaggctctagcttaaaattactgaaagactcttattatgagggagggaatgtcatacgaaccaatgagcaaataactcatgctggagattatccgtctatatatcagtcagcacgtttgggaaatttctgttatcggttctatgatctttctcctggagagtattatgttgatcttcatttcactgaaatcattaacacaaatgggccaaaaggaatgaggatgttcaatgtgtttatccaggaagaaatggtaagctctcaagcgaaaagcttatacagtgtctttgctacttatatttgtttttatttatttatggtggggaagaaggaattagggaaagtaggaacaattttcattttggtgtgaatactgcaggtcttgtcagattttgacatttttgctgttgctggagccaataagccattgcaattagttgacttgagggtctctgtaaaagaagacagaacacttgttataagatttgaaggggttattggaagcccggcagttagtggaattggcataagaactgcaccaccaactgtatcaggtatctttctattgtaatttcttccttcatttagtattgatttgttatgtagtgaagaagatatcttcctcatgttattactttctaaggacacttcaattaatggcagatctacatcccactacacatgaatctctcaaatgtgacaactgtgccgctgacatagtagttccttcagctcaggttagataaaactgacatgaagagttataaagcttgccaagccgtaatttactaatttaaagtctatggtttgcagatgaaactaatccaaacaaagtctacagctaaatatgaaaagaaggtgcaagaactcaccacacaatgccagcttaaggcaaaagaatgctatgaggcatggatgtcattgacttctgcaaatgaacaactagacaatgtcagaatggaacttcacaacatgacatttaagaaactctctcagggtaagaattttcaagattttccagtttgatgaatctaagcatgacaacctcatcatgcgattatctttatgaacatagaatgtgtggttcagctaggttacttgtagcttaaggtcaaaatggagagtgaataaaatatgaggtcaatgtgcttaatgctatcaacagaatatttgatatagtttatttagtaagatttttctttcaaagcacactcaacaaaatgtggttaatcagttattgccaatgaaaataaaattagtgttgaaaggaaatgtggttaatcagttattgccaatgaaaataaaattagtgttgaaaggaaatgatcaagtgtacttttatcttaagaatggtcattaagattggtagccataccattaccattgattctgtattatgtttttgtccaaggtaagaccactcttgacttttagtcttttttgttgactcattagatcaagctatggaaaaagtagcagaagatttgagagatatcaacagcaagtatgagcaggacaagaaacggtgggcagtggcaatcaatgatttgcaggaaaaaattgaggtagcaattaaaatgcatgtgattgcagatcagcatcaacgtaaaggaattttactctcgttgatctaagtttattgacacaaatctctgattgcgtttcttatgcagcttatgaggaaagagcattctaaactttcacacgaggcacatgaatgtgccgattccattcctgatttgaataatatggtttctgcagttcaagctctgggtatgtttgatttactttaatattttcttttaaacttgtgcatgtttgctcttactttcattttctgttctcaatgtatttacatggacttctggaatattactacagttgcacagtgtgaagatctgaaaatgaagtacagtgaagagcaggccaaaagaaaaaagctcttcaacgaaattcagaagctaaaggtatattttttttttcatatttcctgatgtatcatggtttcttatacacaataaagttcatatatatatcttgaattgttttaggcaatattagagttttttgtcgctgccgcccattaaataagggggagttggcagctgggtgcacgacagttgtagactttgatgcagcaaaggatgggtgtcttgggattttaagtactactgcctctaaaaagtctttcaagtttgataaagtttacacaccaaaagacaatcaaggtattgtagttatatagtttgattgcctatcatgattttgtttgctgaaacaattatgaacatagttattgattgtgttgacagatgatgtgtttgcggacgcttcaccaatggtgatttcagtgctagatggctacaatgtctgtatatttgcatatggacaaacaggaactgggaagacttttactatggagggtactgaacagaacaggggagtaaattataggactcttgagcagctgttccaaatttcgaaggaaaggagtgaactgtttacgtacgacatatctgttagtgtacttgaagtctacaacgagcagattagagacttattagctacatcaccaacatcaaagaagtgagattactctttctttttcttgaacatagtcaactgaattggctgactttgcctaaacatttttatcttttgtgttattgtttgttagattggagataaagcaagcctcagaagggtctcatcatgttccaggaattgtagaagcgaaagttaccaacattgatcaagtctggactgtattgcaggctggaagcaatggtagagctgttggtagcaataatgttaatgagcatagcagtcgatccca

SEQ ID NO: 184567 - DNA, 11366 bp, Cannabis indica
aaaaaaaaaattgaagcatttggttttgatgatatctatttttgaggtttatcattataattatgggcttgtttgttgtattgaggaaattatgatttgagattttctgcagtgaatgttcttcttccttgttaggttcatgatgttatattttttgtactaatattactttttgtttactagtttacgtggcgcttgttaaagaaagctgcacatgtattttacctacattttgcgttgaagaaacgtgcttttattgaggaaattcaggagaagcaggaacaggtgtgtgcttttcacaagtgaacaggtgtaatttttcttttagtcatctgcaaaactttggccagcttaaatatttatctgtgaaggtttggattttgatgtagtttccattggaacattatattaaaggttaaagaatggcttcaaaatctaggaataggagatcattcagcagtggtgcaagatgatgaagatgaggccattcctctacaaaatgatgaaagtgctaaaaataggtgacaatatgcttaaactttattactataactggatgctatgattatgtctattatgttatggaatttttatcatagagaactaataagttggttcctggttcagagatgttccatctagtgctgccctgccaatcattcggccagccttgggaaggcaggagtccatttctgatcgatcaaaggttgcaatgcaagggtatttgaatcactttctaggaaatatggacattgttaattctagagaggtatgcttgtgtttgattctttttggtagtggattctgattcttgtttaactgtaaatgttggttttggtttggtctatgactgtcttatattcgattttgttgatacactgaactagtgcagcaaacatcatgcattagcaaagtccaatttgcatactcaaattgcacactaactattgttgtaattgttggtagaattacacttcccaattttcatactggtgcgatgaacttttggtataatggattcacaaactattgtattttttttaagtaatgatagacactcccaatttgcataatcaaattacacactataatgtgtaattaattttaaccatagatagtagtgacaacatcatatttaattttatggttgagattagatacacatcatagtgtgtaaattaagaatgtgtctatcattactcattcttttagggtgtgatctgtggtcctattttggttaaagcctaaataacaaaaagataattaaagatcttttcatggtgaaagaagtttagctcaaaaagaaaaataaagcagttagagtacattgattggctttgttgactcgaatggtgaatcttaaaggaccaagttgcattttagcggttcaatactgttactaatgctaatagtaatactcagaataatatttaatatcatcttagattgaacataatgttgtattgttatgagaaaaattattgtaaaaagcaatatatactgaacttcttgataatcttctagatatgagagcttcattttctaatatatgtattcttttctaaggcagaatagaattttaggagctatgaacaacatactttaaattttgttacaattccataattatggaagactttcatatgaaaatattgatattattatgaatgaatgacatttggatcttataaccatattatactgcaggtttgcagtatttttggaggtttctaagttatcatttgctccagaatatggtcctaagttaaaggaggactatgtgatggtaaaacatctaccaaaaattccaaataatgatgattcaagaaaatgttgtgcatgtgattggttcagttgttgtaatgataactggcaaaaggtaataatcctgttttgaaagtcgtttttgttttttttcctcctttagacatactcttctgaaggattgttgcatgtggctagtagcttagaagcttcattttagtcgatgtatgtataatttgttaccacaataagatttattgtttaattaagttaatattaattgtaagcatgatactatcgttattccaaagaagcaaatattattcctttgacatcgttttggatttggtgttgtgtaggtttgggctgtactaaaacctggatttttggctttactagcagatccttttgatactcagccattagatataattgtttttgaagtactgccagcatcggatgggaatggcgatggtcgagtatctttggcaaaagaaataaaagaacctaatccactacggcattcatttaaggttagcaacatctataattcctgtttgggtttgcgtgtagtgccttacatatggtattggtatctgaatttgaaatgtcatattgatgtctgctctaaattattaaacaagttaatgtgcatctcggttaggctttttcattaacttgcactctttgtaggtttaatgaattccttgtttctattgatgatattaatagatccctaattttcttggatttaaacttgattcatggttacaagttcctgttagagtacatttttaattaagaatagtcaagcggatttgaagcctcaagttgtaaattatgttggttaagagagggtttgagtctgtttcttgtgagataatactggtttattgttctatatgtcaggtatttgttgaaaatattaactaggtcccaattttatactcccagtatggctgctaatattttcaccctattattatgcgtttagaaactttgaactgcatcatgaatgacaatggaacttggcaagtagttaattatttatttggtttgaacttttacgtaaactaactttttcctgtgggttggatattttctaacaaataatgaatatgttctaaaggttacttgtggaaatcgaaatattagattaagggctaagagtactggtaaagtcaaggattgggttgcttccattaatgatgctggccttcggcctcctgagggctggtgtcatcctcatcgctttggttcttttgctcctccgagagggctgagtgaagatggtagccaggcacagtggtttgtggatggccaggctgcatttgaagctattgcttctgcaattgagggtgcaaaatcagaggtctgttctgttattttgccacactttaagcaactcatatagaatatttaagcatcatctttgagttctgaagattggaaatcttatgcagatatttatgtgtggctggtggctgtgcccagaactgtatttacgacgtccttttagtgctcatgcttcttctaggcttgatgttttacttgaagcaaaagccaagcaaggggttcaggtattgtgttagagaaaaagaactttgatacatatcattatactcattcttatggtcaattaacacggcaaaattccttaataaacttgggaggagttcaacatgatctttgtcgctttttctaaaagaaaaaattaacactaccaaatgcatattttattgctgatgcttgtgcaagatttcttaagttaatccccattccttaaaaatagaatttgcttcttgattttacttttgacattgaaattactattgactgcagatttacattcttctgtataaagaggttgctcttgctttaaaaataaatagcgtttatagcaagaaaaggttgcttagcattcatgagaatgttagggtattacgttaccccgaccacttttctagtggtgtttacttatggtatgtattctgcttgcaattcacctttggagttttctaaaacacacgtgttttagtttatccttttatctatcggcagtttctgatccgaaaaattgggttaaatataggtcccaccatgaaaaaattgtcattgttgattaccagatttgttttatcggaggcctggatctatgctttggccgttatgatacaactgagcacaaagtgggtgattgccctcctctgatatggcctggaaaggactactataaccctaggtgagcatcatttttgtaagatgggactactattcttaagagcatgaaaatatacgtgtatatcatttctgctaaaacattttacttttgtggctgatttatatgtatactgtgaattctttgctgaatcaatgtttgtgtacctttaatatttaaggccagacttgcaaaattagagtatgtttgttgtggcactggtatctccagagcattatatttgctctcattttatgttatgtaattgtattatcatcttgcctaagatgctgctgatagtaggttacatgcctttgattacagccccattttttttgcattctgagtaatttccattttaacgtaaagttgctattattggtttctaccatggattttataacataaattttattagggagtctgaaccaaattcttgggaagacacgatgaaagatgaattagatcgtagaaaatatccccgcatgccttggcatgactgtcccattgtgccttgtggggaccaccttgccgtgacatagctaggcactttgttcaacgctggaactatgcaaaggtgaggccttttccaattgttgcttaattttcatttatgatggtataaatgaaggtgtatgatctttacaaaatgtggatgttttcagagaaataaagctctgtatgaagaagcaattccgctactcatgcctcagcatcacatggtcattccacactacatgggaagaagccaagagatggagattgaggttacaaattccgacaatcacaagggaatcaaaagacatgaatctttctcatccatgtcatcttatcaagacattccactgcttttgcctcaagaagctgatggtttggactctccaagtggagagccaaaaccaaatgggttgaattcttcttcaaatggtatctccttcccattccgtaaatcaagaatcaaatcagcaagtcctggaatctcattgagggactttgtcgatgactttgatgggaaattggtttcagatgggaagaaaacacaacctggcatgaagcatccagattcggagtggtgggaaactcaagaacgaggcagtcaaggtggcttcatggatgattctggacaagttggtcctcgtacttcatgtcgatgtcaggtaggttgatagttgatactttcaactttcaggttctaaaatttcagtaacgcttttcccatgggagtatcaatggcttactgacctgatttttctgttgtgctgatacacaagttatctttctggtagtgagtatccattgtacatttgtcactttaaccttgtgaagaatttttttctgatccctataccagtggtagggacgattatctagatatgtatgcattaatatgttatctaatagtgttaatagtaatattgggctttgtaataccctattataattattaacatttgttattcaggttattagaagtgtcagtcaatggtctgccggaacaagtcaaactgaagagagcatccatagtgcttattgctctcttattgagaaagcagagcactttatctacatagaggtactttattgtttaaaacctcacataagttacaaacaaccttactaagtttcactttgtgttttgccttcctgaccattttttccattcttgtgggacttgtacagaatcaatttttcatatcaggtctttcaggagacgagttaatacaaaatcgtgtgttagaagcaatgtttaggcgcatagtgcgagcgtacaatgacaataagtgttttagggttattattgtcataccacttctccccggtttccaggttgagcatctcaatatgttgctactcatttcatctcttctctattgtatacttgcattcataatttcatataataaactttttgtttcacagggaggtctggatgatgctggtgctgcctctgtaagagcaatattgcattggcaatatcgaacaatctgtagaggaaacaattcgatattgcataatctgtacaatatacttggtgcaaaaatgcatgactacatatctttttatgggttaagggcttacggtaatctttatgatggcggtccattagcctccagtcaggtataccatctgttgtctaggacatttttactcttttctcaaattatggccctacatctcagcatttaacgcagtacttttattggtgttgcaggtctatgttcatagtaaaataatgattgttgatgattgtattactttaattggatcggctaacattaacgacaggagtctgcttggttcaagagactcagaggtatgtatatcttctaaccagatttcgtatgcttctaagaaattatcatattaagcttctatttattttttgagtaaatactaatttagacctgtgttttgcaaaagttactaattggattctttattttgttaaatgataaaatggaccctgtatttttcaaaatagtaaaaataagatcctaagcttaatttttaacaaattcaaaatcttatttgtactattttggaaaaacacagggtttattttatcatttaacaaaacagagagttcaattagtaatttttgcaaaatacaagattcaaaatggtatttacctttatttcttaagtcattgaaagttgtaaatgctttctttctgttatgtttggtttggactcttgaaccttaggactcttgtggagcaatcttgttactttgaataatgtttagtcattaaccataattttatacaacatacaaattttagtacattgacaggtttttttttttctttttaagaataacaataacaataataaaaaagtatgcatttaagcctactcctgatttatgtgcttatttgccttttgtgctttagattggtgtacttatagaagacaaagagctagtcaattcatatatgggaggaaagccatggagggcggggaagttttcttcgagtctgcgattgtctttgtggtctgaacacctcggtcttcgtgcaggagaggttagtacttatcaaattctctgtttctttccaaagtgttaactaccgtgctaatgacatttttatgtagaattgaccagacttgttacctaatatattttctctttgttcactcttcaaatgtcatcagattcagagtataatcgatccagttgttgattcaacttacagagatatctggttgtcaactgccaaggtaagacgaaaaaaatgaagataactggttgatttacttgtgtttgaacttttgactaagtattaagttaaccgtgtattattgtgatttatttggcagacaaatactgccatctttcaagatgtattttcttgcacaccaaacgattttatacattccaggtatgctatattcagttagttaaatgcgttacgaggctcaacgctcttgttgtgttaatctctgtcgttgttgttcatacagagctgcatttagacaaagcatggctttctggaaggaaaaactcggacacacaacaatcgatttaggaatagccccagagaagttagaatcttaccataatggagatgttaaaagatcagatcccatggacaggttagagtctgtcaagggacatctcgtttcattccctttggatttcatgtgccaagaagatttaagacctgtgttcaatgagagcgagtattatgcttctcctcatgttttccattgaaagctcaacaacacatctctcacatgcagttatatatttggagtcttgctttttttaaagcctcaaatctttgtatacattcccattattttttcctttgggaaaatatttagcaaatatgcatattaataaattataatgagagaaccaaaaagaaaaaatatacgtgaggacagagcagaggctaccacgagccactaatagagcggaaaattacctttgtaatcatcttgactgaagggcaagggcgcatacttgttacttacatttcctgcgtgcctcttcatatccatccatagatatttatcattatagcaaaaaaagtttattctatactatgcattttttcttcttttttctaataaaataatacattatgatgatgtttaagcatttataaagatatttcaggttcgatgttagaactcaagtggttgggtgtcggaggttgtacttgtatctatcaattttatttacttttatttttcaatttaaccacggtcattttaacaaaaactgatcagttctcaaataataacaaaaaaagtaatgaattaatacttcggctaaaagtaaactattataaaaacattaattagagaagacaaatgtcgataattattatttgatttgtaatttgtaatttcatctaaaaacaactgatggtaagtaacataatttaaaactgcataatatgaagaaaaaaagtgatttgactattcctactattaatgataatgtaaaaagaataccatattttatgaggaagagtagatgtacagaaaattacagcaagacatgcatatttccgtgtttataataaaatgtaggcaattggtctaatcaatgccagtagattttttatgtctaagaagctttggaaaaaaataagtgggttcatatattagagttgataaatttcagccaccataccgagtcttaagggattctgggggctcctcttccatgatgcctgaacctgttgtagccaggtactcacggatgttagttttacggtctccaaggaaagtgtgatctaagaagttgttataggcttcatcactcagatttttggccgctaacacactgcattgcaaataaattctatatataatcaacacgttatgatagatcaaaggactaataaagtatatttatgaatcatcacaataaaaggactaataatgttctccataaacgatcaaaggctcaacattcatgaaatcaaaacccatatacacaacagctaagaacaacgaaaacgaaaatgttgaaatcacttcacttgtaaacaaaactgatttcgtgattcttccactcttttgtaataaaggtagggaatggctctcttttcatgacaagtacctcaataacaataattttaaaagtatatgtagtgacaatacaaacatcaggaaaaggaacgaaacataccagtgccggagataagcacgacatggtaagatatcatctcgccaaatctgatcaatgccatatcgtccatagtgttgaaaatagatgtccttgcttcctgtaaaccaacatgagaatatcaagtgaacagatcaactgaagatttactaacatcataataagtatgaaagcaaggaaattaaatgggaatgcatgcatatatgaaaattccgtgtttcttattatactgcatgaggtggcatgtttataatttaatctattttatgtaaatttttgcatttgtctttctaaatatcttttttaactttcgccccagtaagtatacagacagactctctaggttcgccactgaatactactactagtactaatcatcactaagtttccattacattaaaaataaacttgcaaggactatatttctaacattttattgaaccttaatctagtgctatagatcaaaattgtggtaaagattatatcactaggaaactagtcatcattcaacaagtcaccaatatgatcagcctttactttctcctaaggctatgtattatgcaatttcttgtacgtcctacctaaaaatgcaaaagagatgtaataatccctttctttgcgttattgactgtatgaaagtaatttagtgtcacactctcaacagttcaagaacaaataagatggatgaatatacttatagaaaataaatatgtatgtgtgtatttatgtagtataaattataatgactttctacctttacatctaatccggaggaattcttcatcgctataacgagcacaaagcacctgcattgagatgcatgtatagaaaattacataaaatcaaataaggatgggaagaaaacaataatgcgtttactaaattataatccctcaataatatctacacaccgctaatttatcaaacggcttctcatcaagtgtttcaggcagaacctgccatataagaagaaagcaactcagaaaatcaaaacaaaaacagcttatgttgcgaatcaaaactcaaaattataatgtttaatggcagtaaactaaaagcttacggcaaggaatcgaaattcaagctccctctcaagaaatgccgggatctgatcataatgaagttgagaaaacagagaatcaaatatcattatatatgtcaattgaacattgaatcaaaccaaactgatacgtatcgatattgtccatacatcggattttgaaatttcgaatactgttacaattagtgtctctccttcacaaggctcaacacttaagctcgatatttcctgcaatggtaaagaaagaaaagactcaaaataattatatttaaggtcatatatacgtagctcgttttctcaatttccgagagtatgccgtaatatagataagaaaattcggaaaatcaaagacgaagaagaagaagaaaaccttggtttccggcttcgctattccacgctcgaaaaaaatgggagcaacatgagcgaagacgcgacgaaatccattcaatctggcgactctgaagttaataagatccggaaatgtactcctcgcgcttctctctggtttcacatcacatcagtaaagtacaatcaaccagacaacaaaatcaacagagatgaatgaaggaactgtacgtacgtaccagagaggagtgaaccgaagccgcaaatagagatacgaccgtccgatgcgacgatattatcaaaatcggactcgtgaatgagctccctaaggtccgaattgttcggcaaaggttctgatcgggcatcggagtaggacatgacgattatggtagatcgcgggtggagatgatcggatttaacggcgccgtaggtgaagagagcaagcggagttgagagtgagagtgagggtttgggtatgacaggaaaagggcggtggtgagggtgagaaaacgcagaaggcggagcaatggagaaaggaaaagagcaagtggaagtgaaggtcatcaagttcgagttggtgacgaaactcaaattttggaggggaaattgatttatttattttcgtattcgcagacttggataattggattatactttgaaagtttcaacaactttacttgtggggttgcttttgtttttcgttttttcttttacacttagacttggagggattctcttttttatctttacaagtttgaagagtgcaatctcctattataatttttgaaataattatatatgagacacaacctcttctttttttttcttttttt

SEQ ID NO: 184568 - DNA, 5742 bp, Cannabis indica
ctcagtatacttcttaattcaattggtgttttacttgatattcttcagtatcttagaatgctggcagtggcttacgaaaagactcaagaacttgctagagatctacgtgccgtgggatgtggtgacttggatgttgaaggtattctctttgtggatgtattcttggaaatttttatgaaacaaaaggcgctttgttagaaattgcatttgcatgttttgctaatagcaaatgaatggttatcatactgattttgcttgtgggtgctcttggcattatagaggtcatgtctcatagaacagattagtgaatagtctgagaagcaccgtgctttcttgatgtgtattggggtactagatgagtattctaaggaacttctgcagttacttggttagctatgttgcagtgaatcgtactctaggtggatgaacttgcaagtaaaagaatgaatagatgatgccattatataccacacctgttctgagcctgctttttagctcctccctgaaatataattacctgcttacttgatgggagtggttattttattttagttaattttttgtcaacatcttttgctctcaggtgtaatttatcatgtatgctattgattggatttttctttcagtgattgaataaccttctgggagcttattaaaactcgttttttggtgcaggcctcacagaatctctgttttctgctcacaaggatgaatatcctgaacacgagcaggcctcacttagacaactttatcaagcgaaggtttgtttaattgcctcgtgaaagtttcaactctgatgtagctttatctgagataaaagcattatgttaattccattgttcagatggcagaattgcgtgctgaaagccagctatctgactcaactggaacaattgggcgctcaagaggagctgcagcagtgtcttctcaccagcaaatatctgtcactgttgtgacagaatttgtgcggtggaatgaagaagcaatttcccgatgcagtttgttttcaactcaggtaatatttatctgttttgccatctagatttcacacttaatttataattctcactggtactttactaacttgaataaacaacagaagttgcagttttttctcaaaagtttctttttgatgtcctcaattgttattgagacataatagaactaaaattcagtcaaatttacatcaatgaagttgggtagaagggtgttacaatgtttgtggatttgaaaggtggtttctggctactagatggtcagagatcaaagatgattgtgtataaaacttgtagttgcatggtggtttttgtgcagagtgtcagtgtaatggaattgtgaagtgattagatttgttagggttcaaatatttaaaaaaaggagacttgttgaatcataatccttacaagtagtgcttttgattatagaggaaaactataggtgggttgcctgtgtttgttgagtgtgattgttatgataaaatgaatcatgtattgtcatgacatggagttgaatttagcgtgcagaaacttaaacacaagccgaataggataaaaaataaaataatgagaagtatactttctagtctatatccaaggttcctactagcatggccactagtgagaagctaatctggaattagtatgagctcatgaattctgtttctaaaatgtaaaatcttgaatattggccatggagagatgaatttctagtgagacttctgccacccattcttggtggttaaaaattggctctaaatttttctggatttgttttgaattcaagatatttgttcaacttaacttgaatgatcttgtgtgtgttcttgtacagcctgctacccttgcaaccaatgttaaagcagtgttcacttgtctactggaccaagtaagttggtgttgaattaataggttcactaaatatgtgtggtatgccatatttattcaactctatcattaccctgttctgttttccaggtcagtcaatatataacagaggggcttgaaagggctagagatggtcttacagaagctgcggccttgagggaaagatttttactgggcactagtgttagtagaagggtggctgctgctgctgcatctgctgtaatgctccgactaacagtctctttgacattgaaattgaatttatttattttctgttgaaaagtgttctttgaaggaaaacaagtgagcgattcagagaacaaatttttgagaacaaagtttgggaaatagaagattttgagcacaacaaaaaattgtctttctgtttctttttttttgcccaaatatatatatatatatatattcaattatttttagaaaacattagctaagcaccttttctttattcttaaaaacaacaaaaactgggattttttaaattctgtaaagcatatatccttatgttttacttagaagcaattcatagacttcttaaaaattggctgacgtaaagattattttattgttggtgtgtaggcagaagctgctgctgctgctggggaaagcagctttagatcttttatggtttctgtgcaacgttgtggcagtagtgtggctatagttcagcaagtacgttgagctgtacccaaatcgtgttgaattcagctcataaaatgggtggcttcatattgtttagagattaatttgttctgaactttgtctacagttctttgccaattctatatctcggcttctcctacctgtggacggtgcgcatgctgcttcttgtgaagaaatggcaacagctatgtctagtgcagaaggagcggcctataaaggccttcaacaatgcattgaaactgtcatggctgaggttagtatcaccctgaggacctgctattggcatttagtcaggaatcacaagctctatgtccctttaccatcataacatataaaatgattgtcaactgctgctttatgaagggtttctgttatttctagttgacagatttccagaatttagattctattgtgctaatttgtctcttttcttgaaccatgtatctttcccttgtgaaacccctctgtgcaggtggagcggttactttcagccgaacaaaagacaacggattatcgttcacctgatgatggaatagctcctgatcataggccaacaaatgcttgcacaaggtacaatcaaggagttatccatgtattttatggaaacatgaaccaaaaccagaaattggtttgcttcatgatttcccaattctcatttacatttatattcttcttttgtgaataatgagttagtgccaaaaaaattaccgtaggaacttttgagtgttgttgctgttagtgctaacctaagtctacatccttcccccttcagcttgtatttctgtttcttattaaaaaataagaagaaaatagagatagagacagagaagtgctttggagtcttcattgaattgtttgactttatatatggttgcgtatctttatatatgattcaaaaatgttacaagctgcaaaataaattgttaatattggagtatgatcaacaaataatgtgttctctcttaattttgctagagtggtagcttatctttcccgtgtactagaatctgcattcacagctcttgaaggccttaacaaacaagcatttctcactgaactggtacgggttttatttacaatttctcttgactcatctattgactttgttggttgtgattagttatgctggttcttgtgcatatgatagataatttctttggtgttcatggttgtattcaaaaaggagcattcatatttttgggatgtgataatgtctgatctgtttaatgcctttaacaatgcctctagaacactggcaaaaaatttcactttaaccctccatagcttcgttgatcagttcttaacctgatacactgcaatttctctgagcacttcatacttgatgatgttgttccgaacaaaccttcatttttaagtgcttatgtgatgccattcattttctcattattattttgtttgtcctttgggcccgggattactggattagggtgtgtaggaattgggtactttaatgatttctgctgaattagagtacgtttcccatttgaattggattttttcttgcaattgctgatcagggaaaccgcttgcataaagggctgcttaatcattggcagaagttcacttttaatcccaggtaacagacatgtcaaacattctgataatttagttgaaagagagtttttcccccaaacttttttatgtccacatatggagtcatttaagtgttttgctattttctttttgctgattcatgctcttgtctttgtttctcaattctaaagcggaggtctgcggctgaagcgtgacataacagagtatggagaatttgtgcgtagtttcaatgctccttccgttgatgagaagtttgagttgctgggcatgtaagtacttctattccctccacttgttccattttatatccacctttttagctttcctcaaatttcctgatgaattttctatgtccagcatggccaatgtctttattgttgctcccgaaagtctctccactctatttgagggtactccaagtattcggaaagacgcacaaaggtattactggtggtattttgaggattgtgtttttccctccttcttacattgtgacaaacttttaatttggcttccactcaggtttattcaactgagagaggactacaaaagtgcaaaactggctgctaggctaagttccttgtggccaagttccagttgatgaagtagtgtgctgatttagatcaagcagctcatttgatgaggaagctggcagttaaagaccaagttttgataattccttgagaattaatttaagagttcattttcttgccggcggcgatagattacttccttgccccacttcatatttcttcttttttcctatattgatttctcctatttgttgagtgtatatttgtggaggtacaagtaggaagatgtgatagatttatagccttgaacgtcgaaagctttatttatgtccctagttcctgccaaatattatttgcctgaaaattcatagacatggtattctggtgtgtccttgaactccttgtaaatgattctttggagagttaatgataacaattaaagtagtgttgcttagtgaattattccttagatacaacaatctattcgtattgaaattgcagggaactcactggtttaaataatttgaagttactaaaatggctgcattttcaatatgcaaaatgcaaatttgaaaacctaaaaaaaaaacggagcttaaatcattttatttcatttttgtggtgttgcagaatttctcaagtgacaaaatgaaaattttaaattaaggaaggcttttgcaaatttcttttgaaaataccaccatgattgtataaatgaaaagactggccaaagcatttgacctaattctgagttagtcaatcaatttcagtctcacaacttattactaatttgagcaatttcctgtgaacaaaggttttttcctacttttcaagggactgtcaaaggtttactaattagttccaataatggaggcacaaagggaggtccaaaatgcaagttttctatactctatgtgtagctcataaatcataaattagaagaaaaatgtgagagataataaaaaaagtaaagctagtgactgggacacatgaccatgccccttgtggtttgtggtggggtgccgtttagagtgtcatttcctaccttaaaaagctctctctctctctct

SEQ ID NO: 184569 - DNA, 1669 bp, Cannabis indica
attgtagaaatcaccctatatatatacctatttaaattaatttaaaatatcgtaagaattaatattaaatttaaattacactaaattttcgtataaactgtacataaagttttaattaattaattattttactttattaatccatatttgtttttttttttgttttaatagaataattattatgtcacatttaaattgcatatagatttttccacgtatgaattcatttaacatgtttgtacaatagacaatgaactttcttaatggaaagtacatccatttttcttgtaagtagtaatatttaatcatttaagccattttaataactttatacaacattatatatgatggcatgatcccacagcattatattactgtatgtaatctatatttaatattaattcgtaaaattaaaagttttaaaaaaaaaaaactaaaaaaattaatttgattacatactatacgtacataaaatccattcttccatgtaatagttaattgttttttttttttccaaaatcaaacattataaaagaatttcttttattattattttttctccaaaatgttggacatcttaatatatagttatatataccaacaaacatatcaaatacactcataattatttcactaatttttctatatcttcattggaatcccctccccattttctgatcctgtcttcagctaaagaggcctgcatcacaagccacgtacgcagatcaaacacaatatcaaatgaaaatatataaaaattaattttgatttatgccaacaccaataattagttacctctttgctccaattggttgtgtaaaccatcagaaaaagaatcgaagtttgtaacacagtccctgccaacatcccataccaaatcccctgataatatttccagaaataatttagaaaaaataacaaaaacaaaataccatttttgttatttatagttttatatatttgacattattgggcctttacttacactaacacccatgttgagcttgtagcccaatgacaggcccaatggtactccgaacaaataataacaagcaacgttcacgtatgccacgaaagcttgccatccagcaccaatggcaacccctgcattaatttttaaaacaaataaagatatatatattttttaatattcataatatttttttaaaaaatagttattattaccagataaaactggttggatgttattgatgacgatacaggtggcaagaagtggggtgaggtttgtaacaagaattctgacacttgtgtcgtctgaaaataacgatgggtattgattgcgagtgatgaccaagattagagacaaaacgacaccgattaagaatgaagttattactgccactattaacgatacttttgctgttcttgggtggtctgcccctagctcgttcgatactcttacactacaaaaatataatatcataagaacaaattgtaatatgatcttaacaattaattaatattttaattttttaaggagttactatataatatattaccttattgctgcattcatcccaatagccaccatcattgcccatcccaatatgttggcactgcaaatatattttaaattaataataagtactagctacaataattattaataaaaatatgacgatttttgtttttgaactttgacatgtat

SEQ ID NO: 184570 - DNA, 5418 bp, Cannabis indica
  modified_base (4)..(4): a, c, t, g, unknown or other
tttntttttttttggggaacaagcaaatttgtattaacttagtacacattaatattcgggattcagtacttttttttgttggaacatattgtttgaagaaaaagaaaaagaattttgtaaatatttctggattaaaatggaagtaaatatcagagtacattaaataccgaattttaccgaatttgtctatttttttttttcttttcttttttcttttgagagcatatatgtattaaataaataatagttggggagcttcattgtacccataaaattaattaatgcacttcaatattatataaaataaattttaaaaatttactcttaatttagttatttttttcacattattttgtattaattttaataatgacctaaatttgtttacacaaatatattttttattttaatttcatataatttttttgttttaattattttgtgttaatattaaaatatattttatttttattttatatatgtattttaaaaaatgtgaaatgggagttaaatagtataaattaaaaataaatatgaaattaaattaataaaatagagtattttttttaaaaaaaaaattgagtgtaaatcaaatttttacacaaatatcatttttatataactaaatgtatttaattaagatgttctattattttactctttggcttacttttagaatttgcaaaatgatatttgtgtaaaaattcaatccgctcttaaacgtattgacttcatatttgaattttttaactagcagtaattctacccgctacctaaactctaaagtgtactgttgaatgtcattttgcgaaaaattattaaaattaggctaaaataatgaaaacaacttaaaaaggaaatgggttttctcattagaaaaactttaagatgtgttttctctattttttttttttgcttcctgcttattacttaattgttatttttacttattactgcttaatgaataaataaaataattaccattcaacaaaagaaatatatatatatactttagttgtaactaaacagtggcagaggctgctatacaatcaaacttttacaaaggaaaaccgaaaacaaataattaagaagcattggaaaactaaatctcaaatgcatcacgactctttggaataacactatctcaactttagaattaggaagatgccaaagaagtcacagtgataaatagtatttatttatttgtttgtttcagtcattaaaaaagaaagaataaagtattatattagaaatatctaaataataaaaaagggaaaaaaatgtaataattttcttgggagaaaataagccaacaatgacacataacggaggcgatagaagttgtatggaagaccgttcgtttacgatttgtactggtttccacacaaaatattgttcaattttatatggacaaaacatgattggctcatcttttttttctcttatttcagtccaaaaatccaacccactaggtcttcgcagattgattttattgaccacccaaactaaatcaaatgattctcttttctttatttttttaactttttatttggcaagtggattagaataagaggctgtgataaaacttgcttcgctttcttctatttctcactctttaattagtacacacacatgagacacctttttctcttttattttcttttcttttcttctttagtccgatgtataacaaagactgaaagtggtagtggtagtggagattattaaatgtgatagacctgaaagtggggtcaacttattttctaaataaaatatttcaagttttcaaattacttgtcatccaagaaacaatagctgccactcaaatggtcatgatactgtaggttgataagttgatgaacacaaagtgtttatgttctacatcatggccattacacacagattggaactagagaaagtatatggtatgtaggaagtatattatttgaactgtgaaaatcaatctagtcaacgctatatatccttatgtactaatacagaaaatggccctgaacaaaaaattgaaaactctacaaaaacattgttaatttttagtttgtgtatacgctttgcgcttcatatcttctatgtcatcaatggtttgtctttttttcctaatcaaattcttcattagattaatatccgcagcctggagagaacaagggggcgatgaagaaggaaatgctgttgattttcggaggaggtatctctgtttagcatcagccagacatagcagggattcactgcacacttccagtgcagaaggtggtcgaatcggtttgaacttttgtagctttgagtactctttgatgagatgaaacatgtaatcatagactctgtccacgctaaggctctccatcaaatcttgccctcctttccctatctctctagcctagttaacaagtagaaaattttaaccaaaatcaagtcatggactttatgaatagtaaaagaaaagtatataatatattcactagaaagaaaaaaaaaatatgcagacttttctcattctatgtttgcctaatgatatttgcaaactaagtggatgtggtaaacgttctagtggtcagtatagttccaacatacgtgtcattgtggtatccattccccccctttcctttttatcttttttaatggtaatggagaatttgtataacatcaccaacaagtgtgctactactctttgttcacaaaagtcaataatctaacaagttggaatctcaactgcagctaaatataataacatcttatgtttggaataaccccaaaagttcaactaaaagttaaaaaaagaatcagtaagaatgtataagttgacaaagcattatacatgtcaacagaaaatcaaattaagaagcaaaaacaaaaaacatacctcagatggatgggcattgccccagtcaacagcaaattttaaggatggacataaatcagtagaagagatcggccaataatttttcttaggaacaagaccgcggctgaaaaaatcttcatattgtggggatattattagtgcaagagagccacaagaaagaatatatttcaggctcacagaccaagcatacccttcagcatagattttatacctacaagggaatcaaggaggaaaaaacagaatcatttacctactttcagctcaatccatacagattatgcatattagtacaacaattatgcattttagacagtagtttgaatgaacatgaccatctgagacatggtttccaaacactgcatcaagttaattagaaagtgtactcaccgatagtcacactgattagaaagtttagacttctcgtaaccctcttgtgcttcttttgaccaatcctgcttgtaataagtggaacacatcagagaattgcttttttttgttgttgttgttgaggcattaaatgtacctctaaccacggttcaagctataaagtatccgttaattcaacctgacgcaaaatatgtgctccccacttccgtgagtgattacagtttagtaactctgtacgtatagtggaaccaacgtcaggatttcctttccagaatgcacggggccacttctttgtccaattccttttttgagaaccatgtttgatatctctgaactcttcatcccatggattaagatttgtctctggcctggacaagaaaatgtaaagtaaacaccatagaaactcaaaaaagtattactgatctagtcatatgtagacaagagtaggcaccattaccaataacccagagaagaaacattttcaagtttctagcctataaaataacgaggccatgatcatgactggtttgaggggatgacccaattatttcattttgttacattttgatctttgttaccacttaccactgtccatgcatatgcattcctcacttaaaagactgaaaaattcgatcacatctcatcactttgacaaaaaaaaaaaaataacataacactctcatcaacttctctactctattttagatagatcagaacaaagtgaaatatttcatgaaactcactgtttatttactttacataaatttctttgtattttctctcaccaccaataaattaatattattatattaatgaaatatgtgttgtaaaaaatatatgtataagacttagtaaggaatatattgtacttctctgtattttaaggatatttttttaagaaagaatgaaagttttacatcagcttttaggagtgctcctatatatgaaacatagatccttttaaaaccaattggctatacattttaactgactgtattacaaatattaactctaccactaccaccattgtagcataactatttctattgcatgacagaacatatttcagttcactaaatcacttaacataagctttactttggataatgaaatgaaaactacgttaagaaaataattaaatgataatcatatagtttaatgaaagaagagaatttaattcttaccaaccccagaaggaccaatcaggaaaagggatgtcaaaatgagcttgagtggtacagtaccgaaacagaggcaatggcatcgatccatgttcagttcggttaatactgggcttgtccatacaatcaaacatcatatcaacatcaggaaccatcccggggtaccttctaagaagctgcaacaaaccccaaatcgtaaacatagctcgactctgcacacacgcatagtacaagtcaacaaacaatctccctccaacaatcacaacccgaaacgaagcgaattcttgggctttcttcaaatgggtcttcgagattccagtccgggtccaaggttcgagatcccgatggatccatcggaagaattcagggcatgtctgattgctcacaacgggcacagaacgacgccttcctgtgatataatttggaatggtgtagccagtacaagtcaggtatgagcaatgaagtatcttatagacttgagcctggcgagtctcctcggagaaagattttggcgggaaaaggtgccatggggtcggctctagattgtggccgacgaccgttttcgtctgggtggcgaagtcgtcaacctgttatagacaaaatgttccaacgaataagtaaaaactaaaacattaaaaagaaacatgagagcatggggaaaatgaccttgtagaggacgagaatggtgagggagaggaaggccaaggcggtgacgcaggggaaaagataggatggtgagcggtgcatgattcgggcggtgggtactagtcccattgtgacagtgctgctgtgctgagtggtgaagacgatacagtctaacagtaacagcaatagaagaagtggtcgtaattttgggcaatttggattggatttccggaatctgagcgctggaattggactaacaaagttaccaagaatgagcggtaatttctgttatcaaaaaaaaaagaatgagcggtgatttcctgccacgtg

SEQ ID NO: 184571 - DNA, 4142 bp, Cannabis indica
cttttttttgtttttttttttttttatatattccctttttattattatgttagttgagtatggaaatgagttcaacatgtacacatatataaaaccaatgtcactatgtcagtatgtcactgtacagtgtcagatttaatataaatgaaagtgggtaggtttctcttcacattaaaatttgaattaagatattaaaaacgttacactagaaattaataaaaattaaatacttttaattttatcagttactagcttgaaacacatgaaacaaacatggtcctgccattgaaaaattggatgattatgtgaattaaattatttatcaagggtagcaataattatcagtccaattcataatactgtcaatcaagctaatgaattttgtctcttttatattcattttttatttacatagttttggccaaaattagtatgccacagaagcagcactcaaaaatacttccaataattcttcttctagttccctccggcttacttgctcagttgtgctccccagtccctactgctgctgctctccattggggtgagggggccctcttactcatccacgaatcctcttctgcagatgctccaagctcgccactcgctgcatcgatggtgttcgtcccattttgccccctgctgttgacctctgttgttgccccttttcaactgcagcagggatttctgctgagccattgttgtttgatttagtttcctgaggagtagttactggatgactagattcatagaactgatgatttgggttttcttgaacaggaacagctgcatcggtagatgtgtctgaagggcttccatcaaatgatggcatgtccattgaggatatttcagacattgtgttgaacaggtttgatccagttattctttttaccatctcctcagccatctttacctggtaatatatatcataactttttgctcatcttggactgcaacatacatgaccaataatgacaataatattagagtatgaccaatgaattgcttacctttgctctcagtgtttcaacatcagctttgagaactctattgtcaacagctgcttcattgtacttttggcttacatcagttaggcgcttcaatagcgtagagttttcaactcttaattgagcaacctgaagagtagcagcataaatacaataacaaagaaggtataatataccatcaaaaaggaaagaagacgattagagtgtaatgagaaaggttgataaaagaacctgtgtttcaagctcagtcaaatgtgcttgttttcttcttcttgagcgtctagctgactccctattggaaagcattctgaaaagaaagaaacaacgaccatacaacattgtgactaaatagactcgatagatgaatggctctgtatatgctcactttagatctcaactgcataaaatgtgcaacccagaataatgatctatgcaaacaggcagtaaaattagtaagttgttttatcatactacactctgaagtccgaatatctccttccggagaagaaaagaaaccgtcacaaggatatttattcattgagaagatagaaagcctagctatgtcaaatcttaaataaacattggcagaaaggacacattttgagtcagttaccttgctaaatgacaaaataccacatccaaagattggtcaccaaaattgcttcgaacagcaaatttttttggttattacctagtcttaaggaaatttactagacaaatatatttgatcattttttcctggaataccagaacattgtcatcatatttttcattagacatgttgattaaatgagtcattttggcagatgatattcatttgaggagcaagcacaatatagttgcttgctgaaggtaaacaatttaagtgccaaaacgcatgatttaatagtaaaaacacagaatagttacctccttacgcgtttcacatcagcaggatccatattttcagtgatttcagtctctccttcaagttcgtcgtcatctgagtgttctcttgatgaaccactagttgctggccgtagtgaaaccacagaactcttatgtatattcaaggttggagatccatgtgatccattagcatccttgtcttgagacctggacaaatcatacccagctcctacatacatagataacagataagaaacaaatatcatattccgaattctgacagtacattgttaaatcaaaagtggagtacaactaaacacgtaatctattgcatagttagcattatctagactagtgataaatactaagtttatgactaagagacatgtctgctctccctttattaaacttgatgcaataatgtgcattacaatgcaacataatagactgaaacataccttttgaaggagcttgagttactgaggtaattgatccacagtcagctgaagtagccgaatcttgaacatttcccaaacctccctatgaatcgtaaaatgaataacagatatttacgtggaaagaaaacacggtcatagattcatatcactatttaaaaaccagatagtagacttactaaatcccaaatctcaaccccaaattttttttcattctttctttcttagaggacctcaaaatgtgtcaagtgctggatgcctgatatatgaagttatgaaatgattcatagtcatcaaatataaacattgctcttgacacagttctactcctttcttctcttcaagaacattcctcctttattttaaacaatttgacttttcctattacttataaacggcccccccaaagtccacaacaaaaatttgtgataacaattttctatttcttttaccttaggttgccttgaccgaataggaatcacaagaaacttatacacaaacgtttacgcataaacaaacaaagagcaaagaaaaactaaaactctagccaatctcatataaatcaaaaaatgtaaaacaaatcttaagctcggttctgtttggatagtgagaaaaaaagaaaacaaaatcttccaactaatattcccattggctaaaaccagtggaacaaacatttataccaataatcacaataagacaaaagattattttggcataatacctgtcagcagccaaaaacgacctcaaaaacatgcatttatcttcagtaacaaaaacccaaaagtaagaaacaataaaacaagagctagagatttacccgagacatagcgacggcagcgcatgcgagattaagcttgctcttgagaaaagcctggtagtcctccgagtccaccggaatacaggaagaggacaacggagccccagatggtttcagattatcttttgccttgacctcaacgacttcgttttcgtcagcggccgaaaaagaaggcggaggaggtagtggtggcagtggtggttgagattgtggttgtggttgtggttgtggttgtggttgtggttgtaaagaggtgactgatcccgatgtttcttgaagaaacctctggaaggcccattccgatgcgctgcggttcatcttcaaaccttcatcgccggaggtggaagaagacggcggaggcggccagtcggagatttcgtccactgaatacaccctatccattttctctttcctactgttatttttttctttggtttcaatctaatttagactttcaaccaaaaaacatttcaggaattatattgggccttttgttcgtttgtggggtccactttaaaatttaatatttatttatttttatttaaaaagaaataaaaaaatagaacaaaattctcaatttttttaatgcttttatgaccacataaatggtaacaccattggctgttcgccacttgtcgttgatttaataaaatactgacataaaaaatataaacgtttttatccaaaatcaacaaattttccagtttgggatttgatattatggttaatagtttattttttatacataaatttagtatgtttcaattgtgatattctaatattttgacattcattattattaagattttttatatatatatggattattactaggaaatatttaatatcattcacattaaaacctttgacaaatcattaagttttggatttttttttaaaagtttgattgcttttgaatgtataggtggataaaaggaaaacgatagttttctgttcattaaaaaaaaaaggaaa

SEQ ID NO: 184572 - DNA, 6698 bp, Cannabis indica
caacttgcacatgatgtttcttggcctagctagctgcggtctaagaaagattaacaactagtaacaagtttaaattaaggtgagattttgttgttttgacaaacttgcttcaattgacttttaagttctcaagttcccacacacaaacacacaactaaataataacaaaatagctagtaataaaaaaataacactcatgcagttcgtgcgtatgtcaatagaaaaataaaagaaaaaaactaaaagagatgatgaaaaaataggttgctggagttgactaaagaagggttagtggacaagggcaaaatcttggatcttggtcactcgaaattaacattaacaataacataataacacattgttgatttagcaacataacacagcacagcacagcacagcacaaaccccattggtattccaatcccacttctctcaatttcaacgcccaataaaccttctcacatgccaaaactattattctctttatatgaccaattctttcttgagttaattcatgagactaacaccatttactttcatcttttttttggtttgaggtgtgaataacacatgatttttgtgacaataatcaaagtttatgattagtcaaaatgggaaattttagtgtgttcatactcttttatttttagcaatgaattttttgtgaaaataaaaattaaaaactaaaattggggtcaatgaggtgatcccaattccacgcacaaagaatgtgttacatgtctgtttctttgctgtcctattaaatgtagttgtctattggttcagactgtaatatttcatgaatatgaaaaccacatcttcattcttattttatgttattttatatttagtttgcttataataatagttaacttttcaaagtagcatagggttaggatccccttccttacctcacgaatctttgtctgctatacccatttctataatctcttagtttgaaaaaaaataaatattaaataaccaaatatctttttgagttgactaacaaactcattaaccatatattaatttacacatcccaaagctaagttagtgttataatacttcatttttgttcatgtaccagtatttgcggcaatttcataggccatcaagactggttgaaaattcggaaccagaaaatagtttaaaagataaattattatatacataaacagatcctagagcgaccaaaaggtttggaatttaatatgtattatccagatatattgggttcacttttaaaacaagacaagagtttgtgattagttgagttgagttgagtagaccagagaaaaagtcaagtaacaaatacaagggtcttgatattggtgctatgacctcatacactctattaacttcttcaatatgtatatactggtaggttattacatgcccaaatgaatgcacaatttcagtgactttaaaaatataacactgattaagatacccaaagatatttatgttatatggtttaaactatttattcatttatgtgtgataagacttgatttgccatcatagttttattgacaatataataatgttactataaaaagcgtgtgaataaagcaaagtgaaaagaatgagaaacatgaagttaaattacaaggctagtttggttctttttgtgttaacagaacataaagtatttacataacacaaaacattagagacaggaagttgtttaaagaaaaacatatgaactttgttttctgggaaattaaatcatcaatatccaaaatgaaacaagtcaatcttatcccacaaatttttgttgtggaataaaaaaaaaacatgaaattataaagactttttaagtcatttcagctgtacaattcaaaggagagtttctcatatgttcctaaagtttcactgcctgggatccgtgaggatggttagccttcttactgacttcaaaaactcactgccacaaaagaaacaacacaaatgcaaaattattagaaccatcacaatgaggactcaataatgtaaatctgaaagaagatcatatactaataagttatgaataagataatacctgaagggttcctctccggtttgtttaacagaacctgttgcgtccaggtatagaagatttttaaaaagccctgaaacctgttctataccaaacatgtcacctagctttctgtacagttcttgatatgaaccaagaagagagagatcaagggttcttcccacatcatccgattcaatgaacaccttgcagtgaccagtctcctgaccatgaagttgatcacttctcccatcatgatgaaacttgtaccagggtgaccttccatcagatgagttcactgttgaaccagagccattatcagaatgatttgctgtcttgtctaaattcccctcagatgaactgttttcaccagaggaactctttgagagttgttcttcagtcagtataacctgtccaaacaataacaactgaggtgtctttgtttcctcatttgccttcaaactttgattgggatgccccatttttagccagcaagaaatattctcactgttctcggtgtttttcatgaaaccaccacttggatttttaagaggatcagagatatccaacttccgaagaccaagtggaagcattcccggctgcagttcatttcggtggaggtccactggatatgacccaaattgagcatgcctggctccctgtatgcctgcaggaatgttgtcttgaatacaatggaaggggctgttgaggaagttggtgggaagtaatggcataggatggctaactagagcaaaatctgggttctgtggaagccgcatcttctttctaggtggtgagaatggagagacatgcatgggcatgcttgagaccagttcgaccaaccacggattaacacatttcacattctgtagtaaatctggttcgtcccatgtcacctaaaaaagatgtattaaaatgatctttcagtaactcaaaccaggaaaatcacccaattgaaacctgtctactagaagtaatactactgctagaatatgtccaaaatgccaaaactacagacctacttaatgcctaatgattgcttgaaatgataagctactaagatgatataaaagcagatacaaaattcaactgtcctttgctaataactgtcatttgttttaaatagagttgaaaaaagtcatcttcatattagtttcaaaagttcactgatctaaattagggacaacatctttctaagactgaactttacacatgtatccaaaggacaacatccattgtaccacacaacactaccaagcaaaaacatcaagaaaagaggcacaacatagtccagtcctaacagaaatgaaataaaattactaacctgtaaaagacgccaaggagaatcaggccaacggattggatcctcaatctgggcattagaaatagtacccatgaaccagcttattcgagaagaatcctcagtctcaaagggcatcttgaaccgcatccctgagcaccacctgatttgcattgcagccgttacagccggggctctaacacaaaactccggggtgcttgcccgcggatagtacactacttcaaatggttgtcctctagctgcaagagttgcagcttcaacaacagattcaactttcacttttccccttgcatctctcatacctggttttggcaccactctactattctcatattgagaaccatagtttccagctaaaggattccaagcataagggtactcatgtccacaaccaatccccttcttagccctccttattccaacacagagatcaccattatcagccctcaaaaacacaattgaatcaccagcaacaagcttcttttggttcacaaaattactccaaccggtagtcaaaaggtgccggcgaggggtacctctatagatatgtctaaacctccaagtctcaccatgaacatccttagccagaatgttctgaacaggaggcacagctgaaaaatccaaaggtggaaagatagtctcagcacagtaacgagggacagaaaaaccacccccattgttagcatcagattgtgttaaagtcttggcaaaagatttgggtttctcagaattctcaattccattgtttcctagatacccttcatcctcaacatcaaaattactgttgtcccttaaaggagtcaaccccatttttgcataaacctcatccgtttcaggatccgccatgaatttaatggcagataccctacaaagaacgtgtgaaggaattctagaattcccaaaatccacattcccttgggcatgttcaacatggccttgaggaaagtaaatgaccttagagttaatggaaggcatttgaaccagaggaccagcacatgcgtgccataactggggatccaaacacttttcaaaatccctcctcattggttctcttccagaatccattactctaatcatctttagctaaatacaaaaggcctcgacactgttatcataccaaaaatctatgtcagaaatcataacagaaaataaagacaaaacccatatttaattcgcaataaaagggcaatcaataataactactaaaatattccaaactaatattcagaaaaccaaccaaaacccactaaacaaaattcgaaaaacaaaatatatgaatgtttacctctaaactcaaaaaatcgaatactgaataactagagtacccagaaagcttcaacacatacaccaacaaaagggtcttctcttctcttctcttctcttctcttctagtctaaacaaacagaagcattttcaggaaacatgaccgtaaattcagagaaaaggacaccaaaattctaccaggacaggaatttatcaaaattccctgaaaattaaaaatcaaagcctggagaatctttctggtaaagaaacgggtgtgtgaagaagaagagtaggttcaaagtgtgaaatgagaagtttgcctatatatatatatgtgagaacaaatacatacgtatatattgatgatatatataaaaatattaatttttgtatgtataatcacagtacccgacacactcacacaccctaaaaacgatataaatcagtgaagcttcgttgccgaccagactgtctgtgtgtgatagtgagcaagaaagaaagggttctttatattatatgcattaacaaaataaacaaattataattacatttttaattttaattaattataatttaatttaaatttaattatagcacagacttgcctgatttttttcttccttccttgttttcggatcgagatattgcatagacttgtaactaaaattcaagtgaattatttcactttcttttttttttttcttttttttcttaactgctaataattataatattattattaatttctggttgttttcttggtctctactctccattttaaggcgcgtgtacttcgctcatactagacagacataacacaacaagaatatggcatttgtcaaaatactattggtgtcagatttggttctaatcatccggctgtccacgtgtcagattaaacataaatatatttagaggagtactactctcaacctgctgttacaatctctacgcttaaaaacatatgtcggaatattttttttcaaatttttttttttcacgggcattcgatatgtttataacatcattcctgtaaattttttaaaattttcaaatagtttatagtgtcgaaatcaagaactttattttcgatattgcaaactatttggaatttttcaaaaatgtaactataaggaatactgctatgaaaaaaaaattaaaaaaaaaatatttcgatgtgcgattttaaacgtaaaaattgactaaaaaattataatataagatgttgtaattagcactcctcatatatttatattttgacaaatacaacaaactatactttttaattaagtaaattactgaataatcgttttttttttttttttgaatggactgaataatagttggttttaccattattgaacttattctatctctttctaatagattttgaaacatgttaatgtaaatatggatattgcttttctaatgaaagatttgttctatattgactccaaaccataactgttgttatttattaagatttaaaaaatattgtatagtgccttagatgctagtttaatgctataaaagtgtgcacactcttcttatagaccaattacttgttcattgataaaataatactaatcatcatcatcattatgttatttaattaagaaaacttgatgctacctatgcttgtgtcaattcctcataaataattatgttaatttatattgaatgatccttatctatttatattctattattatgatatatgtttaactaatatttatgtaaatgaatgagtaggttctgaatcagcttttttttttttttttttgaaagatgaatcagcctttttagttgctacatttttctcatagtaaaattcctaattaagtaaaacattaatgtaagagaaggctattattattccttacaaaccaagcagtactgagtatttgttattattaaggatagaaaaaatattacatctatagagaccaatacacctaattaaggtacatattacacaaacgcaatatacattttccatagtcaacgctctaagccaacatataacccaaaaaaggaccattaaagataattagcgcgtgtgatacacgcggctcttacattgtaacaaacaaaaat

SEQ ID NO: 184573 - DNA, 7877 bp, Cannabis indica
gactctgattagaagtcgcctcatgtctccaacataaattttgcttaaactaaagagcttattaggagaatactcccttaatgtagatccgattagtctatgtggggcctctagcttgagaatgacccctcaatcgtgatgacaattatttttgagctgaaaccaaaagctgattccattgaggacttgatggtagagaaatacatggcaagaaaatctactcaatcagttttactatatccattttcttccataaatacttaactataattagtaaaactacatgtaaaaagttaagttgcaatatcctaataataacaaagcaaaacaaaacaaaaaagaatgggcaatttttgtaaaaatggtccaaagtgaaatcacgtgaagtattaaacatctctcattatattaggattgaaatagaaagataactactaacacctgcaatggtagcatccaattattgtagtgtttgtagagaatgtccaaacccatcaaagctcaaagaattaaatgagagtcaagtgttattggtccaggggcatcaatcaaactataaaaagtagttttaatttgttctatcaattctaattattttccatctataatgaaattctagtttgcctatactacaatgcagaactacctgacttgtcaggcaaaaaagatacggcaacaattacaacaaataatacaaaatcgcttattgattcagcaatgaccaaaaatagcaaaaaaaaaaaacacagttatttagagcactgagagtgtattaattagagatagtgcattttagtctttagttttttttatgggggtgctatggtccttactccttaccgtactataagaatgtccgaaaataatccttctcccaaattctacaccacaagtttttttgtttaaagtcctcattactggtatgaatatatatgcattattatggttgtggtgtggctatacctgtaatgatagtgacatggtcatatcagaaagtaacatcagaaggaaaaagaaaattaatagtaataataaaagaccacaaaatgaacggttagttagtaattatttttaacttattaaccacaaccaagaatgtcaccccaaagatataattgggttttttttagtttcattggaaatagtttttaattatttttattagttgctagtttttttttttggtattttatgtggttcaaaatattttatttttatttagaacatttagaggaagtagagcaagcatcaattttttatttttattttttttagtgacattggataaaattcttttttctttgaaatttgttgtacatgttgttgattctatccccttaccaattgtcttatttgttatctaaatttttaagagtgtctctattcatgtacattagacgactaatgtaactttacatgaattaactgtgcatgcagacaaacgaataacttgttttttgatttccattttattgtttgagatgtatacccttttagcatggacattattttgttattaatgattttggcctttgctttgaaaaataaaataaatggtattagaaaatacaaatcactctaacaaattaccttgattataaccattacacctttttgtacatttcagtaattaatcttttttaagatacaacctacatgcaaataaataaataaataaataaacgaaggtcatagtttatatctactaaaatggtttttctgtagttggattggataaatcctttgaaacagtaatttattttcgattttggtgaatctgctattgataatatagcttcattaacttttgtagtactgcatatatctaatggttaaatacatgtgaaacaatttgtcgtacaatatattaatgtacacatgtgcatggataactctctagcctctaggtagtgaggctgaaaggacaacccaccaatatgtaattgggtatccttagatttttggattgttaaatctgatctgttgacttggcatatatatattgacatgtcacccaaaattccacgagacttaagtgagtagtagatagaactaggaaaaaaacaagtaacgagtaacaaatgataggagaatatgaggctaataattcattatggtctctctttcacgaaatgtaagagccaagagggttgaggaaacttctcctatatccaccttgacttacacaactctctcttggaattgtcgttgtaagaaataattactttctgaactcaatgtccttttctctcttttcttctttatagataaatggcgatggatacaaagaccatttacagcttattctatttgtattttgagagaaactaaactaaaagccaatatcataacaaaaaggatgttctcaccacgcaccagctttcgtctaagctaagcttacaaggaaactttgaaccacatacctataataatcgtatacatgaattccatcattttgtgacacagtggaatggacccgatctctctctcaagccacctatagccataaattaagaaacagtaggatgcccaagtggttcaagaggaagtccaagagagctgttgatctgtatcaaacaagtgaactttcaggtttggtttgttatattgttcttttatatataattaatttccaattctaaagtcatttatttacttcagatgggaatgaagatgaaagtgatgaatacctggatgagatgctcgttgggtcgatggagtcggatccatgcacttcaaatactaatgagttaaggttagaattcgaacttagacaaattgaattgaattattattttttccataataatctttttatataattttaattagaatttttgtgggaacatggaacgtggctgggaggtctcccatagggagtttggccgtagatttggatgagtggctgaatctaaaagatgcggctgacatttatgttctcgggtacgtcattacaaagtcaaaatatatttaactttttccttatcttatttgatttaaattatttttttttaatatgaagaaagtatctttttgacggcatagagattccaactttgtagatttcaagagattgtacctttaaagacccgaactgtgattggagcagaagatccaacagaagcaacaaattggaaccggctcatagggaaaactctcaatgataagcatggctgcccttggttaacaccaatggtaactcgattctcaagtgacaactacaattatgtaccagcttctgaggcagataggagagcaagctttagcggtcatactgagattccaattccatggagagagcgatcgagaactgtgcgtgagatgccgaaggttgggagcaagtacaaactaatggctagtaagaagatggttggagtttttataagtgtgtggatgaaggatgagttgcttaggaagtactgcatttccaatgttaaagtttgctctgtggcttgtggtatcatgggatacttgggaaacaaaggctcggtttcagttagcatggccattgatggaactagcttctgctttattgctgcgcatttagcctctggcgagaaaaaaggcgatgaaggacggaggaatcaccaagtatcggagatttttaagcgaactgttttccctagttcctctagagacgacgataatcctcatcctcttaccatcttaggacatgagtaagtgttccagtaaactgaaactttctacatatttaatgcttgctcaaaacttaccatgtcccatacggtatatcaacaattgacagtcacaaataatgataactcaattagagaaggaaatagtatcttcaagttcatgattcttacagtttataattaaaaagtccaacaataaagatttagaattaaactcatttcaaacatttcaatgcaacaaaatgtaaaagagatataaacacttttcagaattatctactaacaattttaagagttctctactgcattagcaaagcagaaggaattgcaatatggttgaagtgaaagaagcctggtagaaagaaaataaggggtttagactttagagggaattatataatcacaatttatttattttattttgtttttgaactaacacaaagtgagatgaactcttaatttgtaatgaacagtcggatattctggtttggggatctcaactataggctgtatttagaagacaatcttgccaggcaactaataaagaagcaagactggagagcattgcaagagtttgatcaacttcgaagggaaaaggaatatgatggagtatttcagggttggaaggagggcgacatagaattcgctcctacctataagtattctcaagcaaactgtaatcgttactcgggtggtcttccaggcagatcaggagagaagcaaaggacaccagcatggtatatcatctcactctctcactccccttctctaatatttttgcacacaaatatatctctcaactgcaaatggatttttaagtgagaaatgttaatgaccacaggtgtgacaggattctatggtatggaaaaggtgtgaagcaactctcctatttccgcagtgaaagcaagttctctgatcaccggcctgtctcagccctattctcaacacaaattgaagtggtgaaacctaacactacaagacttggtctgcaaagcattttttccaccatactttccagtgaccaaattgtgagttttctacaatagaaaaaacattttactgacaagttgctgtgattagcagtatacattagtttttcattctaaaataagttataatatcaacaatgcagggaaaaagcagagatggtgaccaagccaagtcaacattgctttctttaatggtaagagacatagaagcatcgcctagacatgcaaaatttgtagagaaaataacagaaagtgaatgcagctgacctataaagattgccttgcagcagctgctattttttatttctttttttttatatatatatatatatagatactttatttgtaatctttttttatcattagaaaaatgcaaatcagacactctacatggactgaactgttgtgaggataaagattaattaagatgtacaattcaccaaaatgaagtccgataatccaccaaatattgtgaggataaatgaaatatagtatgaaaatccaccaatcaaaaactgtagttgagctatagcattgctatttgtaaatgtgttttacacaacaatctatacagctttggaaaccaacatcacagaatttttaatggcacatgacatctcctttctgccaaaagtaaatgtatttgaatttccatggtcatttgtgacataaagtttgaaaacaagagtaacaaaatgttggaaatgcatccactccacaaatttttattcacttataaatgttggtaagacaagcaatggaagaaaatcaagtgaagtgcttacaaagattaatttgcctcatttggctgaagaattccactgaggatgtcgacgttttccaaatgacagtttggacaaatgcatcttctctgcaactcctcagcaatggaagcgtacacctgttctaattcagaagtctgcttaactccagtcaaggacaatttcggttggtaagaattatgctcagagaattaactcaaataaaatagtaataacaggaaccagaaaaagctataccgtgttcccttttccatctcttgtaaataaaaataaaatgatatttggaacatccattttgttgacaattttgaagcttaacattttatttttttttcctttttctcctttcgtaaataaaggagcaagtggttatgaaggaagttgtccatctccataggaattgtttttcagaaaatggaaacaaataaaaactcctaggaatcatttgtaacagcttgcacaaaatcatttgtatgcacttatcaagtcatttatccagtaattagtgatgattatatccaatgtagaaatttctctgtcttgatcaccaaagaatgttcaacgtgtcgcgtcaaaaaaaaaaaagttcaacgtgtgctcaacaagtaaattttctatgcatttctgttaggatatcttgtcaagtcctgcaatgctcgagttgttttcataatgacctcaatcagagacacctttttctcacaattaatgaactccatctgtgtctgcacaagtgtcaaccaccttcagattattataaaagacaaatatgaaaattcaggaaactgtatttgtataaccatttcaaatgatcaatttatcacctgcttttgaatttcttgttctgatcggtattcttcttcctctttagttatctgagaaattacttgggctatcatgtcctcatgacatgtgaaagtgacttcattaggctccttcactgaaagtttatagccttcttctgaaacaatattacaatcatttctaagttataaagggaacagcaaaaaacgtaatacatgttagaattagaaagtagaacaataaaaccaagctagtaccagcaacagttccaaaggagcactctttatgaaaattgctagcaactgtctcttgaaacttcctgcattaataaaacccaagaaaacccaagtatcaggcaaactgaactcacaatacaattattatcaaagaaattctacttgaaagattactaagcatttgcacaagacataacataacaacatggcaaccttatcattgcattcatctcaaacatctgccttataaactcatctctgcatgaaaaatccacaaaagaaattgtagccgtttttaataaatattacaatcaaatttgaaaaaaattaaaagaacatttaggatcaaagactgtaccgtaaggctccttcgttgttcttcccgtattgaaacaagcaatttcaaacgtggacattcaaaagaacaaacataggaaaaataagtctaaataaggaaaataattcctaatcttcttcccgaaatcaccaagaacaagaaaaaatagcagtaaggactaaggaggcttgctcagtaccttcagagcttctaaatcagatccaacggtcgcaatttcgtcttgaatcagagaaacccttgactggaatttaatttaatcatattacataaatgttctatgaaaaaccaattcaacttttgaaaggagaaaaagaaaaaccttaagactttgaattgatgtttcgctcaacgccaattcaacttcatagcccttgatctcttgctcagtgatttctttagcgcgcttaacatcttcgagctctgcatttgtaccttccagatcggatcgaagctcctcgattcgcttccttaaacctactactcttcgttctgcatggatcaaaaccttcctcagtcattgttctcttctctcatataattttctttttggctaatttaaaattaaaaatatcctaaccataattaggagaataagataaatcttgtggtactcacaagaaaaacttaatagtttaattgaacacaaatactaacttttctcggtaaacaaaagatccttttatctaaattttctcgggaaacaaacagattgaacgacgataacaaatagcatgaacggattgtactacctccttgtgatttttcagccgcaaagctgcgaattagggtaagaaattgcttctgtggatcacttccagttgttcccgccatgaccgagtgggtctcctatattctgtttcgcgctagttctacattcgatatttcaatcacagccgtatttatatatgttgagcgagataaagaaagctttactgtcaaaggcccataaatagagcccatcaaacccaaactatttaggcccaaacactttttagtgacctgatcactatgtgaattattctaaaatacataaataataataattataataa

SEQ ID NO: 184574 - DNA, 4419 bp, Cannabis indica
tgtgatcaggtgctcagaaagtcaattcaaacgtgaaaagagatttggatgtaaaggaggttgtctctaaggttgaccaattatcattagatgtaaagaatttaaacttaaaggaagaggtttctaaggatggagaaaccaatggcagaagggcgcagacgtttagttttgaagaacttgcagctgcaaccggaaatttcagattggattgctttctgggagagggaggtttcggcaaagtttacaagggtcacttggagaaaatcaatcaggttcgtcagtttggtcttgtttttctaatttagatgctttgtaggattaaaccatgttgctcggttatccccatttaacaagttgcggtatatacttgggaagaatcttgtgaattgcttttgattttacacacaaaattatttcatatgctacattcaatgtgcttagatgtgttatatttctttcggtgtaggttgtggccatcaagcaacttgaccgaaatggactacaagggattagggaatttgttgttgaagtattgacactaagtcttgctgaccatcctaatcttgtcaagttgattgggttttgtgctgagggtgatcagaggctattggtctacgaatacatgcctttaggatctttggaaaaccatttacacggtatataactctttctcttagtctcctttgacatgtatggtaatgtgatgatgcctaattggggactttatttttcagatcttcgccctggtatgaatgtacttgattggaatacaagaatgaagatagcagctggtgcagcaagaggattggagtatttgcacgataaaatgaatccccctgttatatatcgcgacctcaagtgctcgaacattttgcttggggaagggtttcatgcgaagctatctgactttggtttggcaaaagtagggccgagcggtgataagacacatgtttcaacgagggttatgggaacatatggatactgtgcacctgattatgccatgacaggtcaacttacatttaaatccgatatttatagcttcggggttgtgcttttggagctcatcacaggcaggaaagccattgatcatacaaaaggtcctaaggaacaaaaccttgttgcatgggtaagataatcataaccactgctctcgtgctgatcttttgttactagcacgtcttgtgcgcgccatatctaaaccatttttattgttttatggaatctgtttatttgcaggctcgaccattgtttagggaccgaaagaaattctcgcaaatgattgatccattgctacaaggtcaataccccgttagaggattgtaccaagctctggccattgctgcaatgtgtgttcaagaacagcctaacatgcgtcctgttatatcagatgttgtcacagctcttaattacctcgcttctcagaagtatgacccgaaagctcattcacttcatagctcgagaaagggttcatcttcccccgaagagaaaagcgatgataatagaccagaatctgactgaggaggtggatgactctctgtctgactagttatttagaataaagcagtgaatacctttttttgcaattggaatatgagggtgcctacgttatcaatttttgaattactgaaagataacagctgctttcaccttcttccaatcttcacacataggaaattttctgtgtcttttttcccctctttattatcttttcactgtacatgtgagcttgagctcttgtatgtaagatgcctttttctaggaaaacaaaaaaccccttctttctttaccattttgttaattggtctttattataataataaaaatcacttaattcttgtgatgtagacttgtttggagtatctgattctagttcaaagatgagagcatggtctataaaattaggactagtaataatatatgtacattccactataggtcactgcaatatttgtcttgttagcaaaactaaaaacctggttctcattaaagttgggttgtggggtctccaatagttatggactctgttgttgaacttggtgtggtggttccatgtgtcatgtgtcagaaagagatgggataaaggaagatgcaattggaatctgcttttgatgacaggtgagtctaaccacacctgatctgaccatgattctcaactcatcagtatagtaccatgtcgtccttatctaatggagaaaatatggtacaaagtcctaagagtaagaatccttttgtttttgtttttttttttaatgttagttcgattatagaatgtgtttgttggagaaaaagtaaagtcttatctaaatctggtttgggaatatctcattggttttatatatctcaacagaatcaaatcttatacgaaatgaatgaatgtgagtttgtttggtgttaatggaatgaaatgaatcattcattgtacaaaacattgctttttattattttttgggattttgtttgaacctgttgcaacattcttcaaacattcttaggtcctacttttattgtgtatttaaactagaaaagagagagtttatgtctcatagtggtataaaaaaagagttttatgtctaaagagaaacttaacctaattaggcactattggtgtttaataaatgacattttattaatcatttaataattttttatagttgttattaaatattattaaattaatatatgtgagatgcgagaaaatttgtggttggattattttagattgaaaaatctaaaaatatatatatttgtttgaaatacaaaattaggtaatactttaagctatataagcatttctattttggagttacacaaatgcttctaccgtcacagatgcaacaccacactgaaggaaccgtcaaaatgactgttttaggtttgagtgagagattgagaggggattagttttgcatgctctacggatggatgagcaacttattgactaaatatgaatattagatcaacaatactattttgataatcttgtcatttatagtatttatttgatcatcacgagaggtataatattcatatctagcatgtatgatattataattttaatgaatttgttaattgctttcaaaaaaaaaatatattaagatcggtataatggtctaagttattttacatacatagtcgaggttatgagttattaatggacataatgctattagtataaacttttgtatactgatctaaggtattttacctgcgtagtagagatcatgattcataagttaaaaaaattaaaatcaagcaatctcacccatcttacaaaaaactcaaatccattttttttctctttggttttttggtccagttttgaactttctcttattagagatttgaggatttgtatccttattttagttaattactatcatttatggtggtattgtacttgaaggtgaccataattacgatggacgtatatgcctcggtcaatgggctttgttgccatttgctcgcatttatttgtattaatttgcttttgcttaatattgaagtttataagtgaaatgctaaaggacattagtggtgcttagtacacttttatgtgtcagtatcgctattggttcaactaagtatcgggtcccatataatttaatataataacttttagagagtatcgctagccaatcgcaatgcgacatgtcaagaaggtgctaggtaccactggtgcctaataacaatgctcagtttataatgaactttgtcctcagttttttgttgaatgaaaacttaaatctttcctaaaaaaatagttataatttctttttttttaataataatgtattataagataaagttttaattaatttaaaataatttatgatttattaaaaaataaaaattcaacaatcctatggatataaaatagaagaaatatatgtgtaacaaaatatttaaatttaatattttctgcggtcaattttctttttaatttctcaaaattgcatgatgtctttttctttttatttttttagaaatgaataattcattgaaaataacttggaatactcgaccaccataaaatgatgagtatctagtaaaacaaaatcaaacttagtcaggagagtatgtttataattacagaatgtctattattaatataataaaaagaaaaagaaaaataaatacaatagaattgaaatccttgtataaatttggcgggtaatcaagattggtaactagtaaccaattaaactcagtactcaatcctatatataactgaaattaacagaacctaacttccactttcattgatttcttcaactgaaattcattgatttcttcaactgaaatctctctctctctctctctctttctctttctctctctaacaatgcagcaaaggtactcatcatcatcatcatcttcatctccatctccatcgccacagcaaataacaataaaactaac

SEQ ID NO: 184575 - DNA, 4638 bp, Cannabis indica
atcggtttattcaagttatttggacggattaatatatttattggggaatgaaagttcattgtcaaaaaatatatatatttattgggggtttgagttttttcgtaaagttatttgagtcgtattttttggaagtttttttaatttagtttgagcattttattccagttggggtgtttataaatttttttaaacagccctacttttgcatttctcttcttccagaagagcgtgtgatacacatccaaacgcaggagcgtagatcccctgggactccatagtcagccgccagaagagagtaagagaaagctttgaccaaagccatcgccactccaaccacctttctctcgttatctctctgcatttttccacttcttcaacgctttctctctctaaattcagaattcagtacaccaaaatcacaaaaacaacaatggagatcgccttagggttcgcctttctctcacttatttccctctctacgttgggtgcggctgctccggcgccggcgggaaattccacagcatgcccgattgatctgaattacttgtcccgaatcggttggaacacgacgagttgccggaatttcaaacctccggcgaaaccgaaaaaccaatcagctgatcaccccaaaactccgtgttgccaaaccttactatccctcttcggcatcggtctggcccaacacctcaaggagacttctcaattccagctccccaatgtccagacctccgcttcttgcctcgaagattttcagtccaagctctcgtcgttttccaactccaatggtcttttcctgtcgaacgacgccgtttcgtactgctttaaccctgtccagttcgtgatcgctccaaatctatgcgcccgtattcagtcctcagacgactgggtccgtcatctcggacacacctcggtgctcgacacggcgtgccgcccggacctgacagatctcaccagctgcgatggttgtgtagctgccgggttcaaagtccaggcggagttgacctctcgtgacggtaacacttctcacgctaatgactgttggtactttgctatcctgtatgctgccggcatagttaacgagtttgggccggaaagtaaaggtgccgtttcgtgtatctttgggttgtcagtggattcacatgtgggttctgggaataagagccgtacgcctcttgtttttgggttaactggtgctggggttgctattttagtcatgtttagcttgttgggtctgtatttttggtatgataagagatggaggagtaaaagtttggaaggagggactggtttggaaggtgggtttgatttggatgagccggggtcgaggcctcgagtgagacccaatactggtgcaatttggtttaagattgaggagcttgagaaggcgactaacaacttctcgcagaagaatttcataggaagaggtgggtttggtttggtttacagaggggttttatctgatggaacttctgttgcggtgaagagaattatcgagtctgattttcaagggaatgctgagttttgcaatgaggttgatatcattagcaatttgaaacaccgaaaccttgtgcctcttagagggtgttgtgtggttgatgggggtgagaatgagaattataatgagagtgaaagccaaaggtatcttgtttacgagttcatgccaaatgggaatctggatgatcatttatttcttcaatcagatatccatggtggagttgagagaccacgattgacatggcctcagaggaagagcataattttagatgtggctaaagggttagcttatttgcattatggagtgaagcctgcaatatatcatagagatattaaggccaccaatatattacttgatgttgatatgagagcaagagtggcagattttggacttgcaaagcagagcagggaaggacagtcacatatgacaaccagagtggcagggactcatggctacttagctcctgaatatgctctttatggacagctaactgagaagagcgatgtttatagctttggggttgttgttttggagattatgtgtgggaggaaagctcttgatttgtcttcttcaggatcgccacgagcttttttgatcaccgattgggtgtggtcattagtaaaagctggaaaagtagaaaaggctctggatgcttcattgttaaaaaatgaggattctgtaaattcaaatcctaagagcattatggagagatttgtactggttggcattttgtgtgctcatgtgatggtggcattaaggcctaccattatggatgcactgaaaatgttggaaggagatatcgaagttcctcaacttccagacagaccaatgccactcgggcatcctcgttctatgccaacggtaacactttcagcatatcccccaccattaagcgggccacaattacattcgggagacatgctcaggtaatcaaagtcgaaaatccttttgacttcacacatgctcgtcagcaagaagcaattttcataaaaggcccttcacgagttgattcaaggcttgtgattagagaacacttaaactcagacaacaactcattatttgcctacaaccattgtaagggcattcagtgtagtatacagttgcaactgcataatttcctgtttttacctgtacaaaatggggtcgaggattggagttttatatagaaaaatattgaagatagagaagatgggtacatggaaaatggcattgaggtagcaaactcaaaaggaaggagattcagataacaatattaatgagaactcattgtaaatctcaaggctaattggttctcttcctctctctctaacagttttggtctaatagctttatttgtatgtattactgcaagaggtaaaatggtgtacatgtagaaaataatttgtgcttaaactgttgcagcaatattgatggccatacatcccacaggtattttggaagaaagctaggcacttcagtgaataaaattaagatcattgggagattgagactctctctgtagttctttctcctgttttaaaactttgacaagtatctaatagtggtttattggattgtaatgtatgtaatagtatacatattttgatcatataattgtaaatattttaagtttctttcaattctatagccttttcataaaaaagattgattactattcttttagtctcaagacaacaaattaatcatgtatcaaagaaaacaattaaagcatatagtacaatgataggttctccctgtcaaaccagtaaaataacagcaagaaatagaagaaaatggagttgaagagatgaaaaatggcagtatagccttcaattgaatacccaggaattcgagagcctgattctctcccaaaatggttacaagaagatggaaatttttcacactcaccaaagacaaaacctgcctctcttattccagccaaagctgtgcccgaaaacactcacacaaacacccaagctaaccactttttgccacctcagcagtagtcaatcccctaaggtgttgaccatagtacccttcctattcttcctagcatacacaaaagttaagggtggcctatcatacaacaaatgtgaagtctacatgtctgtattagcatgtgatgaatagaaagagaataagcaataaatacacaaactaaatgagacaagcctcatgataccaaataatatctctttaatttggaaacattttaaggtatgttcatgttttctaacaaaatggttcctaagaagttaagaagtttttttttctttctttctcttttttttttttttcgaatttaagggtttgtgttgatggttaggtaattgttgttgtcaatttagttgtaaaatatttgtaataagtgataatcgagttgtaaaggcaattgtttttgttttaaatattattttcttatttttaaaaaattaatattttgactacatgtctaagttattatgctaacgggtttaaggaaaaaataataatattatgttagcattattagtttctataatttgtccacctgaatctagctctataaatgctctttatattcacgtaatttataaagtattacagaattgatatataaaaaaatatgtattgatgtagcatggaggctagcacaatagtaatactaaaaatgaggctagctttatggatcatcatagtactgacatcgagaggttgactttaatatgataatgtttagaagagtaggaccatcaaaaaattttgtttttttttagatctatatatatttttttatttgatatatacatggtaattacagtgtataggaccttagaatatacatggtaattctagtgtagaggtccttaaactatctccaaatattatgttaaattcttttaacaaaaaaaaatattatgttatattccgcaaaaaaataaacaaactttgtatttagcacaatatttacaattgtgctccaatgcagaataatattttaagagataaattgatttaaaacaacaaaatatcaacaaacaataaattaaatatttaaaaattactaatcgttatattttaaataaaatgtatttattaaaatatttcattaataattaatggtaaaagtataattaaaaaagtagtatttattgtgtgctaaatttggcacaatgatatatctt

SEQ ID NO: 184576 - DNA, 3009 bp, Cannabis indica
tatatacatacacacaatgaaatcctgcaacttatcaaattaagaatggttttttgtttgctgaaaatcaaatcaaaccaacttggtatatcacaacacaagtatgcttatctcccaagtttatatataacctgattagattctaaacacatcagtttggaatctctcatcatataacctccagtgaccatacctctcagtgtgaaaaacagacctgggtatgtaaaagttaggccttttcacttccttcaagttcttcagattggttattccatttccaatatctctacttgtcaagtttgcacacccgaacaaatccaagtactctagattcacacacccttcggatatcgaaacaaaccctttagccgttaacttggagaacctaagttcaagatgctctaaatgaggcatgtatttcccaactgcagcagcctcagcatccccatcttgagggcaggcatttagatactcatctgggacaattccaacatgttgggaaggatctaaccaattcattaagttccttttcatgactttaaggtttggacaattccttccaatcaaggctaaagattcatgagatatttcatagcaataacttatgtcaatctctctaagtaaggaacaccgaaaagctattatagccatggaagcatcagtaacattggcgcagcttcttattgagagaatctcaagattcaaacacctaataattaaatcaaagagtttcgaaagcaaaatacttcaaaacacaaaacaagtctacatgtgatcaactactacaaacactaaatgaaattcattgcaaaccattagtgaaacccagataaaaagctcaaatctaaccacagatacaataaaagacgatgaatcatgagcttctagccaaattgagattaaaatttaaaggtttcatttttagaaacttggggatatttactaatcacacaaaaccaatcaaatccattttttgttatgggtcaatacctaatttaacagccaatcatcataaagaaatacccattaaaataataaattaaaaaaaaatagtaaattgtttatacctttcggcagcgtatgagagcgatcgatcagagcagtgcctggtgcgaatctgtgtgagcgacccatcgctccagtcgacgacagatcggagcatggaatcgatcttcctctcgaactcgggcaaccaccatcgaggcgactcgagcaccgagtcgaagcgagactggagatcgaacgccgagtgaagagaggggtccttgcacgcgtgcatccaggacttgcagacgagcatgggcccaagccatcggtgctccagggtgagccgagagaggatgttgatcaggcactcgtgagtcaactcggcccaatcttggccgggtcctgactcggtctctccatcttcgttattctccatttgggataaagttcggtaattttggttgccaaattttccacttctaatgcagtacggtgttgatgggcatatcggtcatttcaacggaaagatcaatgccacgtggcagtttttggaacagggtatatctttcgtttatgatttttttttgttgggaaattagtgagcaaatgttttaattttgttacacttaatccatattatccgttaagtttatttttgtcagaaaatttgaagagaaaattatgctttatatccactttttatttgtattaggtgagtcagttaaaaattttaatttgataagttatatgaagttatatttaatattttaataataaaaaaagtatttattaaataaaattattttaaaattatatttaattaatgtataataaaaaaaaatgtcatttttaatttatcttaaatctgaagtgttagttatattttataaatgttgtcactggaaatatttgcttacacaagacactaaaaaaattcaataaaaatatgccacatatatgtatatatacacaacgtaaatgacaataaacggtaaaatttaactgacgcttcaaatttacaaatagtaaaatataaaaggtgttgctaaaaaaattagagggtcatatgtataaaattaaaagatattgttaaaatttacttatggatatatcttgcaattacaaaattattagaggtacaaaagccacaatataaacatacactgccaaatggcaaggaaaaacctcctaaaaatcctaaaaacttgtcaaattcttgaactgagcataggtgtgtgagaaggagtgagtgacaaccaagttagggcacggatgcacacagcacgggtgggtgctgcccagcatgcaaagagaaggattctattctagtgtgggaacacaggtagtgcatgcgtcaaagatccttgttaaaatgtacaagtgtaatttaaaaagtagaatgcattgtaaaaagtgtgcaaaattcaattgatgggtaagtggagaaaagctctttctttgaaagctctgcagcttaaaaatatatcatactatgtagtttgtcgaaaatcccataacaagtatatatatgtaacacgtgttcgagcttgagcccttccctctctagtaaacttagaccacgatgcagatgatgtgttcacatctcaacaacaacgtttcgtatctttagatatgggtagacgtcaccacgttccatttcctcataccaaataccaatttgtcttcgtgtcatatctcctcttaagattgacttaatcaccatacgttgcaatctttatgataatatataatatatataaagacttacaaacatattatttacttcttgattatgaacaagataattaagaagttgaccaagtggctacacttgacttggtttcattagaaagccaacaatttgcaatgagttttacaccgtggtcctttcctttgtagaatttaaaaaattcaaagctcaaaacagtgaatcagttcaattcaagcagtaagggattgattggctagagttattgaagctgtttgaatttctaataagtttcaatttttagctccgtaaaa

SEQ ID NO: 184577 - DNA, 2754 bp, Cannabis indica
tatcgagtcccacatttaaattaaattaaaattatataaggcccactactaaattgcacaaataacaatttgctaaaatgttaagtacttaagaacaaaagcctcaccaagaacatctcgattcctgtgaaccatttcctgattcatagcctcatagtttcgaagtttgtcacacaatcgagcaatctcaaagttcttagcctcaatctgtgcttccatctccgcctccaactctgccctggctaagcctctcccaatagaatttgaaacaaatctagcaatgtatacttgtctacacagctcctctccagaatcggaatcaagctgttcttccccttcaacaggagtggccttggcaggtagcgttaatcccgcaagtgacaactgttgcctgatcctttcccattgtttttgcatgtcacttaacgtttcttctgcttgcttccgcttctctatttccatcagtaaactcattctcatttcacgaaattcagcttcaacatcacgatgaaccgactgttgcccactctcagaagaaagttctatcgttgaaaaaaaaaaccatcacagtaagaacactgttatcatttagaaaaaaaaaaaaactaaagaagagaagaactccgttagcactgaactacctcacaacacaacatgttagcgagcaaaactaggagtttaaagcacacgagaattgaggttgtacaaaaattaaattttataccctacaaccaaatagttttccattccactcattaagaatacttttttacaccaaaaaatctcacactagagtgtcatttttttcaaagtgagatcacaatttttatgggtggtaaaaactaaaaactagctcacattaataagtatactgtatactttatgcattttgggtgtaaaacatgtatctcaaatattactcaaaataataaatagagagaaaaggtcaacttatgtaccatcccaagcatcataaaattcgcccataggtgtagtgagttgtgccgaccgttctccttcagcattatcctctccatcagtattacttgtaaaactcatagaatcacgaggatcaaagaaatcttcccggtcgctctctcttccaggagtcaatggagcttgttttgctgaatcaagaaacataacctgaccattattccaactactgctttcatgttccaccttaccattcacaagttcctcattagttttaacaagttttccagtactgctttcaagttccacgctaccatttccatgttttccattactgctttcacagtcaggataatcagtaacctgaggttcgggaattggtttagcaacagggaaagtaaaagaatcctcctctcctaaactggtaaccttggtttctccattattcaaattcccattaaccttttcatcatgtgacaatacactagcctctgaggaactcttaagaaggcgtggtccacgccgcttgtgattgataatgtaaggagaagggggggaatgatgtaggcgaatcagggagtggggttgattcgggagtagcataaagtgcaggagttattggagggcgattccttcttctttctgcaactgaagtactattcctcctctccagctttgaattaggaccaggctgtggtttcggtacaggtcttggaacagatttgtcgactgattttgaagctccaggttccaacaaggtatctaaggctagagcagtaaacgtcggcatagctctgcataattttaacattcaattagccgtttcagagtaaaaatttaaagacagctatctaatttgatgcaaagagagctccaaacattttggcaagggaaaaaaaaaagagagaaaaacattacataacagtagaaacaacaattcatctgcattaatccacaacccacaagaacagaattaaaaaacgaatagtcagctcatttaatcctaaaccccatacaagatttgtgatctcattcaagtgaaaaaaaaatgtctaaaagtataatttttttttctatcttataatctaattagtttagtaatgcttccaaactcccgagctaattctcaaaataccaacgaaccctaaaacaaaatacttcttacgataaccaaaacaaaaatgaagaaatcaaaaaccgcacaattcaaaaacagccgattccaaatccaaaagagctaacgctcttccgattcattacaaagaatacatgagagagagcattacataatcgaccttcaaaccaaaatttccacacagcaatccaacccaagcttttaggtcataccctcgaaaaaaagcaaacaaatcacaagaaatccaacaaaaaaaaaaccacaatttaccaccctcacatgtctctttctcatcaaccaaacaagcaaacatacaaccaacagcacatatacacaatatatataataaaaaaagaagcagccacggaaaaaagaaacggaaaatatatatataaaaaaaaaaaccttgcgataagagcgatgagctgcgaatggaggggagggaaaccctaggcgcgaaaacaacgaagtcgatcagataaaaaatgggagcgaagaagaagaagaagataaagattgaggtgcataatttttgagggcttttcttgacgatgatgattctattctgccctgttcttcacaattttttggaaaaatagcttaaaacccatttcctcttattccaataacgaccgcctctttctctctctctatttaattaaaattatttaaaataaataaat

SEQ ID NO: 184578 - DNA, 7799 bp, Cannabis indica
gaatggttccatcgacattgtattttattctaaatacccatttacatcctataggtgttgatccaattggtagatcaactactttccaagtttggctagatataattgaatccatttcctcattgtttaccgagaattttagaaactaattaagtagagcttaagaaaaatataaaatagtaaataatagacaaatagttttttacgtggtttgggtgttaataatccctagtccacgagtctgttgtattagccttctcggcaagtgtttaaatattataagtgtttatagtatgagcttagtattcctctcattcctcttgaagaagaagaagcttataggaattttagaagaggttctctaagtagaaattattcaccttttgctcatgaaaaataggagtatttataggcatacatgtgggtaagggcataccctttacccacctggggtttcttactcaacatgccacaggggctgagacaacaacaggatgatcggactgttgatttggtaggtagtttttccatcgtatggtgcacgaccattgcgaggcattatgtgggagtgttggcacgtgtcgctcaaaggtttctcctttaaaagtggttgctaaataagccattggacaaaagggctacagaagcacgtacgcgtactactatggtttgacgcaggggacaagatctaattcggtgtcagacatacaaccgtcgtttggagatctatatggaatatagctggatagggtccgagatcagttagccacctctatcatggactacatgaccctgctatccttgtgggcctttcacatcctatgagaactttgcctttccaagtagtaggtgaatggtaggagctttagagtcctccctatccttattaacatagaagatccctggttcatctaggaacactccttcttccgcgagtcctaacaaacaaaggggacatgcaattagtgaatattacacagtggcatccttctgtgactgtcacatatcagtcatccagaaatacggataacatttacccccaagcttttgggcctctccaagttctaggatccttctagttattccaagaactgtccattgctacgcactacctgtttagatgcctgggtcgcggacgtatcttctcggggagctgttatctgttagcataaatagagcgtctaatattgccaccgtgttaatcatgtagcgcaataaataccctaggtacctcattacgcgcacgttagggtgcgtttatcaaagaaagttaaaactcacggaaggagcaattcgaaaagaccttcctttattgcttgatggactcgaggctaaatcatgactaataaagactttagaccttttcaactctccagccgttggattgtgacggaagatctggaccactgattttgaaaaattgtctgtctttttggagtataaattgacattagtagcgttcatttcactttttccaaattaaccttcaaataatcctcctataattttcccactcgtcccccttattgcatacaagaagagtgaaaaaatctgatcccacaactgctcaatcttcgtgcaaagctttttcctaacattaaacctctacaaatcgaccaacttgaccccttgccagacaaaggattctacttttaggccaactgtgaccacttcatcgattaggtttgaagatttcaaacgagacccctcagcaccaactcatcctctttccactcgacaagtaagtaccctaaccccctgactaaacttttgtcattttgtgtttaggatagaaatttctcgttcatgatagggttagggatgtttacatgtcaagtagcaaggtagaatatgcaaaagaaattttgcaatgctaaggaaaagtttgaggtttaatgagcgcccatacatttgttgatcgtgggattcgatcaattggggtattagtctagaggttattttccttttatccatcaattgcttcaaggggctcacttttctcttcatttttgtgctagtagaaatggacctaaaccaggatctccaagaaagtgtcataggaaccattgagagtgtgcccatcactcttgttgagggaacccccgctgtgatacctcgatcaggggaaactctagaaattgttcctgaggatgaacctactgctcaggaaggttcccatacaaaggccaaaggggaaaggagggccaagacacccccagatgctgaagcttatagtgactctgtcttggaaatggaccagaaagccaactatttccagtcctatgggatgttctaggcttatgccggtggcgctggcctccacaatgtccctggattgatgtggcacaggctatcttccacgggagagtgtgcttctactagcatggagctggtcccacatttccaacgattctcatcttcctttgagaacatacttcacgcatctaattccctataagaagggtgccttctcttcgcctaaacttccatcttccaggtactactgccacccagctttaatcttgatttttagagtttcttgtgctttaaatgaattgctaatgcctatgacattttctagaacttcccccccaaagtaccaaaattgtagagataaccacgaagaaggctcaatacaaggccttctcaaaagaacagttaaaggttgaggacttagtgacagttgaacttctccataggtctagcttgatcaaaaattttcaaaacattgatcttgtcgacctctgaggacaacgctaggcccctaaggaggtgaaggaagccattgcaactgatttagccatcatcattatcaaggtggctaaaagtgacaagctcttaaaacctgacttgctgacatgtcattttaatcctttgatcgaggaagaggagatctcagagaggtttgttgccacatacccaaacatggggaatccaggagccaacactttgggaagaggtaatagacccttttgcgtcctccgtacccctaacctgtaccatacgtcctaggggaatcagagaggatttgataaatacttcttaaatgtagaccgctgtaggtaccccatgaaagattacatagacaaagtagactaaattgttaggagccctagtaatctggaggcatcttcagatattgttagggtggatcctttcatggtcatgtccttggctaattttagggagtatggcagcttccttgatcacaaagacattttcttttgctcgttggtaaccttatagcagctcactgaatggttgcacccacacataagtctttttagtggattttgcttctttatggttgtccccttagtttttttgactggatctgttgttcttagttacttacattgatgttatgtgtgtagatactctagagtccaagatcctgaaatctttgaacaacaagatcacagctacattggttaaggcagggagcactcaagaaaaaggtaagggaaaggccaagactcaggcttctaggaccctaaagccacgtcttccctcaacctcatcatcatcaaatgtataggaaattgttcccccaccaaggctagttctacagtcccaggcttttcggttcccacagggctggagaaagattctgccaccctctgagaggcatccgaagttcctgttatttttcggggaacaggccctaagggaaaccttacctacaggtttctaacattgcttagagtatggtaggctttaacgatagcttggatgggcttgtctttccccccgaaagatgtcccagtaaagcccaaatccaaagggtcgacagcttccccaagccaaggcaccaaaaaagcaaagtctttgactccaaatccaactacacccaattcgtcatctacaacacaaccactattacaacaacaacaacaatgatagcaacattaataaggacaaaaacaatagtaacaacagcaacaacaacaacaacaccaacaacaaattccaccacagtaacaacaactaactttgtcgcctcaccaaatacagatatttccatcctagtatgctccattttttacactactgtcagcacctcagcacccaacagggcaataaccccttagacccacttccactgttcctccttctagaccatgcacatccttggataagattccccctccgggcttctcatttcccatgaggccaaccgttcttggtcataactaccttactaaagcaagcgaatcagccatcactctcaagaggcgccatgagaaagaacaagtgatccttcagagatagactactggctatcttccatcaagatagtagagatcgcagaagggattcgtcagccttcctcacctagcccagtattgaatgttgccacagtaagccaaaccctagttcccatggttggtagatctgtggccccttatgctgtagagatgctggataatgtgggcaccaatatgagtgaactcacgtcacgtcagagaagtgggccgtgagtagcagtctagacccatacactctgtcaatggccactaaacaacaggcgacaggggtaagttctaatcttcatgtgcctttactgttgttcacagttaccgagggttatctaattttatctattttatgccaaattgccttattcacaaaaagaactgccaaggaggtgggcaacatgaccatcgagctaggccagctttgctataagattcaatccttgatagttgagaatgggaccctatgcactgaagctaagtgagtcaaaacctaggctacccttgatttaagaaggctcagaaccaaagcaatgccgcgctggctctgaaggagaaggaaattagtgtcaagtaatagaaactttatgaggaccacaaggcccaggctgaaagtgacatccattcaatagtggcctttctctaggaaaacttatgcaacaccaaggaagaacttcgcctaacctgggaagagaagaaaaaaactgaggccagggcgatgttccaagctgagactctatccattcaaacccaaagagttggcgccttataggaagagggccgcaagaaggacctaatcatcaagggcatgcgtgatgactttaataaagagcagcagttgaaaaattcttggtcactcaagtatgacaacctaaatttactttattaagctattcgcagcgctagcagtagtcgttaggagaccattgataaattgtagagggaggctacccagaagccaactaatggcgcgaaagcttatattgctttggcatctatgtagatgataagggaaaatgccatccaaaccattcaagatgcagctgacaaggaggccagggcaaaaaaataccgcttgcattccctaaatatgttttacgcaatggtcttgtatggtttgtggcaaaaagatcctactgttctcagacttcttggttctgaagatgaagagtttaccaagaaagtgcttgacatacataaggacatacataaggacactaccttgaactcaattttgattattttcttaatataaccaacctaaagattagtacaaacaaatgtaaggaaatataaccaatcttgtcataacacatctaaatctagttattttgacaaaaaattagctcagggtattaatttgtattattttagaaaatactgggtccaatttgtaaaaaaataaggtctaaaattgcccagtttttcctggatgcgaaaatagtagatagtgcatcattacaccctatttttaaggggtgcaccataaaagcaccctaaatttttattagatcacaattttgatttaaactcaactcttagggctcatttggtatgctgtgttatattgtattgtattatcttgtgtcgtattgtattgtactgtattagtattatctaatataatactatatttagtagtgacttgtattaatagattatataagattatactatatttatcataaactcgacccaaccttgaccctgttctgggacgcagatcccatctccaggcccatgccacaaacccgagactggacatcatcccctgacctagacactggtccagggtctaggtccagaactaggtttggggtttggatccagggtcaaggtcttgggccggggtcagagtctagaactgggtttgggtcgggtcttggatttgggtccaagtccgggtttaggtccataatcgggtttagggcccaatttggggtttggtttcgagtttgggcgaagttaggggtttgggtctaagactgaggtctaggggcaaggtccgagtttgggcaagggctgggtctaggtatgcgtttgggtcaagtggaggttctagtcggggctgggtctaaggtcgggtcaagggtctgggtttagggccgagtctgagtcaagggtttgagtccgagccagggttggttctggctccggatctgagacgaggtctaggtctccaactccgaaccctttgtaaatattataatacaagctaatattaatcgtgtgttatgtattaataatacgatttatattatattaaaatttataattgtaataattaataaaatataaaatttcatctaaagataatgttcctcaatttaaaattcgcttaagggtttaaaatagttatgatgatatggaagatattttatttaattttaagtcattattaattagtgttttcggcaaatgagtatcaatttgtcataatattggtgtaccaaaaagctaatcacttgaaattttagctaataaagttggcaatagttggccaaaccaaaatctaataaattttaatcatatcccaaattttaataaagtgatttttggatgataattatctatttttttttttcaataccttgaataatttggtgtcctctaaccattataattttgacttgtaatctgagcacagattaagcctgtgactaagacatctaattctttaaaatcctagtttttctactatacaaaaaaagctcttaaaaaaaaccatcttatatacaaaattttagataataacaaattttgtattgggtatcatccatattatagggtcggtcatgcttgtatatcactgtttatccacatttgttattgtttacaattgtcatttgggttgtgctttggtaacgaatattttggattttgcttactataaaaagagaaaaagaataagatacactactgatcttgaaggctgctgctgccacactcaactgtgaaagatatcataggtacttagcttagctatacatgaaaacttgggtattactctactcttccatatatttcagtgtcacactcacgtggattccagttagaatgagctaaagggcattgaattgaactaaagctgtttttatttttattgacgaaataagatggggaaggatttaatcatgtgagaccaaaagttgttgtctctctatagaagccttgggactaaagcaaagctatacccaattaataatagtcattacccactacaccacaccgtacaacacaacatttttcaagtctcttgcctcttgcaatttgcatgagagtgagacctttcatcttacttataataataataataataataataataataataataataataataataataataataataataataataataataagattagaatctaattatgattatctctattgctagtatcaactcattttgctataattgtcatctaaaaacttgagacccatttcgacaaaaccaattaaagttcaataattaattaacaatgatgagatgatgatttgaagtcatttagctagtagaacttaaaa

SEQ ID NO: 184579 - DNA, 1284 bp, Cannabis indica
cgtccatctaatcggagaccttcagggctgacaaactccatcaaaggcaactcttacaaggtgaagctgatgacgccgtggaatggcttttacagaaattcagaaacccgctgtttttgttcacaaaatcctcacagtttggaaggagaaactccaagtccaacactttcactttggaagaagaaattcctccttcctatacgacatttagggtttagctttttttttaatcttatttctttaagtaatattagtttgttatataaaataaacatacactacttttatcaaacagtaaaaataaatgaaaagagacacttacaaaattaacatttatatactctaaaacaaataggtattcctagttaaaaaaatcaaaatccttaatatcactcatcacaaaaagaaaaaaggacaaaagaggagagcattgaagctgattgtcattggcattcacctcaggttggtagaatcaaagtcaacattaatgtaggacacgatttaactcactgaaaagaaagatcaaagtggttttaggagatgatgcaagtgtgatggtggctcatcagctatcccttgggtctggcccctaaacctcatgttgcaagtattgatagtgtaatctggtagtgtattcttctatgtacgcatttgggatatttttgtgattatggaaatggattgccaaagaatgtgtgaagccattaacaataacgacgtgaagcactctacctttggagtagttttagagatatagctctccaatctaagaatttcattgatatttatgttgtgtttattataagagaatggctaactatctagcccatcttcttgctaagttatctctttccttattgagtgccaaaatataatagtctggcattcatgtccgtatctggccctaaactatgataatagtatgattggcacaaattatacaaaatatatcatgaaaatggcctgcctcaattttcctttctctaatccaactttctttccaaattaaattaaacactgttaaatgataaaatgctttctgcttcgttggctaattacctttgaactggaacaaaataataggccaaagctcagccagtagatccctcaccacattagctaacaaaaagccttttcatatggaaaactaaattttgcgtaacatgttgacagagtatcaaatgacagattcactacaaaagagtttgttcccccgtattgggtttggattactttagaaaaagacataaaagggtttatgaaaatgtttaaacataatatgca

SEQ ID NO: 184580 - DNA, 4653 bp, Cannabis indica
ctattttcataaccaaaattttcaattcaaaatgtgtggaatacttgctgttcttggttgctccgatgacactcaggccaaacggttccgtgttcttgagctttcacgcaggcaattaccattcctttatattaacttgatttgtttcatttctttctatagagaccgagaaaaaatccattacttttgtggttgggcgtgtgtgtgtgcgtcagattcaaaatctagttaaacaaacggtttgaagccctttttcctatttatttcccaagatcggctttccttttttcttcctttttttttctcaaacaacagttaaagcttccactaagttaaaaatgaaagaaacatcatagttatcctatcgtgctcttttaattaactaataaatatttttcattttaatatatatatatttatatatatatcatggtcccgcactagagttacttctagctaagaccaaaaatatatatatgtcattaccattcaaataaaacacacgattatatcaatcatggtagtattagtatacactaatttaaaatttcggatcgaagagctagtttatagggaatcccaaagtgaataattggaattaaaatagaattgtgtcattatccaattctttctctaattttgattaagataaagcatgtggggagtggggtccattaatgaaagtgtggtttagaactacttgtacaatttgattttgtcgttaagatttaactgatagggccttctactactacgtacctacctggaccaggatttggagtctaggcgtccgtacgtgcaaaacagtagtaatataaagaacagaattaatgagtgggtagtactgactataattacactgttgtaatgtgtaccatacagattgaagcaccgtggtccagactggagtggtctataccagcacggtgactgttacttagctcatcaaaggctagccatcattgaccctgcttctggggaccaacccctcttcaatgaagacaaatctgttgttgttacagtaagtccatcatatcttccaaccttgttattttaaaatgtttgatttatgaatattaatatggtgtctgaaaaaaccaggtgaatggagagatctataaccatgaggaactcaggagccgtctccccaaccacaagttcagaaccggaagtgattgtgatgttattgctcatttggtcagtaggcagtctaaaaattttgttactaaatttcccacacaaattattagattgattttttgaaaaaaattcttttatcttatgtagtatgaggagtttggggaagatttcgttgacatgcttgatgggattttcgctttcgtgttactggacacccgagacaacagcttcattgctgctcgtgatgctattggagttactcctctctatattggatggggactagatggtattagttttagtatatttactctgttttacatggtgaaacttatgtttctttttctatgtttggtaagtgaggatgaaatgaatgatcgttgtgttttgaattttgtattcaggatccatttggatatcatctgagatgaagggcttaaatgatgactgtgaacattttgaggtctttcctccgggtcatttgtactcaagcaaacaaggtggattcaggcgttggtacaacccaccatggttctctgaggctgttccatcaaccccatatgatccacttgttcttagaaaggcttttgaggatgtaagattctagtcaattctgattttatttagaattaagtcaacttcgtttttgttttgacaaaataacttatgtattgaaacataacacatgcaggctgttatcaaaaggttgatgacagatgtgccttttggtgttctactctctggtggcttggattcatcgttagtcgcctccatcactgctagacacttagcaggcaccaaagctgccaagcaatggggaacacagctccattctttctgcgttggtttagaggtaaattacttattcaaaaggactcaacatcacatgcctactttttctttattttgtacttggtattaagatcttcaacctttacaattgtgagcagggttcccccgatttaaaggctggaagagaagttgcagactatttggggacagttcaccatgagttccactttaccgttcaggtaataacaataacaacctctattatgttgcttaatagataactaacatactatatttattttaatatgtaaacaattttgcgatttgtgtgtaccgcaggatggaatagatgcaattgaggatgtgatttttcacattgaaacttatgatgttaccacaattcgtgctgctacaccgatgtttcttatgtccaggaagatcaaatctttaggtgttaaaatggtgatatctggggaaggctctgatgagatctttggtggctacttgtacttccataaggcaccaaacaaggaagagtttcaccaagagacctgcagaaaggtacttggttttctttcattttcccctgctacatgtggcttaactaagtgtgtgtgtttatgaaagataaatgactttattactctttaccttgcagattaaggcactgcatcagtatgactgcttgagggcaaacaaagcaacatcagcctggggtttggaagctagagtcccattcctagacaaagcatttatcaacactgcaatggctattgatcctgaggctaaaatggtaacatagtttgctttgtttggttttaagatgcgtttagtttgatgatttttttaacatggtcaaactacagagcccaatgttaatcaacctgtattgaatttcagatacacccagaagaaggaagaattgaaaagtgggtgcttagaagggcctttgatgatgagaagcaaccctatctgccaaaggtgaaactcttttcccaacttgtattatcagatgccttcttatataacttcttattttcccccttttctaactattgtttctatgtgattccttgcagcatatcctgtacaggcaaaaagaacagtttagtgatggagttggatatagctggattgatggccttaaagatcatgctgctaaacatgtagaatagcctctttaacttgttttattcacttgtcatttttgaaaatgaaaccactattatcttggaaactcacttgaaatcttatcattcttgctcatttgtactcacaggtaactgacaaggtgatgcaaaatgctggaaatatcttcccacacaacactcccaccacaaaagaagcatactactaccgaaccattttcgaaaggttcttcccacaggtaaaaataacagaaagattaacttaacttgtgcttctgtcattatgctcttctgtattaacttgtgctattggatttttgcagaactcagctcggctgactgtaccagggggagcaagtgttgcctgcagcacagcgaaagccgttgagtgggacgcttcgtggtctaaaaatctcgatccatctggcagggccgcccttggagtccatgtttctgcttatgacaactcttctgctaatagtggggtggttcaacctgtgatcattaacgatgtaccacatatttcagtgagcactcatggtgttgagatcctcagctagtaaaatcttacacataatgatgctagatggaataatactactactaataataataatgatttgtaagtctactgaggctagaatttaagatgagttctttccttcctctgccttgacttggcatatattatcgtataggcagtatgtaaaaatttgagagagtagtactctctctgtgctatggtgacttgaaatatatatgttatccttgtattggtgttcataatataagaagtgacactttcttttgctttgggtacaacatcttcagtttctcacttgcatttcaatgaaaaacaaatttaaagtaacaataagtttgacttcaaaattaaattgaagaaaattaaaagagagctctctgaactgcagaatgccaagtaatttccacttgcatttccatcaaacagtttatttaaaattaaattgaagaaaattaaattttgaagttaaacttattgttaatttaaaatctaggtacttagagcataagccaaaattaatgtaatatatatctccaatgaaactttattttgcaactcaattttgccgtatgattatgcacgatatatatgccgtgatatattagttatattataattatttgtattataaaattaatatttaatttattgtgtgtaaataaaaatataccctatctatttcggtattcgagagacttttttagtctagtttttttttccatagttgtatatattataattatttaaaatattctgcaaaattttgagaaatttaaaaaaaattaacacgatgaaaataagattcaaactatttgttgtatgtgtaattcttttatttggaagggtacattgtagaaatactttttaatttattgtgcgtaaatttaaataaaaataccataaattattattatattattgcaatatgatattttaatttattgagttttatagattttacaatattattatttttaaattaattagtaattttatttaaattattatttagatattacagttgtgttg

SEQ ID NO: 184581 - DNA, 2952 bp, Cannabis indica
gatttaaccagtcatccaaagtatcttgtcaccttcaccgttggttatgatcagaaaaagaatattgatacagctgtgaaaaaggtttactcttactctcgctctctgtttccgtctctttctctttcttgtgttttgtgtgtagaatatcaagactcaatattcctcttccacagttttcagaaaattttaccatcctcttatttcactatgatggtcggacaactgagtgggatgagtttgagtggtcacaccgagctattcacgtgagtgtccggaagcaaactaaatggtaagaaaccattgctaactagtgtggctattttgaatggcgtatactttattccattttattttatgctaagcttgtaattttaacatgtaactttttgaaggtggtacgctaaacgatttctgcatcccgacattgtggctccatatgactacatattcatatgggatgaagaccttggagttgagcatttcaacgcagaagagtgagtttttggatatttagtacttttattttaatgtctgcttcggttacagaatcttatccacctctttcctatcccaatccaggtacataaaactagtcaggaagcatggtttggagatttcgcaacctggtttagagcctaataaagggttgacatggcagatgaccaaaagaagaggcgaccgtgaagtacacaagtaagaatggtgacacttcgttttaaaacctctcaaatttaatttgttgattttgacatacttaccctgaatttgtttcagggacactactgagaaacctggctggtgcactgatccacatctgcctccttgtgcagcgtaagaacctttatttaaaggagctgattttaagtgttattttgtctagatctagattgataattagaagtttacttaaatatgttttaacttttcctttttgtgtgcaggtttgttgagatcatggcgccagtgttctcccgagatgcatggcgttgtgtgtggcatatgattcaggtagagaacacattgatcctaaaattgttcaattatagaaatatgttccctaaacacacttttctgtgcctgtataattatcttattaagctgagaattgcagaatgacttggtccacggttggggtcttgattttgctcttagaaaatgtgttgaggtaagtcacctacctattttatttatttatctttcttttatttgtaatatgacccttcaatgaattattattatcttcttcaaacagcctgcccatgagaaaataggagttgtagattctcaatggattcttcaccaaactgttccctcactcgggagccaggtaaatatccatgatcaactgctctttcctttcatttgttgataatctaaccattcaaggaaatacttactggtttcctggcttttatctagggtgaatcatataatgggaaggcaccatggcaaggggtacgcatgattatagacttgttttgtttgttcttacttttcatgtttttttatatgagcaaaatttgttcaggaaataagttgatggatttgacttataaataaaattcaatggtattttgcaggtgagagagaggtgcagaaaggagtggacaatgtttcaaagtcgtttttcaaatgcagaaaaaaagtacttcaaatcacagggggttgatccttcaatagctcattagggaacagaacagaaataactggagtggactactgtacacaatcaccaccactataatgcttagcctttttgtctctttcttttttctttttttcatatgtctttacatttaatttgtagaaccccattatcaatattgttaatttcttttaatacatatatttttggaaaagaaaaaagtatattccttctgagttccggtgatactggaaatagggtactatgacttgatgtaacaatgtcacttccatcaatgactgttaccaccaccattactattcatagcatatatatatataaaactccaatcactggtttaccctcatcaatgataacattgaaaaagaaatatctttcatctttggaaccaatttgatatatttggttaataaaaaaaatggtaatattgaggtttcaagaaaattctctcattgatttggttgattgggcctggttttggctcttgttatccacttgtttatttcaaatgaataccacaacacagtttggagccttgtaatgctccaactgtcagttaatacatagcatttgtatacgtgtacccaagacaagccatgacacagaaacattggttggccacatgaacaagtggcagtcatctaaaagctcaaaataaaccatttctttcagtgttttgaatgaatattacaccgcatagcattgccaatagtattggtttggcccatcatattcataaatcataacacagaatcaagaaacttcttgccaatccacacaaccccattgaaaggtcactgaccctgccacaatgcacaacctcattggtcctcacaaaagtccctcggacacgtggcgttgtcaaccttgccctttttggtccaatgaaaacagcagttgtaaaatcagaaccccatttcatacttgtcacactaactccacgtgttgatggctcctgtaatcaccaccaaccagagttaatgtattctatcatatagtttaggccccatgttatgttaccatgtaatagtactagtatatatatctacagagtcccgagtgagtttttcacatttgagtctttcgtttgctctcttgggttttctccttacctctttcgtttgtttctttgttcttctctgctaacatgggactctcaaactttcccacagcagccgaaggagtgttacctgtgctagtaatgaacagtgttttatcatttgctttattgaagaacatgttgagatctgtgcttcaagtcatgggtgctaatattatgagtt

SEQ ID NO: 184582 - DNA, 909 bp, Cannabis indica
taattcatgaacaataaaaataatagactaaatttgtgggtgtaaataaaagttatgtacatattaaacacaatttttttctataacatattaaacataaaaattggtggaaggtaaagggaagaagggtaaaaggataatttcaacaattgattgaaaaggagagatgtttctataaatggttgcaccttcttcgtttctctctctatttgtaaaccgcgtctctagagaatataaaatcatgggagaaatagggaagaaaaactaggagactccccaaagaaaaaagagaccgaagaagaagaagaagatatcaaaagatgaagcactgtgagctttgtaagggtttggccaggacttactgtgaatcggacaaggctagtctttgctggaactgcgacgttaaggtccacggagccaactttctggttgctaggcacacacgaagcgtcctttgtcatctctgccagtctccgactccatggaaggcctccggagctgaactcggcgtaactgtttcagtgtgtgagagctgcgtcgttgttgccagaaacagtaccgaaggcgagggcgaagaagatgagagccaaggaggtaacgatgttgaatttgactctgacgatgatctaatcagtgaagatgacgacgaatatagtgatgaagaagatgtagcggaggagcaagaggagttagacgccgatgatgaagacggtgataatcaggtggttccatggtcggcgtcctcgacgatgacgccacctccggcagcgagttcatctagtagtggagagtccgtaagcactttctgtaatggcggtgaagaattttcggaaggattttccctgaaacgaaaccgagaggtttcttcccatcctactcaggtatctattttcaccctctttctacggt

SEQ ID NO: 184583 - DNA, 3105 bp, Cannabis indica
aaaaaaaaatctttattttcttactctttttctcatctaattttattcatctttcttcttaattaagactatgatccaaacttatatagctagagagtcataaaactactaattatacaatactaattatgaaattatgaaatttaaaattataaaaacaaaaatgatgaaaatgttattataggaaccaatcatacctgcattattgatcttcttttctctatctcttttgtgaacaattttgtaataacaaaataacaaaccaacaataacaagaaaaggaaccaaagctgcaatcataggcacactccatttctttagaatattcttcttctcatcattattttgtgtcggaggcgaatggtgaggtggtggcggggcctggtgcctgggcgggggaggcaaaaaaggacaaggaacttttaaaggcttcccacataaacctgaattatggtcaaaacaactttttggaaatcttctaagaacactcgtatttggaatcagaccagaaagttgattatgtgaaacgttgaaaactattagggttgactgatcaaaaggcggaattcctccttccaacaaattgtgttggagctcaagagttttgagatttggcaattcagcgaactcgcaagggattgtaccagaaaacttgttgtgcgataaaaccacgatttctaagtgaattaggtttgtgagtatgggaagtggacctttgattgagttgttgtgaaaatttagatttgttaagagagttaggttttgtagaaatgttggaggaagagttcctttgaggtgaattccttgtagagaaaggtgaacaacatgaccatttgaacacgaaacgcctacccatttggtgtcgttttgaatacaaggcggacctgtccattttgtgtgtagatcctcatttgagattagagaatctcttagctcgatcaaagcatctctttcttctggataataatcatttatagtcaccgataaatgagctaatgaagatgaagaaagatgaagaagaattgatagaagtattattagatcattgtgatgaagatgaagatgatgaactaataatttcatgattgtatggattattagaaacaaagaaagaataataatattaataatgacatgattgtaattggtgtattttgttttgagacaataattggtgatgataatgataatgatgatttctataataaagtcttcttaccttatttttttgtttattgtttttgtgatagtttgacaaagtcctttaaataacaaatatgccatgattgatagagatttggacaacaaaatggtataatttaagactcttgttatataaaataataactaattaaaataataataacaatcaagattatattatataaacaatgtattaaaaaaataaatagttaaaataagcttaatatataaaattcaaagggtccattttgttttcattaggggatgtattttgtttactttctcataattcttagatgaatattaattggaattatcgaacgttaatttgttaattatacaagaaaataagttttatatattgtaaagaaaagaacaataaaaaaacaaaactcatcaactataaatttaaagatatacctttttttttgcaatattaaatttacacataaaattctacaatgtactttttaaaagaaatacactgatgcatttttatttatttaggtatccgaaataattttttagtcaaattttttcttatgatcatgtacgttagaattatttaagacattttataaaattttaaataattcaaaaaaaaaaataaacacttaaaaaacaaggttcaaaaaatatgtatgcgtgactattttattttacacgcttgtaaaatagattatttaaacattgtttttatattgtaaattattttaaatttctcttataaaatatacttaaataactataacgtatacgaatattaaaaaaatagtttttttcaaattatttatttttaaataaatatgattatttgtcaaatttgaagtagtgggaacataattttgggtttgaagattttctaactctagtcattgttgttgttgttatggatcattaataattacacattaatataaatatattttatgtatatatttaatatttattgtcaattccttacaaaatatatatttatatttatatatatatttattgttgagatctgcatgtctgaatttgatataggagaatattattgtgttattattattaatttaattgtaaattatatataaatatttttatagcatgaaatataaaattgaagagttgaattttataataacttcgtgggaagcaaatgctattgagatgaagatgcttcatccaactatgataattaattaattaattaaggagttaattaggattaatatacagctcatttttctaaataaaataaataattatgtgggtaggttggtttagttaacataccattatattatattatgaactatatgaagttcatcaaataagataaaattaccaacaaatatataaaatttgtcctattgaatatccggtaatatcaatagcttcatgtatttatttgtttataatttttgacataataagattttcaataatatatacttggtttaattttattttaataaacatagttaataatggttcaatagtagaagctaattgtgataattataagcttgtgagtacactattgaattgtgtttattattattaaacaacaaaagcataaacaagaacacttggtgttgatccaaaaagctttgttagtaaagttgtggtcagtctaaataatttttctggatatcttatcttcataagtagagtctttcgaatagcttgtcttccataagtagagtcttctagatagcttgtcatacattcggacatccttccagatagcttgtcgttcgtaagtatagtctttcggatagcttgattgcgtgttttgagtgtgaaaattaactaagaaattaatagaaagttgtaattaatactagtcttcttacaaatgataatttagataatttgctcttttaagtgaaaatttctccaatatataaatat

SEQ ID NO: 184584 - DNA, 3008 bp, Cannabis indica
ttatgctgcttttagttttcttcctatatactatgaactacaagaggggaaggttggataggcatttttgctaattctagtaagttttggaagttgctatgtttcccaactttggaaaagacatttgtgcttgcagtagattaaatctttgtttggtgagattgtttcttttgggggctctgcttgtccaagtgtaggttcatatatgcttcatatgaatgttgtttctgttgtttattaaagggttttttttttgtattatttctgtggccggcaagaatctgattctatagcttagctataaaaatgtctttcattagaaaaattccatgttcgtgttgaaaaataacacttctagtgctcgtttggtatacattgttgtattgtatagtagtatgttgtattgtattgtattctatcaatattatttaatagaatattatgtttgatatttacttgtattaataggttgtataatattattatctttactataaactcgatcccaatccaacctcgactgcggttgtggacctagaccccattccgagacccgaccatggattgggactgggtccaggtccagtctagggtacaggtacggagtcgagtctgagtccgggtcctagggtgggatctggggtttggggttggtagtccgtgtttgggttagggtacgagttggtccaagcccccaacttcaaactctttataaatattataatacaagctaatacaaatcatttgttatgtattaaataatatgattcctattgtattaaaatttgtggggtaataattaataaaatataaaattttatcttttatagaacctaataaaacgagccctcagtacatatatttcctagtaatcaatgttggagatctttatttgatgtgttctcacctgctaaacttaatagttaatacatcctttggtatcaatagatttttatggtcatgaacacaaaattatatacatacataggcacactataatggagcacacaaacaatgtctttatggtgtgaggtacaatctaattgaggcatttaaaatataattttttaaaaatatttttccaataggatttactttagatgaatgtttaacatattggtacaaacatattgttatgggaaattttaacacgatactttaaattcttttattttaaagtttttttaaattttactatatattatagaatagtattcattgtaaaatagggaaagtagaatttgtgatctattaaaggatagagtaaagtaaaatttttatgatgtattaatatcgatgcagataagtgatcataagtgatcttaagctaaaatatagagggaaatttgaaaaaatatgcataaaatatctaaactaatacaattcaaaattgaaaatatatgaccaatttatcaaaaatctaagaatactcctctcataacaataccccaactctctctcttcctctatctctctcggttctctctcaaccgaacccttcaccaaatcaaaacccccctcaccaccacctacaacgccggccctctcccaaatcaaaaccgatcacttctcactgcctaccgcttacaccgctaacccctttctccacgaccaccgcgacccacggacccaatgtcaaaggttagtgtttttgaatctgtaatttttgggttagaaaatgcattttttaggcaggcccgatgcatcatgatgcaaaaaattgaatctggttgaagacaaaggcccgatggttagtccgatggggcccgatggctagcccgatggtgtgtccgattgtacactagtttggcttatttctgggttttaaaaatcgggtccgatgggggcccgatgccccgtccaatggccagtccgatggccagcctgatggccagcccgatggtcagtcaatttttggtaaaaataggaagagagagggacggttgaaaaaaatgagaggggtattttggaatttaggaaaaagttatcacattttataaattatgtatagtattaatttaggggaccaatttatgagtttattaagcatccaaattcaaatttcccaatatagattacgaacatgcccatcagatgagctatgctacctaaatagctaaaataaaagctaaatgatgtaaaattgctcatccattagatgaggtaaagaatatgtaaaatcgagcaccaactttttgagctatatccttcgctatatgtggccatggaatacatgtgagatattcttttttaattattttatctttttctcttctttattaaatattttttatttctttgattttttgtttatatttttaattaatagaaatgtttgatgatatattatttaaatgctatgttgaaattttttttaaaataggatgtatggtgtaatttaagtgtgtgagatgaaataaagaaaatgagattttggtaatatattttaaagaatagagtaaagaagttgatgagataaggatagaaattaggtgggtaataagcgggtaatgcacttcccaatctcattctcgttccccattatgcccctacccccatcctatttcatccttgatgagttcggaataggggaatctctattgggtatgaggactcgttgggacctattaaaaataataataatgtaatgtaatttaaaactaaaatgaaaaataagacattgactttaaaataaataaatattctacctatgaaataattttattacacaataaattagagaagataattaatagttaactttgtaagtaagtatagtcactaattttaatgtgtaataattaaaaaattatataaaaagtttggaaattatatatatgagtcgaatatggggtgaatagtatcactcctaccccgccccaaactcgctttgggtatataaaattgcattccactcccgtcacattacccattaaggcgggtgatccccaccccattcaaggtgagtacttgtaagtacttgtttccgcaagtcaaatttccatcac

SEQ ID NO: 184585 - DNA, 2726 bp, Cannabis indica
taataacaattaaacaaattttaaatctacatcaaataaatccagtctttaactccagattgatctgtgtcatatttcttccaactactgattctttttttcctcaagcaaggctccccacctaatcctacaatagttggagaccaggaaactacagaaaattactacgtaggtacccaggaggtgctcaaacctcaaactttgtgggagcaaaccacatgcctaaccatttgagctacccctcttaggattccaactaataatacttgcctgtaaagcttgtacatttctctccagttcagctatgtactgaagcttccggacacgtgagcgctgggcaaattgcctgtacaaatagagtttcattttatcaatgtactcataatcttgtttcaaactcacaaacatggtttgaatattcatttttaatctagatgcatgtaataccatcatacagccacaaagcaagaaagtaataaaagcagtacaaaaataaattgaagatgagaattaacttataaaagataggaccaaaatctcagaaattgtccagacaatgaccctatagctattagtcaataaaaactttaattcattagtacaaatttccaaagcttttatgccagtttacccatctttttccttgttcgtttgcatgtgattaagtcatagagaaaaagaatcatcattttgaatgtgttaagcaactatgaacaaaaaagtgttaacgtttcgaatatatcgtactacattcctttccgtaagggttgctattattataatcctgtaggaatcaaagtagattagctaaagcctttgattaaaaatagatatgtttaagattatatgcataaaattatgtaaagcagcactaaatcaacaaacagaaaaataaaatcataaaaataatgcaatcgtgctaagtttatcatccaggtaagtggtagatatgaaaaaataaacaagcaatttaggtacatactgtttagcacgtttggtatcagtgtctgaagatgaaggcctaataccaggactatcctttttgtcggaagtctttgaatcatgtgaactagtttcaactaagtcatgcttttcacttgctgtagatggatggccatctgcttcaagtggcatgcaaaaagatcctgaaccctgacgagatataatatccttgccagaaggaagaccacctgggatatttacattcaaagaagagtcccatgctttattcttctgttttgccatgttcatttctgcatagaatgaagcatgtcgcaaatccttatgatgatcgaaatcttgagatccccaagaaggagttgataccaaattcctatatttgaaatcatcctgagcagaataatcaatgtttgagtgattaattgcatctacatatgcaaaagaatcacttgatgatcgtcggtggcctcctctgcgtacaggtgtctcaggttcattaagaaggtcatcaagccaagaaggttgttcctcagcaagaaaactctctgaggaagttcgttggtgatgcgaatttccttctctaggtttctgaacagcttttgatccaaccgcaggactaacaacataatcggcatatgatggtgaaacactaggaaatggacttttcggaggaagtaaggcatgttttccagagtacatcaagcttctaaagttagtcgacccctttgaatttgccatagctgaggagcaaaaagtatgaccaacattataaaaagaatccataatcagcattctggcagactaacaataaactcgacaatacttacacagggaataaaagcaaaaagaatgaaaccatgaaaaatgaacaattttgaagaagaaaaaaattgacacaaacatcaacaagaacaaaaaaaaaagaagaagaagaagaattctacaacagaagtaaatgaaacagctaactatagaaaaaaaaggccaaactacgtgccataacaatgcaaccccaaaacattttctacaaaagtttaatacaagaccatacaatttagtaaaatgtttcaactgagccatccttggctcatataacacgggtcaatcccacaatggacatggttgccacagtaaattttcaaatacattagccccttcaatctcaattcaaccttatattttatgaagaaaactaaagaaacagaaacatattttaaggtatcaatccccagagagcaatataaggtgatttttactgttaatgtttttctttttgccacaaaaacaaaaattggacctgaacatatcagaaattaaatattcaagccattctttgttttcccatctcacattttctcaagaaccaaacagagaataaacaaacaaagaaatgtagaatgaaaaaaatatatatctttgaaacataatctatgggattccagaaaacaaaaatgatgcatctataagattagaagctgacttatacagaaacagaagaaagatagattcgtcttccaaaccaaaatcaaaaaactttttttttaaataaaaaaaaaaaaatacatttccttattgaaaaacaaaaaaatgaaaaagaagcaagcgtaccttgttggaattaagaaatcaagatctcaatatgcaatgagaaaagtaagcgagaatattgaaatttaaaagaaaaaaaaaatggaaacaaaaatcgcttctagggttcgttttccctgttttccttctacttctaacaagcgcctctctctctctct

SEQ ID NO: 184586 - DNA, 2439 bp, Cannabis indica
tatgagttttggtattactgatttgcgattatgttagggttaaagttaattttttattttttgtttttttttttttaagagaggggtggggggaggaattcattaattaacaatctatgtaagctttttcatttgaaaaataaaattaaaaagttgaaaactaatgatatatatgttactttttagtacttttacaatgcacttcttaaaaaaaaatatgtaaattgatgcactttttttttatttcgacatttaaaaaaaaatagtttaatgtttcgatagttctatatgttatagttatttaagaaattttataaaattttaaaaaatttgaaataatttacaatataaaaaaataatattcaaacaatttattttacaagtgtatataataaaagagtcacgtgcaacaaacagtttgaactttatttttagcatgttaaaattttttgaattctcctaaattttgtaaattgacttaaataattataatgtacaccgccataaaaaaaaaattaaactaaaaaatttctcaaatataaaaacggacagtagtgtatattttcttttacaagattgcattatggaatttttggtattctagcttgaaaataagagaggggactatctgtgtacgttgctaagagagctccagcctctaataattacttatcaatttctcaacgaggacacctagtgacttatacgacgatccattttcaaacaaagccatcctacacttttgtttcatacattttactctctccctaacctcacaatcacttgccattaacctctcaattgctctttgtacctcctctgccattactaaatcactaccctccctataatccaacctaatatctattgctaatcccaattctttcaccatctcaaatgcattcatctgttgctcagcatacactggccacgtggcaatcggtacaccatgccacaagctttctagaattgaattccaaccacaatgcgacacgaaccctccaatcgccggatgaccaagaatcgtcacttgtgggacccacccacacacttttcctaacccaaccgtacgatccaaaaaaccacttggtaacacgtcatcaaaattaacatattcattcgggagacccaacttagcattaggagccttgcgtaatgaccataggaaccgacacccgatccgctcgagcccaatagctatctctctcacttgaggcccattaaggcttcccatgcttccaaagcataggaacaccacggacgacacaggcttatcatcgagccatttcatcacgttcttctgttgggctttatctggatgccactgctctggcccattgtaatctattatgggcccaatagagtacaccttaggcacatttctttcggacaatgaatccaatacaaatgtctccaactctgtgaatgtatttacaattataccttttgtttgggtgtacctttgaccatgataaatataccatgcatacccatcacctcgcttcaatactgtcgtgggaagaatgatcgaggcactggattagcaaaccccggaactctaaactcagtaagcgattcagaatcgagttgcgagtcgagaatcggcacctccaacataaagctgagaaaacttgctggtgaagcaaagaaaaggtaagagggaattccaagctcaactgccacgtcgatcataggcgtacaaaacatgtcaacaaccaatccgatgattcgtcgttgttgattggagttgaaaggttgactaaggcggaggctggaaatggcatttttaacattgagtttataattttctatgagggatgatatgtgggctacgtaagagtggaagtgattaggtgagggagggtccatggtgggaaggaggaagaagcggagattgggggaggaagatgatgatgagttggagaggagggattgtgtgtaggcgttgattgttggccactgtgggacagggatgaggaggatggtagcggagaggcggctaggatggtgatctactaggcggcgagcaaattcgacagttggggttagcattcctattgccggagtagagatgaagaccacttcattattattcatctctacatgagagtttttttcaaccatgtttcgatcttttcgagtcatcattgtggatctctaggcatttaaacttttaatttatttgacaaattacagaagaaaaagatgtagtacaatgcgtggttgtatgactatattatatattatggagtaaggattgacatggattatataatataataacatgttaggtaaatgtatttttcattctattaaagtataccaccacttgacaaaaatatttatatagtcaaagtatttatggcgaatatgactatataattattaatattgagtgttatcaaaaaaaaatatatatgttaaaattagacctcactg

SEQ ID NO: 184587 - DNA, 1581 bp, Cannabis indica
tctaaaaagatgtatgtaaaaaattttaaaaaaatctaaatagtttaccgtatcgaagttgataaaaatttactaaaatattcttttactgagtgtttcacctctattagtttgaaaatttttggaaaggtgttttagagtggtccaacaagaattagacttgaccatttagtgaaaatcatattttatattgaaggttagtaacaataataatggtagtgttagtgtggtttaattagcattagatatatataaaagttgaataggatatagaaaattgatgtgggaagtttgcgtgggaggtgaacgtaatttgtgcgttcctttgaagcaatccaatgattgattgagtgactgctttcttggcatgttagctaacccactaattatactaatatttttataccttaccaatccccaatccccattatacccaatgccttgcctttctcaccttatagctacgtcttttctactgttcctgtcactgtactcagctttcggtatcgctttttgtaattttctccacaatctctcctcctttaattatcatcccattatatcataattttgtacaataattattattattttgttaagttaaatccgtttttatttttaattaatctcaacatggctgacaaaaagtatggcaaataattgaaatatgtgctactttctaccaatatggttaggagtgggacttaacttacccctccatattggcgagaagggttgggtacatactacatatatagatatataggttgtgtatagtattgttggttgctatgtcatcacaccaggtagcgtcacatctccttaaactttttagttttgtttaaaaaatatatatataaataaaagtaggagattaaggccaattatgtggcttggcaaattgtcgtaatgtaattatggttaacagaattcttttctgaaagccactaactacgttacgtaaattaaagaacatgggtaatggattggacaacgctatatgacttgtcaaaagaagagaaagaaacaaagatataaatatattcgaaacacacaactgcgtcaattaaattgtagagaaggcaataaggcaaggcaaggcattttcaatgcccttaattaattaatttttaattttatatatatgtggaggtgaagcatgccacgttacacactcttttgtgtcatgaggaatatgccaaaccctggcaattggcatatatatgacattaataatattatggaaaaagagaatcaggtaactaactgctcatcaaatgtaaatactggaataaaagatgattaatgatgccatccttcgaatcaacgtagtacctgtgtgtgtgtagtgtgtggttattggttaatttgtgtggctggactacttacacacaacttgtatttatttaattaaaaaagaaattaaagaaatcaattgctcttcttaattcacgtttttaacccagtgcccttctaagaatttattattatatatactatatacaagtagaagtaggtgattccctcttttgtaatgcgcattcaaagagttcactaacaccaaagcctaactaaccaaac

SEQ ID NO: 184588 - DNA, 2704 bp, Cannabis indica
atatacatttataactctctctatatatatttgcaatgatatattaagatatggacacaagtctagaacctataatattcctaaaccacaatacattttcaaaagcgatactacacatttcttttgctcaagcaaacacaaacgagcaaagcaagtattgcaaaacacacaatgttcttattaaactcttaaaactttttgaaaccataacatggggatatctcccaaaatgataatacatgaaacaaacttacaaaaaaaaaaaaaggacaaaactaacagattccttattacaagaaaagaaagactttaaaacatgaccgacacaaatactttcaaaagatgtactttattttgataaaatggtccataaacttgttccacaaatactcttcgaaaaaccaaaagtaatcacgcctccaaaaaccgcaaaccaccaacagaacaatgacacctagaaagctcactccaaaccccattcctatgcccaatcgaaaccaatattcatcatcttccctttctccatcttcattacttgcatctgaatgcgttgtgataggatcttcaatacactttttgagtggtggtccacacaacttgttgccaataaagctagaagcatccatgctttgcaattgcgtgcctattggaatttgtcctgacaagttgttgtatgacaaattcaagtggctcaagaatgataaacttgacaaacttgtaggaatgcgaccagacaaatggttccttgagagatcaagagattccaaccatgtcatatatattgtcaatttctataggaattctcccactcaaataatttcttgacaaattcaatgattgtaatccttgaagactcgtaagttcttctgagatttcacctgacaattggttccttgagaggtctaaaacacacacgagaaataagattcacattctctctagcctcttgagtatcaacactaaagtaaaatgaagttaaatactgatcagctgatttagatgtcatggacattaaattcttgaaacatcttggtattctccccattaaattgttattgctagcatctaatatttggagtttgagaagcttacacatctcaattggaataagacctgttaagttgtttgaacggaggataagaaggcccaaacttggaagacttccaatccatcttggtatagttcccactaacttattaagaccaagatcaagcccaattaaagctgaacaattcttaagagcttttggtatttttccaacaagactattattacgaagatgcaatgagtgtaagtttcttaaaaagccaatagagcttggaataattccattcaaattattgttatccaagtctatcattattaatttgggccaatacttccaacaatcaggaatgttacctgataaaaaattgttgttaagataaaggcttgatacctctctttgataagatgttggatcacaaagaaaattagaaatattaccagataagtaattatttgaaagatctaacatgtctgaaattggaatacttggtattggacctgtcaactcattgaaactcatgtttagtaaacatgaaatatcatttggaaaattaggaattttcccataaatttggttttcagatttgtcaactctaataaaatgattagaaaaaaagttattccaaaaccattgaggaatgacacttgaaattccagtgttggagatgtcgatttgagaaatatttttctgtgattttagccacataggaaaatggggacccaagttccaatttctcaattccaagaccaggagagaaaagggaggaacccaattagaatttactttcatgcttaatttatttccagaagcataaacgaacttgagctttgtgagattggcaaaatgaatttcagacaaatcacctttgaaattatttgagtcgatccaaagaatttctaaatttgagagagacccaaaacttcttggaagtgacccacttatttggttatttgaaatgaagagggtttttaactttgagagcaattgaagactttttggaagtgacccacttaacttgttagagaaaatataaagggcttctaaatttgagagagaaacagggaattctggaagaggtccactgaaattatttgaagaaagatctaatgtcttcaaggatattaagtttccaaatattgacattggaatgggaccagaaaatatattattgctaagtgagagtattagtaaatttttaaaatctctcatttcatccaagatttgaccggtaaaagaatcaaacttatttccacccaaattcagtgacttcaaacttttagaaagacaacctgacaagctttcgaaaaccattgagacgctgcctttgtaattattgcctgctaaatcaaattcttccaaattgcatagttttcccataaatgaagggatttttcctgctagagcattacccctcaagtttaaattgactatagaggtcaaatttgctacatcacttgagataattccatgcagattagtattagaaaggtggaggtgttcaagattggaaaaactgtaaaagcaattgggaatgacagagtctatgttattgctagacaaattaagatatattaaaaggctcatgttatttcgaaaggtgcaaggaattgaacctccaagcttaagagagttttaactcaggtcaagtgtctcaag

SEQ ID NO: 184589 - DNA, 4770 bp, Cannabis indica
tttttttattactcatctagaaagaacataaatataaaagatatagtcaaaaataatctaatttaattttttcctataatattgggtcttgtatatatgtgtctcttttatcattggcagccttaaaatccaaaggtccaactttacctcaccattttccaaccttccctcaccactaaaccaaactactacaaaaaaaaataaataaataaaagaaacaaatataaaggaaagaagctgtacacattgaaattgttgtaattataccaagtaacaatagttgtacaaaaatgatgagataactaactagaaaaccacaaaagacatctctctctctctctctttctttctctctatctattatgctcttatctaaacactacataatacatatttggcctttaatttcccatggccacaagattacatggttacaacaccctcactcaactaactactgattgccctgtacatgtataatataaggctacaattctggcattccaaacaatataaaattaagcgcagtgctctcgccgatcacattaaataaaagaccagcgagaacaaatacgcgatcagaaagaatgggaatgggattataataaacatgcaagttttttgtttaagttacaaaattggaactaccatggcgtgcaggagcatgagagcaacaaagattgccggtagcatcttggagagcatttcactcaatgagctgctcgtgctgctgagctgccccgcgttaatgtattcatccttgctagtggttacagaaacatttacggacgttgagcctggaaagtagaagatcaacataattgacatcagtacaaacttttacgagaaagaaaggaaagataaactatgtcgatagatgattccgacttacaatcgtagttagcccatccaatcctttgatgagctaaatcatacacaaatatcttatctttcagaactagatctgcaaaagaagaaaccaacaagaaaagaaaatcataaaacttgaaggtataaagtaaaggagagaagtgatataatgccttttactatcatctacagaatgaagttaaaaactgtaagatgggttcataatgttacttattttttccttaattgtgttatgcctgagaagtttcggaacaggcattgggaatctatttggttcttacctcctaaaattgttatgccaccactctgaactttctggaaaccaacacaccacaatgcagcagcaccctgtaataatgagcaattatattactgcaataattcatacttgagatgtaagagttaagcaatctaagggtagaaaacacccaccacaagaccttgacgcataaggtattcttccggttttaacaccatcgttgcaccacccgcaaaattcagacttactggaggaaatatgtcacttacactgaaagaaaatggtcatacaagtacaattgacttagattgtatgaatataagaagccaagaaaattaatatggccaaatttactcgtgtctcttagtaaagaatctttttggaaacaaaacaaatatagcgaacctggtaggaactatatagcactggtttccttttgagatgatgggagtcacagattgtgaaacaaaatttgttacctacaaatcaaaaaagataatcagttttcgaataagcacatcttttaacagctgcgtatagccagcttggaagtcagcacttccaatgcgacataaaccattgaactaataatcttacattgtctagctttttctacagaaaagaaggttcatgtatttagattacttggagaatgagcaaaatttctatatgtgtgttgtaattacaaatggtcattaaatttgaaccattcaaaaagctctcaatttcagacaataacattgtcaaataaacataagaaaaaacacatcatcaggccatgtacgttaaacggacattatatcctatattcccaacttggatgaaacaagagaaacgaatcaacctagaaatttagtgagaagtcaacttggcagcatctcagcaacacatgtactcgagacaacaaatttccccatacgtaaatggatattacccatcttcgtttattataaattgaacttttgaaccactttaaatgtaagtgacattgttaaattattaataatattgataaaaagaagaagaagcagaagccgaaacactgtcttatattattgttttatccaaccaaagtgattttctttagacatcagaatacttacagcactgacaaaaggattatatgcttcctcaacaaggtatgccaaggttgttccagaatcaacaatagtccccccattgcttgatgtagaaaatactgctggatcaattgacaagatttgtccattaacagctatgctctgtagatccaaattgtaatgaggcctgaagtttaaattagtcaaaagataatagagactcagcatttagagatccaacttaattgaaagttatttagcagttaaatacaaaattgacacaaaagtaagaatagaggcatactgggaagggacaagaggactataaactatgcttggctccagaatctcaccaagaaccaatataccccctccattgccatctccctttaaacaatgtgagaacactctgggagttatagctcgagatgacagctgagatatcacagagaattccccttggccaaaaccaaaaatcccatcaacagctttatctgtcttagtcaaatcaccagattgataggtactacaactgttcccatcacaaccatccaaaacaataagcttcaacaaaaaaaatatgagttgcggatcaacaagagactataaagatagttgtaatatagattatagagggttaataacaaaagttttaagttattatcttattgcagatagagttaaaaaagaatatacaatatctatacatatgttagacttcagacacaaatttcatgaaaaatattccgaaaacaaaaagtctttacaatatgaacaattcatttttgttcttatttggtacttctttctcttatgtggtactattcctacgagtgcttgctttaacattttcatatactcaaacaactacacaaactttagacgaaagcttacccgaaaacaatgggagcggaggagttagctattaatgattggcccacaatcatgtcaaaatacagcgcatcagttacataatgacctgatgtgccacttccatctccatattgaaatgagtaaacacactgattttcagcagagcattgtgttgatgaggtttgaattgcagaattgcacattgggtcggagcaaccaatcagcttagctgttgatgaagtagtagtgtcaaagaaattcagcttaatctgtaggaaagtcaaagagacaaccatatataagcaccatattaagtaaggtttattaggattaaacaagaaaagggaaatggattttactcctagtccactagtctgggggcaatcattgcaggagttacaggtaacccacaagatgtcacttccagtatcaatctgaacgttaaactctgttggaggagagcctaatttcacctttgtaaaataaagcctaagcaaaaacacgaacaaataaatattcaatctttattaatggtgaaagaaaagaacaacttaggaaaatggagaggagagaacaaggagcaaaactagaaatagaaaccactaagcaaacagagaaaaaatcaaactagtcaacacttacgcacatagaataaacaaataataatttgaagtgacgattgaaactttatcagaatttttaaataccaaaagcctatatctcaaggctcatcagagccaattaagtacaatataaagaaatcacaaagaacccattttcccaggaaacaaaacaagaaaacccaaaagaacaaaatctcaaatttttattttctcttttttccttccccagtttttacaagagccaaacgaaataacagaacaacgcaggaaggcaaatttaaaatagtaaagaaaataaaattaagcaattaatacaataaatgcgtaacaaagaacaaaaagaagaactctaaatgatcaacaaaatctaccaacatgggacaaaacccattaatgcaaaccacattaaaagcatcacagaaaaagaaagaaaaaaaaacccaagttgataaaattacccgacgaggtacggatcggaggaaccaacgacagggaagtcgacaacaccaccaccgccaccttgcaagactcttctaccatgcctaacgccgtcccgagctctgagcgcgctaagttcaacatggtgagtgggtgggaaagccctctccagttggagaaaactggccggaaaagcacagtagacagcggaaagcgaaatgagcacggcggagactgagaccaagatcggaaaacgaaagaccggcggcattctaaagtggggttgagttgaaaggagtttggaaaatggagagagcgaaaactcaagtggcgaagatcgaggtggtcgtggtggtactgctgctagtactttcttttgtgcattggacacaaaacaaaacaaaacaaatagtcagatatttagagagagaaagagagagagggagtttagagagagaaagactgtgagactgaatccatcaaagaaagattggaaacaaatataaagaagatgattaactaaagtaatcctattactaataagaaaggttcaaatgtttttgtatttaaacttgagagagataactagactacatgaaaaacctat

SEQ ID NO: 184590 - DNA, 4121 bp, Cannabis indica
ttcccttttttgaaattgccagcctctgtttattttgagcctataaaacttaaagagaaattgttagttttatctttattcatgactattgaacttcgcaattctgtttattatggtggagtttaaatgtaagtttgtgttttacaggttggttggtttagttttgatcctgagttccatattgaaagggaacagatgtgctgctatctcacacgtacgacaaagattacacaccagttaattaatgataacttacatgaaactcccacttatggaggatgggttgaatctaaggggcctagatattgcccctcaattgaagataaggtatacttagtgtaatctatgtttctaaaacttacgttattaacaacttcggtacaccaggaggtgataatacaataatatagatgtatacaattcttcacaatttattttactattctttttttctttgttttgctttagattgttcgatttaaggataaggagtcacatcaaatatttcttgaaccagagggtcgaaatgtgccggagctctatgtccaggtgcagtgtaaattattagttttttcttaatgctcacttttcttatttcctagactatacaagtattaaaatccaaagctttgtatatccgggattttatattttcctctactacagggtttttctaccggtttaccggaaagactacaattaccactcttgagaactttgcctggactcgaaaactgttcaatgcttagacctgcatatgcagtagagtatgattacttgcctgctcaccaatgcactaggtctctcatgacaaagaaatttgatgggcttttcttctctggtcaaataaatggtaccacaggctacgaagaagccgcagcacaagtaagtttatttagtactttatttaatttgttgaaattgaatattatcctagtttaaatttatagtgagatcttgcaacaaaaagtgtatccaatgatttgataacctatttcttttctttagggtattctatctggtattaatgctgccagacattcagatggtaaaccactcatcgtacttgaaagggaaagcagttacataggaacattgatcgatgatctggtcactaaagatcttcgagaaccttaccgaatgctaacaaggtaacaacctgcatatctcctacctgtatatatgattgttatggtgatggtgggcagttgtcccgaatatgctctcctgaatgtttttgtcatcatccttttcaaagtcttgaactgtagagaggaagaaggtatgacttcacagcctaaatgacaaatttatggtgtgatcatattcataatatggtaaagcttattgcgtaaatataattgcacctgaatggattgtgtattttctacttggggtcaattgatgtaattcatttttctacacttacacattatttttcttacaagcatataaatgatagatgccttcagtttttgatcttgaatgaatctcgtaacaatccgttttttcatttctgtctgtgttttgtttctttgtagccgctcagaacatcggttgctgcttagatcagataatgctgatagccgtctcacgcctttgggccgagaaattgggttaatagatgatagacgctggaaactgtaccaggacaaacaagctcaaattttagaggagaaaaagcggttgaaaagtgttagaatctcaggttaatttgctctactgtctttgagattgcagttaaacaatttggggagtaattttgtaacacagtaaatgtcaagtgcattgaattctcaaccatagggctatatgctgatgtacatgtgaatactgatactgatccataccagaagtgtcaatatatatatttttttttaatttgctacaagtttcttttttattcttaggaggagaactagcagctgaaattactcgtctatcaaatcagcccgtgaaggaccattcaacactggaaagtcttctcaagaaaccacacatagaatataaggtatttgataaacatggttttgggaatgaaatgttatcaagagcagaaaaagaatgtgttgaggttgatatcaagtatgagggcttcattgcacgtcagcagagccaacttcaacaggtaaagaaacatgaatggcactttgttttataaagaacttaaacactgagctattcatgcctttcacaaacaaatttattttgtaagtcatcaccatattttcagctaccactttcagtgttattatttatattttcgtttcttcaaactatcaatttagatggtccatctacaacataaactgattccagacggtttggattactatgcaatgacaactttgtctcatgaatcacgtgagaagttatcgaaggtgagtaggtagcccatatagggttcgtttagtacgccatattatattgtatagtattatattaaattgtattttatgttgtatttttatataaagctatgtatggtattgacttttatagacataaatatataatattttagtataaactaaaatttaacatagtattgtataaaaatatgatatataacttaatataatataatataatacaattacaaccaaacgagcccataaacttatatttatactgttcatgacaacatgcctatctctcataaacgtatctctaatatcttaattcaattttatagaaggaaaagcactatgtagcttcctttataagttaaatgtattacatttgttgtttaatctatatacatggtgtgagaattttactataaccattactatacaacttgtcatagaaacaatgaatataagaatattgtctagaactagaagccagaaaggcaaaaatattcatttgtaatctaagaatggttgagcacaatgtctttagaaactcttaagaatgatttctttttccccagaactcttaagaatgattttttttttctccagaactcttaagaatgattttgtttcgttgtaatttggatttagtaaatgctttcaggtaaggccacagaccataggtcaagcaagcagagttggcggggtgagccctgctgacattactgctcttctcatcatccttgaaagcaatcggaggaaagcgcaagagcagaagagacacgagatgctaactgctgtgaagatagctaaagatcaagatacgcatgaggttcccttgactgagtcagttagctcatgatatatgttgctaaaaaactatgctagcgacatgctcaacttgtcggagtcaatcaagaatgttataccaaaatgcattatggagcaaatcatatgtttcaaaagtcgtcccttataatctcaaacaacttggtggccaaaacttctgaaaaatggtcaaaggacgatgcggatgagtatttatgaactcattcatctcaattttcagctgcgatattagctcctcactgatccttgccctacagcaaggagtgaagattcccttaaatgttgtgtctaaactaaatttatacaaggataaatagagttgaccccattcgtagttgtacttttttttatatttattaactgggggaaaaacttgattgagaattataccatttgtgttgtgtgtatagcagaagcacacacgcattcaaccaccaaggcaagcatgcagagagggcagcgactgaagttcatactagaccattccgatggatctcattgctatactatcaatctcattcatgttcttgagtttcaaataacgtaatgtaacgcaagaattaaactaacatagtaagccttgatgtagagggtcaaattgacctaaatttctagaggagacagattaaagtttgtcgaacggattatcttggtcgtgtacaataagttctatatcaaccaccggcgcgtcatccatatataaaagtaattttatctaaagtttagagctttgtagttttccttgtgcaattgctaatttggtcagaggtaccgcgacaagtaaaaataaaattaaaaagaaaaataagcaaatatagtgaaaataaaagcaaccccgtgagatcccctctccctctctcatggtcttattatgccaatttcaaagttgaacccacttgtctctctctctctctc

SEQ ID NO: 184591 - DNA, 1287 bp, Cannabis indica
gtatgcaatatcttgtataaaaccctaatttgtatcaccaattctccatagaagaaaaaaaaaagcaaagttgcttacccttgtaacatcaacatgaattatcttagtaagtattttaatttactcaattctcaattcaagtctcacaagtccgaaattttaaatacgataaaattttttatttacaaagaaaaataggattttttaattttttgtgttatttttatgttataattttattgtatgttgatttttttgttttttttttttcatattatttatatgttgtttagatatttttttatatatatttttatgtaatttttttttattaatttcataaaaattccgtaaaagtgaaaatgtaaaaagaaatatatatcttactcataaccaagtacccttacaatcaccaaagtcatcaatcatcatcctcaaccaacgaatcttaccaaacaaaacatgaaatgactattatgtccatgacaaatgagagcttctaatagcagccagttcgtgacccccatgatcccatgatattatttccccacgtgtcaaaatgttacttacattgatctttattactaaattagaacaaacccaactcagaccgcaagtaaaaacctcccactcattcactcaaataacttcccactcacttaaaaaataaccaactcttcattatatataaacccatttttactattaccacaattctcacactcaaacacaactgtgtcgttttcagttgatgatgatgaaaatggctttcaactcatcatctctcttcttcttcttcctctctttattttctcttcatgttctcaatgtcgtttctttcgaattcgaagttggtggaaatgaaggttgggtcgtaccctcttcaaatgagaccaatatcttcaataattgggcctcaaaaaacaggttccaattgggagacaccattggtaagtaaagtcccttaaacgacataattttatcttgtcgttttttccactaatttttcttgttctttgttttgtaacagtttttaagtacagaaaagactcagtaatggaggtaacagaggaggactacaagaaatgcaattctagtcacccaaacttcttctccaacaatggtcacacactcttcaaactcaacgaaactcaccctttttacttcattagtggggtttttcgtcactgccagaagggtcaacatatgattataaaagtcaaaactccaggagaatctccatctgatggtggtggtagtggtggagcctcctcttctggttcagca

SEQ ID NO: 184592 - DNA, 1087 bp, Cannabis indica
caagattttgtaaattcttacatgacaaaggctataatgtagtttcatactaattcataaggattaaacgttgaagagatatagttaactagtaaaagatcttcaaaagggaaagtacagggaaaataatagacttaaaaaacataaaacgtaaagaatttcttgcctcaatcgccaaattacggtctcccttttcggtcacctctgttttttgctttgaatcatctagtgggttacagtcatccattttttcatataaagtcataacttcagctagtgcaccaccatccatgaagcaatctcgtgagacacgctctacacgaacatttgaggaaggtccagcataaccaagcaataactacacaaacacataattattctttgactcaacgttagttgataaaggatcacataaacacaattagaaatgtctagacataacatatagttcatgaaatgttccataactaccataaggctataagttagttaccttttccgtttgttttgagagtggctgcccaagaatcaattcagcaggagacaagctaagaataacagcctcaagtccacttctcataaaattatcattgaattcaccataaacaacatccccagttgatatctccaccccaacaatcccaactttgacctcaatcccactttccatttcaaaactagagttcattttctcaaccaaaacgtttttttccacaacacaaactaaataattactatcagcaccacacccttcttcctttcctccaacatcctcagctgcctccagcgtggccttcgtgtacaatgccgatagccctctacaaaatggacctatgcggttggagccatgagccttaatggccgccgtctcggtctgcttaaccacaccgaccttaaagccagcactgaccagtctcctcacatgaacattcaatctaaaagtgggcacactagcattcagaaaattatgatccatgtgggcataaatccccaaaaccctcgcagccatttccgcatcctcgccaaagaatcgatacttgtaaccgacttccaccatcaaaagcacatctgggtgtttcttctttag

SEQ ID NO: 184593 - DNA, 3454 bp, Cannabis indica
atttttatgacattagaaaaaaaaaatcattagtatgttcagttattattaattaatattttttaaaaaattgattattattttttaaatatcttaattaaaagaaagaaaaaaataaaaaaaattgtgatattttagttatgagaaaattatatttgatttaagttttaatatttttttagaatttatttcttattttctaaattttttttttagatatattatatttttatagaaaattaaaataatagtaaaatatcaatttataaatttatatattttttaaaatattttatatttttattaaaaattaaaataatagtaaaatatcaatttgtaaatttatgctttaataaaacattaaaatggagagaattaaggagagaagagaaaaatagttttggagtgattttagaatgacatgtcaccgcctcatatttctcatttatagatatatatatatatatatatatatagttatggatgactattttactatttttaccttatacattaaattattttatggttacaaatctcattaatatattgtagttctttactaaaataataataaataacagtgtgaaagttaataaacttgtgaagatctttattactagactaaacaacataacttatcttgagaagaaagtattgtataacaaagacaaaaaagggggtaattttataaactaacttttttttgtaagtttatttacaatttttacaactttaaaatttttatttaacaaaaaaaaagactttgttgttcactggaaaaatagctaactgatttggaatcaaataattaatgattaatcaccaataagaagttagaaataaaaagtaaataagaacacacaacaattaataaggttcgatccctttgtatatgggcaatgacttactccccttttaaatgtatggattgtgtgataataccatgtagatcactaagaaagacaaagtaatttctagctacgactctcaaagtgtttatagagaatatctttcaacaaagtgctcatagatgcgtgagtatgattccaggccccttcttcttgtaaatttattcactatttataaggggaaggttgttacaattggctcatttaaaggagtgattaaagagtaaatatccctatattctatgatgtagttacaatttgttgaagctcctttattctagcatagatttgctggatcacagtttgtaggattcagtttgagatatttgtggaaactttttgaagaagaaatcaagggtcatgcttgtagccttgtctggtacttctggcattatttcttctggtcggcatgttgatcacccgaccgggccttcctcgagacttgtcttccttgtgagaatacttgtggaatcactattgcaaggtgttactcttaacttcccttgccagtatgttgatggcccggccagatgcttcatggaaggcaatccaaagcttatggattccaccgacatatgggacctgtctgacacacttttttccacaagatccttgtcatgtttaagagttggttgaattatgccacgtgtaagtgtcacgtcaaatgtgtaaactttaggatgaaattttttccctaagtccccgtacaaacatctatctgaatggggactttcaatacttgtacggatgctggcaggcatgtgagctccacctgatggtactctaacgactattccttgtaaaagtaaatgatcacatttgagtctcttcaactgaccattatctgtcagttctcattatggcagttacaaatcatgctttatgggagatcatgttgacgggtgaactcccctttaatagtattttttgctcttccacttccctatgatgattttatagggaataaatttcccatttatgtttttagggggaaacgaaataagagaggcctatatcaagccctttatttttcttagattttctcattttaatttttatttacaaaaaaaagctcttagagagaaacataaagaaaagctcaataaaactcagagctttttcttgtgttcttccgtcaactttctatcgtgtagaaaaaaacaagttatctcttcatcaccatctagacctcacccatgatctatctagtgagtaagttccttcatcctttcctttttctcttattaaaaatgtttatgcaatttcaatttttgttttggcgtcattggtagacgtttaaaaacctccatgtcgtgaatttagggaaacacatcctcactagttgcatgggtgtgctaggatagataaatgtaagaattttaggtaaaaaatgctgaatcaaaccgcaccaggcaagtggttctctgtttggtaattctccagccaactcttcaagtagttactttgacttgcaaatcaatagtggttcccctgaaccaaaaatacaacacacgaactactctaaatggattggaggagaaaactatagtaagttcatttgggaactgaaccagagtttgaggaaatttcttccaacttctttgacatatattgtctagccatgtgttccgaacaccattctagagggatgtagattgtcatttgtgaaaaaaccctctgaggatgaggttgtgattaaagttacgtagtaatccgatcaggatccaaacttggccaagacaaagaagacctaccatgcagacccttaaacttacccccacattactgaactgatggcaaggggacgggctgtgtaggttgaccaagcagagaggcctgctgagcctgaggaaagggcatgacctacccaaaggacagtcagagattatgacatgctcatagaaggccccttagggggggtataataaggctaaggagtccttaaattaaattgggtagccatcccgtgcgaggatcaaccatgctaaggaagagctagcagctccggagcctttacccgaaagaggggattcagaggctgcttgggtgcctccccatctaagctcacctcgaaaggttcaagaaccttgaggccaaaaagttggtcggggctgttgacactgacctgccaggtgaagaatacctagcacatgcccctcttaataactggatagtatggtctagtccccacgatgaatagaaggctatcttgccccttcactcgtacttttgaggcatagccaactattataagacctgcccagcatggttgactccaaaagagatcaagtacctatctgacatctttgttttatatgcataaatgggcttgccatagcctttgccttttgagatgagttagtatttcacctgaaatccaacccttgtcagggtcgttcatggtacttctacttcagccagctaggctacatatggttgggtgggacgaatgatcttgccatgtctaagattggcagctatgctagatattatttcatggtatatggtgcatagggttgcatcatgcctttcgaagggtcccc

SEQ ID NO: 184594 - DNA, 3012 bp, Cannabis indica
gactccaaaatcaatgatagacaatcagcaataacacgaaccaaagtaagaatccatgggcacatgagactagcaagctgctagaaaaaagaaattgaacatacttgagatgagactagcaagttgaagaatctttacctcgccttcttaatctcagcctcttggtcatccgctgtgccactcacaactaaacagtttgtatctgaattttggtatattaagcaaagatattagtgttacttatcataaccgaacattagtatgcacatgcaactcaacaagcacatacctttcttaatcttggcatgaaacgctccacctactccctcgattttgcttttccactctttctgcaaaatcaccctcaaacgaaaaatgagcataacaaatcactttaatggaaaataaactgtaagttctgtacgtgattaaaaagtatatgtaaacatactattgtttccttgggtaatccagaaatagagactttcaaatctgccaagcgatcactattggatgattgtgatccaccacgagaagcatggtttccattcggagacattggaggcagtatccgtggttgttttacaaccttttgcgatttaaaccactgcaaccaattgataaaacaaactattaatcattgttttcttctatcatcgcacgacatgagaaataatcggttaccttgataagatattgattatctgtgtcttccgggattttccacttcccttctatacgttctggttcacgagtggagaagctacacttgctccattctgtaaggtaaccttggcaccggtacataccagcagaataacgaagagagccagaacaaagaggacaactagaaagcgctccaaacatcattccatcagcactgcgcaagaagttcaaacttgagttatatcaacttcaaaagagaaatatgataaaccactttcaaaaccaatttaataactgaagcctttgccaaagactcaaccgaattctcaagttcacccccaaacaacttgttctaagcactcatattgttcatacaaacatgtagaagttagttaacacgaaatcagtccaaaaacagcttctaacattgctaaaaacaaattcacgaaaatccaaaaaaatgtgatcagttaaaagagaaaagtcatgatatgcaggtaagagcaacataagaaactaaattaccagcgatcacgcatatcaagctctgatcctgttgaatcttgatcattggcttggagcatttcacgcaactcagctgatgtcacatgttttttaaggtcatctttcagcgaccacagttctttactctgggcctctagtttagtatctagatcagacgcttcctgatgatgcttgcttgtagacacatccccagaagcttttgcaagtttggattcctgattcccaacaacatcttttgttcgttttgtacctgctttggaagatgtttgcttcactccttcatcttcttgtacttgcttacctaaacaatggtgaaagaaagacttagcactttagcaataaaaatggatcgaaaaagttcaaactccaatgtaaaggaatttcataccacttttcactttagaaggagccttctcaaccaaggcgaggacagcttcttgatcggttgtagggagtttgtcccatccaggtagtttctccaattgtgtagatggggaaaagttcatgtaacaattggcatggtgccaacccagtcccctaggtccttgaccttcaggcttggtagatatacgaacctaccgacaagaatataataaaccaatccaaattacataattagacatcaacaccaacaagtagtgactagactacaattaaaatattgtgttattaagagcatttatactttaatatctgaaaataatcaacagatgagcaatggaatcaaaatcacaaattcctcagtctgtatttgcatcgacgaaattcaataactaaaccaacatgaacataaattgtaaagtgatgcataaattatggaatcaaaattacaagttcctcagtctgcatttgcatcgatgaaattcgaaaactaaactaacatgaatataaagtgtaaggtgaaacataaatcatgaagtataaatcattcaacagtcctatagcattaagtaattacatgttagtgtcaactgaactaagaacatttatacatttatatctcaacataatcaaccgataagcgatgaaatcaaaattacaaattccttagtctgcatttgcatccatgaaattctataactaaactaacatgaacataaactgtaaagtggaacataaattatggaatcaaaattacaaactcctcagtctgcatttttattactaatacgaatatatagtgtaaatgaaacataaattatgaaaggaaaggcattcaacagttttatagatagtattaagtaattacatgttagtgtcaactgagctaagataagaaaatgcaaccataacacaataacaataataataataataatagagtcatgagtaaccatacctgccctttcatgattttttcactacaacgtttgcaagtggcacgagaagtttgagaaacttcaataccacattcaacattcttggcaccatatgtttcctcaggttgatcaccaccagcaccagcaccagcaccaccttgaccctccacatattttctgattctctgctgatcttcccaccttagttgctcaataccttcaacgtcatcaatactaaacaaaaacagaacacaaaacattataaagttaacaactttctccaaactccatagtcaagaattgtacgtattacacagtttgcaatgacaacaacatacgatttaatctgctttgctttcttcagtatacaactagcatgattccacatctgaaaccaaaagattgtgtaagaatcattctatttcctcaaaagggtttacagaaaccaatgaaaatgtaaagaaaagttaacaatgtcgcagaaataataatagaaaaggaa

SEQ ID NO: 184595 - DNA, 5650 bp, Cannabis indica
tctctctctctctctttatcattatcatcatctcatattcatacagagatctatttcaggtacgtttaattttcatttctccatttgatcaatctgattcgcgatcagcttgattgaattttccggttttaatttgtaagcagatctttttgttttcaatttttacaatttgattgatctgttgagttgaatatggaaattgttttcaggtttacttttggctgtttttggttttggatgtctgatctgatttttttctttttgtttctgttttttagtgtttgatcgtgtgtgttgtttttgtcttcttttgattgttctgtgatgatcttgctttttcgtttttacattatgttgtacagttttgattttattcagaggttttgaatagttttgtaaatacttgcgagtatgattggttcagcaatacaattaagaagatctattagaaaagatatgtagaatgagaccttatctggtttctcttttttctggtatttttctgatgagtgcagaacaacacaaatttcaaaatatctgaatgtaggttcaaattttaattgagttaaaattgtttattttgtgttactttacactcatttggattggagaggctgaaaatgtaacagacttaaaaccttttcactcttctaatttagtttttattggtgttttgatgataattctcctctgtgttcttggttgctaagaaggttcactgtttggttagatggggtatccttttctcataggagctgggaaacttggggatatgatatgatgatggatttttattggatatttgatttactaagttggagagattctagttgtaaggtaatctggagcagtgagacatgcatgaacagagagattctcgtttttactgcagaataaggatagagtttgacattgaatgcgattactcatgtttattcatggtatgaattttgtaatggaggtaagtcttgcaaaacaaagcatacaaatttctttgttttttagttggcaagtttgttagtgggacgaacaggtgagcttttttcgtggcatgcttttatgaggtagtatgaattctgtcaataacacagatactgaaggagacttctcttaaatactgctgactatgcatgttatttgagggaatcatctaagaggggactgtttagaatcatcatcatcaagctttaagctaagatgcagatacatatatagattggtggatgaccaagtactaactttatatttttcaaagaaaagaagtgcttcttggttagatttccatcccccctggtatctagctgagcctgtatagaaagtaaaagagatttcaaagcaggatactctcaaggataatcagcttcatgtaaaggctacactcaaatgcttgactgaaatagtaagatggataagaaagaagatggatatattgtaggattatcttgcgaatctaaaggggtagaggtagttagaaaaaataggaaataaggagttggttggggtttttttgttgagattatttttttcacatattatatatcatgtgaaaggaagtcatcaggaaaacagccactgaggttaaagaagttttttttgggggtaaatactgctgggaggactctgttttccattaccgtgtggagtggattttaggaaagatggattacatcagaacaaagtaataatttagacatagtattcaatataagtatgccgaagaagtggaaggctgatgaccttaaattgcaacttgataccaaattgaataacttttaaaaatagagtctcagtttagtcttcccttagattgacaggattccaaacacactgcttgtagtatatttgcatgcatatgcatgaaaactttatttactttctacacaagtctagtttgatcatgtgctgttaccaaaaaatatatttctgtttgcttgtttttaattataaaagaaaaaaacatatttattgtgaataatacaatgattaatacacacgctatactagaaacccacttctaatttctgttattctgtagaaattcaaaaattcgagtttgcctgatgagtaaatatatatatcagaaaataatattttaaagatttttggaactgtgtaatcttatttttcattgaaaaagttcttttgaaactcctaactcctattttattttattttattttttcttgacattttgtggaatgatttttgttttttgcagttatatattgaagaacttccacaaagaaaaacacaggaagttaaaagtatctttcttttttctttgcttacaaaggatttcatacaatgtctagctccacaaaagctttggatcctgcatttcaaggagtgggtcagagagtgtatccttttaacatgaaacatggcttaagaaataaatacgtgaaaatcttttctttttccaaagaaagagagaatcaaactttatgtagttgactttcatcactgaagaaaatagacgagtgttttgtctactttcagttgactgcatgttttgttattatcacttcatctttttcttttttccagggaagttaagttgtctctttcaaattttgatttcatttgtgttaaccttaacatctccttagtgggactgagatttggcggattgagaattttcaacccgttcctctaccaaagtctgattatggaaaattctactctggagattcttacatcgtattgcaggtatgtagttggtctataatgttgtataccatacatgttctcttgtgtggactaaaatcagtctagatatttcatttgacatcacaagagaatatacctaaaacatatatttgataagtggttactgattagtgtcgaaacgcattaagaatatgttctgcatttcgagatgccaattttcttgtgttattctgggcatagtttgaaacagctatcgtttttttttttgaggtcttgtgagaagaataattagttttgtattgaaaaaatgtaagattatggtgaacaatgtctagtagtattgtggaaaaattgcaattatatgactgctttaatttttcagacatcacaaggcagaggcggtgcttatgtatacgacatacacttttggattggaaaagataccagtcaggtgtgttttacctcttgcctcaagtttgtgttagtatcactttcaaataaatcctcaaaaaagagttcatagaaatggttttacttaacgtgaacttcttatacatgattatgttacttttattgtaggatgaatctggaactgcagctatcaagactgtggaactcgatgcatcccttggtggacgggcagtgcagcatagagaaattcaaggacatgaatctgacaagtttttatcatacttcaaaccttgtatcatacctttagagggtggtattgcgtctggatttacaaaacctgaggaggaggaatttgaaacaaggttgtacatctgcaaaggaaaacgagtggtcagaatgaaacaggtttgaattctttcaacaatgagatctgtatattaagttgagaatttttaattatttatttatgtgtgtgtataaaataagcctgcatgaattcacaaaataccactccacaattttgtttcttttttttttggtgcaggttccttttgcgcgttcttcactgaaccatgatgatgtgttcatcttggacacccagaacaagatttatcagttcaatggtgcaaattcaaatatccaggaaagggccaaggctttagaagtaattcagtttttgaaggaaaaatatcatggtgggacttccgatgttgccattgttggtgagtacatattctttgtctgtatttatatacacatcatagtgataaataatatatgtgtcatgcataatggttataatttgctttcttctcctcattatgattgcattttctgctatgactttaagccttttagtatatttgtattttacagtttctccttttcatacatatactttggtcttaacacgtgttcacctttctagatgatgggaagttggatacagagtcggattcaggcgagttctgggtcctctttggtggatttgctccaattggcaagaaggttgtctctgaagatgatattattccagaggctactcctgctaaactttataggttcctcccctctctctctctgtgcattttagaattacgagcacgagagatattttgaactcgttatgccatttctaattttcttttgaacattaacctgtctattatacttcaatctcttattgacatctttcttcagaaaggttatccagtgtgtagatgtgggttggatgtataaatcatgtactctagtcatctttctgtcaagtgtttgtatgaactttgttagtatgtccactttttgccatgtatttacggtagtcagactttctgtttgtgagtaatttaacttgattccacatgctgtcactacgaatttttattttagagtttgacaagcctttgcatttatggtttgcatctgctttagtgtattcatttttctaattttggatttcattttgtgatataatttatatatgccaagaaacaatttttatttcatggtagggatgtcatattctaatatgtgctaaggaaaatcatgtcactgttaatctttatgctattgtcttgtagtgggttaaatagtcaatgtgatgtcctaacttggtcaactaattttgtagcataactgatgaagtgaagatagttgaaggtgaactatcgaaatccagtttggaaaacaacaaatgctatctgttggactgcggtgctgagatattcgtctgggttggacgagttacacagctagaggagagaaaggctgctatccaaacagctgaggtagtaatataaaatctgtttcttccccttgaacaaaatatgggtttctgacccacaattttgccaccaggaatttgttgctagtcaaaatagaccaaaagcaacacgtataacccggcttatccaaggttatgagacacatgcattcaaatcaaactttgagtcttggccatcgggatctgtagctcctggtgcagaggaaggaagagggaaagttgcaggtattgaatcattttcatcagccgtgtggaccggatttgttctgcttagctcgattaatggtattttttctctctgttagctttgctgaagcaacaaggtgttggtgtgaagggcatgacaaaaagtgcccctgtcagtgaggaagtcccacctttgcttgaaggaggtggaaagatggaggtatggttggcacttcattgccttgaaagaaagtctcatatcataacaataattatggctgttaatatcaatgtcttatcaatgtcttatgattattttttttaaaaaaaaaaaattgcaaggtatggcgcatcaatggcagtgccaaaactccattgcccaaagaagacattggtaaattttatagaggagattgctacatcgttctttatacttatcactcaggtgataggaaagaagattactttttgtgctgttggtttggaaaggatagcgttgaggtaagcaacatacatactttcttattttgagaattaaatataaggaaagtttcattttggtatattattatacataatttctgtgtacatagaaaccaa

SEQ ID NO: 184596 - DNA, 1548 bp, Cannabis indica
agtgattgtagcttttgtgtttttcccaaaattttattcacagatgcccagaaattgtttgtcatactcaaacttatacataaaattgttgaatttggtagttaagccacaattttcattcgaaccttgaataaattgtccttttcctcatccacattggtgtttagctgtgtttttttaaagcttctgtacttaagttattattttttattattaaatccatctcaagactctttatttatatatctttttacctaaatgaaatactaatatctgaaatactctttgaattgcaacagatatttgatgagctagacataaaaaagaagaagtatcttagaggagaaggtgctaacttgaaggtatggctacttatttgtcattctgtatgatgttagtgcttggttgtttatttgcttaatcaatttccgttgttgcaggcattgaacgataaaaagttgaaggggcaacttgcaaacagagaagagttgtatggcaagtctgcagatgttgctgccaagactgagaaggtgaagcttttacttttgtaattagtcagtttggtacaatacttggacatcgaaaagggaaaaatattttaaaactagtgtctatgatcatctcctttatgtttacctcatttgttttctatttctattaacagtggcttatgccaagtgtgggaggcttcctagaggttgaagggatagagaagacatggaggatcaaacaggaagatattgctaaagaagttgatattttaagttcacgtaaacagtttgatattattttgccaggtaacaacaagaacaactgttctgttattattgctttccaacagtttaatccacaggttttttcttgatcaatgaacatttcttgagacatcaatgtttgtgttctttgaaaataatttatgaagatctctttctgttttgaaataattcttggaagaacttataaaaccaacaaacagtaaatagtccaaatttattgtttatttaattatcgaagaaggagttttttaagacttggcagatacattttgatggaaaggggaacataaatttaatcagaaattttctcttgcttgacaattaaaataaagataggttggtaattgcaattggatctttaacttaatgttcgttagctttatggggggttgggttctcgggcgcgtgggaatgtaaaaacaaacctatgtttggtatagttttactagagggcttatgtttgtgtgggtccttatctgaagtttatttttggggtaatctcaagcgctttaaatacttgagtttgagatgccttagttttaactcctcccaactaaaacccactgagtaaaactcttaaaccaaacacctcactagtgttttttaagaaggtttttcctaagggccttgtatattgtttcatccaagtatgtgagcattaagttggatctctgacataatgttcgttagcttttaggttttttttaaagaacataaaagtttttctgaggggctagtatcttgttttagccaaatctttgggcattagtta

SEQ ID NO: 184597 - DNA, 5790 bp, Cannabis indica
aagagagagtgcatcaacaccaacagcttaactttcgagggtcaaattaatttttccgttagcaaatgctcttattctgtcaagtgtctaaccatttacatgcgcttgccttctccctgcaaaaggataaaagacacccaatagcgcagagcaaccaaatattacatcatcatcttcttcacacttactctatcccttttttcccttgtcataatttttacatcattaacaaaattacacagaaataattatattaaaaaaaaaaaggtgggggcctcttcttgacggccatctaacatccccatggatccaaataagtttctttctttcttcatcttgttcttgattatatggggagagagttatcttagaggagaaggcaagtctcaggttgttgtttaagctgttgcttggcttggtgctgggaccagtatgcgtgggctgttaagaccctgtccaacaagtcctgtgggacaggctcacctctcctttgttggggtgatattcttgccgtgtgtactagtgttttccacttgtcctgcacaaacccaaaaaagaaaaaaaaagtacacattgctcttttagctttctggctcagaaaaaggaagtgttccaggaagaaaagcaactaaacaggtcgaaactatgattagactggagtgggggcataatgaatccatacatgaatatgatcaaaacagatgacaacaaagtttaacagtcaagaagattcacttgaaaatgtgataatagtgagatgagaagggtattattgtgagtatcacaacgatgagggcattttagtccatgagggcatgtgtggaaaaaaagaaagagtaaacagtggatgtcgtgtacaacaagaactcgtgagattccttgataaggttgtatttgaaacacgataaaagtaagaaggctggtaaagctatccactaaactgcctaatcacttacctgtagtacaagcaattatttgccagaggcctaaacggattaaacaaagaaaatgtaactggcggaccccaagcacataaagtagaccttttttggaaatatataataatttaaatttaaactaccatctgttacatcttggatcttataggagtttgcggttaaagacttgaacattagcgtgtatgtacaactttacaccaaccacatagcataataaaataaaaaataaatcatttaagttggcaaaatagacctctcaccttcaaatcaacatatgtccgatgctttgcattatcaaaagcgcgcaatttaacatcacgccacctgcatatgagcacaataagactagtagtttaaaaacagagtaaataaaacagagcattaacatctacttgacttgactacatgaaatttctcatattgagggtcataaggagattgccactagtaaacttatggtgattttttagctaaatcaccttccagttccaagtttttcaaccgcttgaacaagtgcttccacttcagtaacagaaaatggacgacggattcgacgctgtgccatatcagatcgcttggatttccgtagtgctggaactacagataaggcctctgcattcatttcagggacagttaccaatgcttttgaatctatagtacttttgtctactgatgtatcagttggagagggggtcgaatcatgatcactctcgacaaagttacttaaattggcaacatgaggctctggcaagacatttgcattggtgtggccaaccatttcctggttgggtggatacctagttaagagagcaattgcaaagtaagttcaacatatcacacaagctaaacattcataaatatcatgtgttaatgacgattacaaaatcaagacactaacaaatttagagtatgcagggtacttgtgttaccttgcaaggatctcaggtgcatcaccagaaagcaaatgtggagaatctccagaacacataggtgggggagtttgaggagagttaggctccaaggtaaatcccaaagcatcaagctgcttgtcttgagaaattccagactgcagtagagttacgttgtcatctcttactttctttccctgcaggagtacaccaatatgtaaaccgcctccaagtattgctgtcactgcatccatgactgtcctctgttgaatgaacataaatgatcagtgacacaaatatgaccatgtaaccatcacacaaataaattgtataggctgctggtccaacaataggtttagtggcaaaaaggtaaaatctaaaattagcagaaatagacatggataaagaatttgaaacatcacaatcaaaggagtagacattagtgagaacgtcgttatgtaaactgtacttactcagcttaaacatgataatcaagaaagtatagcagaagtatatttctctaagataaaacaataagaaaattacggttttaccttcagtgaaccaacagttgcagtctcaggaatctcaataaaaagctctggcaccctgaaagacttgatccttagcttcactgagtaaaagaaaaatacaacttcatataagaacctctttcagtgtcagccaatcaagtcaaaaaaataataaccattccgtcataggttctcataccatgagaatccctgcgttggaatgatgtgcgttgaccagcaactgagcaagaagttccagtccctgtataatgactttgacttagtagactgacgaggtgtcaaaacactaataagctctaaatatcaatcaagaagagccaatggtttggaaaatgacctccttgcaactttgcacatgaatcagaggcatcaccaatgctcttctcaattgagttaaaaaacccctcactattagtacctccatcagatgcccaaaccgagctatgatcaaaaagtttcctcttcttgaaaggaacagtcatttgagtcctttggcgtttgtagcagtccttcctaccacggcaacttggtttattattgccatctgaaatgtaaaacaaatgtaattgttagaaaatgcaaaagactaagccaagaatatttccaatagaacataactaagagcttgtaaaatacagaggccttttacatattgcagaaccactcaccaggactcgaaagtgtctcgtccttaaactttgacccgactttccaatatttagaagccaatatttttcttatccttcggtctccaatccgtggtactcgtttcaagtacctggttgtggtgctggggtgggtacaccccgaggatttttcgtcatcatctctactaactactttcacatcatccctagtagagggaagtgatgtctgcgggacgtggtccccacacaaaggtgcctttgcactactgtctgaagtgggcaatacaagaggtttccccttaaagacagttggatactctgaactgcgcctatcagctgcagtgccaattagcacttttccagtattatttgactcgtcttttacaagtgtcttagtttcaccttctaatttacagtcaccagactccctgtacatagacaagccttctatttggctacaagaacttcctacttcattcttaattttgctagcatcagaatttattgcaactaacctctcagagcaattagaagttgtcattatagaagtaaagctcgaatgatcatcatttttaggaaatgaaggcttcttcgagctgtggttcacactaggagcttgtgatacttgctcagaaacaaaaggtttcctgtcacaacttccttgatcacaagtttccaccttcaatgccacatttccatcatgccgatcttgatcaacaattatgcacttgtctttctgattcgatgtattacttgaagcgggagtactctctttctcaagcaataacttaccagctacagttgccagcaagtcaaatgcacacatttgattttcttcagctctctttttaactgtacccctccgctaaaaacacagaaaaatggacaatatgaataactaatgtttgaaacaatggagaaattaacaacagagctgatattgattgaataatagattgtacttaccctagctgatctagtagctcgaggcatggcaggtacttgataaccattgaatccatagtctaacctcttctgcaacaccatatcgggaaatcataacacttattaatcaatcacaaagagatagcattcctggggacgtttgttcactacactagggccttcactagtcacttttgatcacaaagtccgaaaagaaacaccctgaaagaagaatgagacaaatcaattagtacgatcaacataactgcgaatatagaacattaaacatctataacaccaaccctctatcactaaaatgcttaatgtaagatgaggaatgaaagacatcaccctcggcaataaagaaattatatataattcatgtcttaatcaagattcaatctcaaactttcataaatttttcatttttataatggtaatttgcacaacatcagaatttcaaacattgtccaggacttgaggtttaaagaccacttctatctcttgaaacttttgaaagcggaaatgaaaattaacacgaactggaagaaatatctataattacaccccacgactctaccagatccacatgatctgcctatacgaaaaataaaaagcatttaaaagccaaccaaggtaaaaaaaaaatgtgatgacggggaaaaaagtacacaacacagaaaagttgcattatttcataaaagatgataaacccaagaacccaattgtcaaataaaaagaatccacccaaaaggtaagtaaaacaattttgatacagaagaaaaacactaatttgtaaggaaatcaactaaaaattataattagaagaaagaaaacctgttataatatgaactagtattgtatacatagcaaagaacaagggaaactagacgaaaggaaaatccttaaaccactgcaaaaccctaaaagacagagagagcgggatacagatctatgcaacaattctgggcgtggacggagaaaagtaggtaacaattggacaaaaatggattcaagagatttattattaaaaaaaatccaaattttcagagatccaaaatctcacaaaagaaaaaccctgaacttttttccatcctgccccagcaatcagaagatgattagaaaatagatcatacagtcaacttgcttgaaatttagaaacaaaaatgaaatatatttatataaccacccatcgcggatcaagtccacagaaaactccgaaatttggacgaagtgtgaatcaaccggaaaacccagataaaggagagaaggaaattaaaaccgacggacgttcacgagaattttaaaaaaaaaaaaaaaaaaaaaaaaaaaaaaaacaaagaatttgtagacatggtggagttatgaagctgaattgcaccaacaaatcacatttttcccttccatttcctccacagattatcgggaactaaacaggggtttaaaggacaaacatcgtcacaagaacccaaaacccacaaacaaaaacgcaagctttttgatcattcgggaagcgaaatcgacgagaaacacgagattctcacctttcggaaccgaatttcttctaaagttcaaaactttacggtggagaaacaaaattcagtgaaattttgaggagaatgtaggatcgtgggattgtcggacaattcagagaataaggaattttccctccacaaaacaaaaataaacactttcccactcaattttctatcccatatttgcccggaaaacaaaaatgatacaattttaaggttcaaacacaatccatttcggtgat

SEQ ID NO: 184598 - DNA, 1556 bp, Cannabis indica
tataggtttgttgttgatgatcttaggtagagagttattatagtggtttgtggattgttttaagcacttttgcacaaagcaatcctccagaacaaccaaaaaacacaactaacaatggcaattcaacagttcatagtagctttaggctttgtcatgaaagtaaaatttccataatcacttctctccaccggtatttaatccataccttctctttccaataattataaacagactggagaacagcatatctgatagatggagcttgagcttgtagagcctacatgaaaatgattcaagatcaactcgatactaactcaaagcaataattacacaaggccacgtctctaaaattgaaaaaaaaaaaaaaaaaaaaaacttctcaaaattcaaatgacaaaagtggcaaaaagtgttatcacacccaaagatgatattactggtggttggaaaatagagtagcacacctccatagcagtatcctgctgcaggagaatagggattggcgaaccaagagtaggtgttatcactcctgccctttcccgagccttgtgatccaaaacttctaacttaaacagaagagactcaaacctgtattgaaacatctcattacataatttgaataacacattatatgtgtgcccatgtatatgtacatatgcgagaatgattacttgtcgggcgcaagaattttgcggtctctgttaaattcttcaagccaatcctcatcttcattgtcaatgtcgtactccacgaactctccgagctcagcccgagcttcaaagtaggaaaccaacacaaaaacaatgaattcattagcaatggggattgtacatacatgcatatacgaagttatacaaatatagatataattcatgtggtgggaattgaaacaaacctcccctgccacgcaagtaagaattgggctgaaagaaagtgcgggaataatctctctcgtaagtgtcgacgataacaaactgaggagtgggaatttcagaggctgcaagccttttggcagcagcgacggcagcagggctgggctggacctcattggcggagtcgaagcttgcaaagcggaacaactgagaattacgagtagaagatgaagtaggggcgtcatcatcctctaagtccttaacagacttgactatgggaagcttcttgtgaatgtccaatggccgaggccttatcgacggcctgctcatccttcttcttcttcttccctttctctcatcaacatcccaaaatcgaaaattagggtttcgaaattaaatccaatacatcgaacagaactccaattcaattctattcactactattgagcccctttcaattcaaaaaaaccttcggattattcgtcgtcgtcttcttcccctctgctaattagggtttcctgcacaatgtcacgtacttgtttggggacaaaactgaaaaatatagcttcaataataattttctttctaaatatcttaaaaaataagctccttttttgaaaatattcaaaagtactatgttcctctatacaacattttcgtgagcttaaccttcttttatatttt

SEQ ID NO: 184599 - DNA, 7034 bp, Cannabis indica
tgccccaagcgcaaagatactcctacacttccacctcctatttcttttatattacaatctcaccaaaacattactctctcttatccatgtgggataaactcaacagcacaaattacaactcaatactcttcttaatgggaaaaaccctaataataatgaataatattcattctcaaaaccctgacaaaacaaacaaaacaaacaaaccccattcatttcaaaaaccctcctccactgtagactatagataatactctctcttcttcttcttcttcttcccgccctgtagagttaccattagagagtatacctaaaagggttttagagatgcttgagagttatgcagaaactgtggaggaaaagccccattcttggtactcctctctgtactagtcctactctagctccattttcattctccatccataaaaactcaatccctttggctttcaaaaacccctctctctcttcttcttcttcttcttcttctttatcttcctctgttttcccaatgcccaccgcttcctctttcgctagcggcgcagccctcgccggctctttctccaagacacgcgcttctaccgtttcttctcgttttgccgccgtcgcagccgcggcttccagaaacggcagcatttgccgatgctcaaccgggaacagggcaccgtttcgggcgtgggtagcgtgtaagaacggccgcgtccagggcacagggccgcgtggcttcaaactgccgttgagggtacgaagaaatctgaagagggtttggtgtgttttagtgatggtgaaggtggagaagccgaaaagggttcggaggaaaagccgcctgtgcggtcgcataacaggaggcaaaggggttcgtcgtccggtggtggtggtttgaccgataacccggacttgttgaccattccgggagtgggtccaagaaatttgagaaaactggtggagaaaggtatttctggtgttgctgagttgaagcaattgtataaagataacttcttcggaaaatctagtcaaaaaatggtggagtttttgcaggattctgtaggaattattcaccgtaaccatgctgagagtataactacttatatcaaagagagtgttgatgaagaagatatgaagatttcaggccaaaaccagaagaagaaacggcttactttctgtgttgagggaaatatcagtgttggaaagacaacattccttcaaagaatagctaatgaaacaattgagctacgtgatcttgttgaggttgttcctgaacccattaacaaatggcaagatgttggaccagaccatttcaacatattggatgctttttatgctgagcctcagaggtacgcctatacttttcagaactatgtttttgtgacaagggttatgcaggagagagagtcatctagtggtataaagccacttaggttgatggaaaggagtgtttttagtgatagaatggtgtttgtgagagctgtgcatgaagcaaaatggatgaatgagatggagattagcatttatgactcatggtttgatccagttgtttcatgcttacctgggcttattcctgatgctttcatataccttagagcaagccctgatacttgtcacaaaagaatgaagctgcgaaaacgaaacgaggaaggaggagtgacattagagtatctcagtgacctgcatgaaaagcatgagagctggcttttcccttatgaaagtggcaatcatggggtcttgtctgttaataaactgcctttacattcagacaattctttgcatcctgatattagggggagagtgttcttcttagaaggaaatcatatgcattcaagtattcaaaaggtacctgctttggttcttgactgtgaacccaacattgatttcagtaaagacattgatgcaaagagacagtatgctcgccaagtcgcggagttctttgaatatgtgaagaacaagaaagaagatgaccctacaaagaaagctggagatgaaggcaagaagactaagcaacctcggatattgttgccacctgatggtgaactatgggttcctaataagcattttccgggctcagccctgaaatctctggatttcagacgagccatgtcgctcatgtctggctaaagtgaaggtattttagatttagattcatctagggagtgtgtgtggtgtggtggtattgttttgtggaggggagttgtctctaggtgatgatgtatctaaagattcttgtgcacgtataaaaatgtttaggtgtgtagtcttggagatgtagagagaatagttatgatgtaaaaacatgatgtgtcggttgacatgttttagatgtcattcgcttagaaatcgatgtcttgtgtttttgtacaaccgatgtgatgttgggacgagatcagtaatgattaaaaactgttcgattttcctttttagaattgttcttgttcaaaaaatcatgcactcaagtcctttttcaatgccggatggtgaaaaaagttggtgaaaaatacaccattccttagtttgtgaaagagtgtttacattgagaatcttggtatgctcggttgagtaacaaatgtacctaattccaacatgggtaacacatctaaaaaaccctatatcaaacaaaagtaagatatctatttaaaaggaggtatgctttaccaactgcaaagccaaaacatataaagtgagtttaaagctcttattgtaaaaatgagtaaatgaaccatcttactagaatttacagcatgctgacacatggcatgaatgaaaagggttttttttccttatgattccacataaattgtgctaaagtggaaaaagtttcctaaaaggagattagtgcttgttgtggagggaagttgtctcagggtaatgatgcatctaagttaaaagattcttgtgccttcatgtcacttcagacacttcaaaatatagatatttcttctcataaatctggaatctgagttaggatgagaatgtacaaatttacttattcatactaatgtactcactaatcttattaccaaatacaccagtatatatatatagttatatatatgttttacatgtttttctccttatacaacaggtaagagtactacatgatacaacaaatatgtaggatcttcatacggtgaaactcaaattacctctcctcaaaagtccgagttggaagagagaaaaatggcttttatggaagcagacaatgaagaggatagtatttgaatgtattatatcagaaatcttcaatgcactgcaaagatgggttccccatcataaaaatctggttgcaatgtgctctgcaatagctaaacttgatgttaaacccggtgactcgattccgaaaaggttgacaagattagctacaccatgaatatctgccccctgaatggagaaaatcaaagtaactgttatcagtccaacaaatttaccagcaaaaaatgtataaacaaagcatattgaaagttgaattaggaaaagaaaaatcagtctggctagattgcctttgcacatccctcataaattgtatatagactgtagaaagacaattcaaataaatcctaataactatgtctaaaatcatggctaatcacaaatggattctacagctagaatacaatacaattaaagttgaaatataattttattcttcttgatttctgtattctccaagcatatttgggtgcacataacatatcattactcttaagctaattccacatagactattgatgcattttgtaaccagttgtaatcacttcgtttaatttacttcgcaatcaagtcaacaatagctatccatttagctacctgattctatgaactgaattcatatagcagtatctcacaaacttattacacactatttgaatcttcctcttaatcggtttttactcagacatctgggcttgcttagcaggattctctgcctaaacctctgatatatggatagcataaacaaaaaaaaaagcaatagctacgtaggtggttgggagggactcaaacctcatatcttgtgggaacaaatcacaaaccatttgacctaccccttttgagtgaatctatctcacaaatggacacaaaagaatactaaatttcatttataaagattcttcagatcattgaattgagaaactacaaagtaaaatatgctcccattaagaagtgcaaattgcattttgggtgtaagaatacaaaagaagatgctaacacaggtcctcaactattgctttctggctgatattaattatagatagttgagtaataaaatttaccaagacacataatatcacgcataagaattgttcaaaaaaaaaaaatatcaggcataagaaaagcacaagaacagacctgtactataaaatcaaccggtggctgtccaggacctgaaacttttggtcgaattcctgcatatcctggctgaagagaatcattcttcaaatttgggtagtactttctaatatcctggtaaaatagctccccccgagtggcatctacagtgtagtcaaacctgaaatcaacatttgtttttagtttttgggcatttctgcaacaactatgttactatgtacaggaacactaaaaaagaaacagcagtaactaaaaactaattttaagtctatccaagtgatcatgtgggtatgttgtgagtaagagatacacttccatgcttcctttttcttttttcttttttcatttttaaaaggaaagaatcagcagtcagaaagagaaatgcactaatgaccttaatctctcccttagatagcactgaggagttcaatctgttttcataccataattcattaataccccatatatgaaaatcctctccaattttggtatacaatatttgataagttctttcttggatagaattaacttctataattacagagtaggttagctgaaattcctcctcaaaactttattgaattgatgaacaaaattacaaatcacaagctttcgagaggttagttctctcctaatattcttttagaaaactggggctctccacaatgagtccgaactcttatcaattttctctatgaccttctatcaggaaaaaaaaaggaagaagaaaatctccatgacctttctaagagaacccctcccccttatatactctaaggtgccctaaaataattgccacattagcctcttagactaatacaactcacaactaatagacatcagcctttaattaaaaataaaaagagttaacaactaagcctaaagtctaacttaacctattggcttatcaagtttatctaaataaaaataataaagttcgaaaaattatttaataactactagttttagatgatttgcatgcattcacatgaattcagacactcaaaataggacaaaggatccatagttaatgatgaagaaattgcaaaggttaatcaagatcaaaattaaacaaaataatttggccctttactatcctattcatgttgtcaacacgcggaaagagcataactcaatgaaatgtaaatttcagtaagtgactttctaatcataaaattcctacaaatcaattgactcataaaatgtctaaaacttaggtgaaccagaagctattgtagtagccgattggtgtttctctcatttggagaataattcattcaattactaatgaaagggttagactgacaaacaagaacaaagaaaccttacttgtttagaaagcttgaaatttcatccaaaccatcaatccattcaacgtctggaccaaacttcagctgaccatctaaatctagggtaacatgcaccccaaacccaccctctactggaatagggtatatcaaatgtttaaaaggagggttcttcattttattcaatgtgaaatagcaaccacgagcataataagcaggtgggatttctgcagtgtgtatgccatcaaacttcttagcaaggacaggggcactcaagcctgttgagtttacaacaagattaggaataagtactaattctggatgaattaaagacctcaaaccgttttcaagagattttgtttcagcaatgtgaaggcgaattcgagtttcatcgacatggccaccaataacagtagtattatatgagaaagttgctccattgttttcagcctccccctggcttcataaatagattacacccttgtcaaaattggtttttaactctaaatagaaacaaatagattaaatcatagtattagctctccacaaaaacatgtcttaagttacaaaatacgtatctagtttagattcaaaagggaatacataccactaaagatagcattaatgagtgtgtatcaataatcccagtaagaggtgatagtattgctttcgaacactgcaattcaggttccattctcatggcttcagagccctccatcatcttcaaaccgggaaccccattttggattccacggctcataatatcattcagctttggaatctctgaagaacttgttgcaactatgagcttaccgatttgttcatgaggaacattatgttcagtgcaatatttatacaataagtctcttcctctcgcacaaaatatagcctgaagataataacgaattgagaatctaaacaagattacgaatgtaacgaatcaataatctttctaacatataataatttattgagctgattacgaaaggaattagtacagaagttgctagaaaaatttattgaacaccttgagagaattgcgagggtagtagatcccggcatgaatgacttcgctgttgcgagaagaggtaccggtgccaaatgtggaagccgattctataaccaaaacgtctctgcctctggcggccagctctctggccgtggcgattccgacgacgccagccccgatcactacgcagtcgactctctcggaggcgtggtggctggtgaaactcctcggccatggaagaaatctcttgaggcttcgaagcgcgtggttcttcagcatcatcggaccctactctaatggccgttgagctaactgacactctcctatgaaggaatttaacaaaataagaatcagcagtcagtgctcttttcttttctttt

SEQ ID NO: 184600 - DNA, 2010 bp, Cannabis indica
cacccattaagttgagggaggagagtagtgccttcatcacaagttccttttgtgttatttctagtctggacttagttagcagtagcatctttaggttgactagatttgtatccaggtggataactataaattttgtagcatctctccacagtatgactaagcacattacggtgagcgcagaaaggtatgtttcattttggaggatgtgtctttggatctttagattttggctttcttgcagctgttttatctccttaaaaggtaaaagccatgttttgattagtgtttgtatctctagcaagatttcccttatgatgttcctcttaagatataaggtggaaaacacagttgatttcatgcagaggatccattagtaggatgctacttcgaacttgtgtataatgatctgagagccccatgagaaaggacattttgtactccaagtggtgatattcatggaacttcttgactcctccacatgaacatccattgcaagtacatgaaggtctatagttagacaattcttcccaaactgttttgagcttagtgaagtacatgctcacagtttgactttcttgccttagattcataagaccctttctcagattgtagatgtgaggactattcctttaatgaaatttgacttttcaatcattccaaattgcttcagcattgttatcataaagaatgatagaagaaatttcgtttagaaacataattcagatccaaaaaatgacaatattgttatttcgaccctcacattatacaatataaatttagaaggtgaaggtttacatatagaaccatcaaaaaacccaagtttgttcatgatcgagatggccagctgcattgccctgctccatgacacatagttgtcttgtcctgttaggagttaagagactaaattgttacttagattatcattgtgatgaaggtaacatggattgaaaggatctacaataggatttcttgtattgatcgttttaggattctggttctcttgaacggaaggcaactgtggattagcaacgatcgtcagatccatggatcgaacttcagaacataatgattgatcatcgcttgatatagttgttctggatatgaaagaagaaaaaaccaagaacactagaaacataagaagggaagaaaaacagagaaaaaatagagagaagacgccaccctcgtcggagaagaatacgcggcgaggaaggaaagaaggaagaagaagaggatctaagggaaagcttatctttctcgctctgataccatattgcgaaatgagaagattatagagaagaagatgactagaattagctatgataactagagaataagataaaccataactagagttcgataacgaactttaactatattgatagaaaacgattgacaaacaaaccaaagctaaactaactggaagaccaactaactaactgaaagagcacaaattctgttatatatatttacaaaagaaaaagtaaatcaataacaaatcaagtaaataataaaatattaatatttctattataatgtgataattataacttatctataaagtctttattgatgagaacataacaattatatttaattacttcgtagactaaaataaatctcatttctatctggtacaccgtgaatatgactccaaaattaacacaaatgacaacgactctgagaagatcctgataatagttagtctaatattttaggccagtctcaatcctatcctcctgcttgaaagactacgtaccaataaacttataaccaaaattaccccttagatataaccttataagattattatccctacaaaataaaaattaaagaaaatgaaaacttgtgagttgtactgactctaaaaataattactctaattgcatttttttttaacaaaatactgatcataatataacttgacttgaagagtaaaaaaaaagttatgacatgcaagatcgaaattgtgattaattaagttcttagggctagtttggcacagcttttgaa

SEQ ID NO: 184601 - DNA, 8511 bp, Cannabis indica
gatatcgatcttatcaacttcacaacggttagacacactgtgtatctaaattatagaagaaaaaaaaagtagttaacagtactatagtatctcctctgatactatttcaaacatttgactagttgcttatatattaatctttcattttccattgtaaaagccctttcttgaataggttactggaactatgttcaataaaacctttgtaggctgcatcacatattcaccaagtatttaatatggttaattctgttaaaagtccttattgcagtcaggaaatgaacaagtaaccctatatcaacttcaagcaagctcatctcagaacttgcagaggagaacataagaggaaaaaagcacaacaatgacattatatcaagatccaaaaatgagccaattcatacccattaataagtggctgggagcctgggaaataaaccttcatacacaaagcataattacttcactaaactattccttaatccataattaggaagtaatccaaatgtagaatttaggaaagaattgttgtcaaaaacaattcattgtcttacacatacagaatttcaagtgaatggaaagaaacttatcacagaaacaccaaagattataagtaaaacctaacccaccacataacacatcaaacattcaacttattaaggtgtatttcaaacattaatgataatgggtgatatcatacctcatcaactgcattgtccaacaattcagctacggctccaaatgcccatttatgagaggtggcattagaatgaagaaacttgggatgaacacgagcatgttccaattgatctgtcaagcaattttgggagtaaaatcagactatacaatttcacagacttcagaagtagtctcctttggacaaaaacagggagcagtcccaagaagttgatgcaaaagaagaaagaaagaaagaaaggcatagaaaggaaaagagtggaccttgggaggaagggggtttgatagtgttgttaacggcataagagcctgctttccagaaactacggtaatccaagtctgaagggtcggaagctgtagtggtggcaatggcattggagggaggttgagtgtcagcgtcgtcttcttcgtcggtagtacaaccatcaaccagagcagcccctttctccgatttgggtgtcattgcctctgaattccacgaattggttctctacgcactacgattactaccttgcactaattatcaacatttcaccaacttaattgtataataactgaaattaatgagtgaattatataatataccttgctttagggtttatggaaaaatgaaggctaattttttttttttttttgatttttatttgcaccaaaaaaaaaattgtaagcgaaactcattttaataatttttattttatataaaaaaatatatttttaattatattatttttttgttaattttttattctaatttatatttttaaaaattatacctatcaaatttaaatttataagaaaaaaattatacataacttaaaaaatatatgacccttttatgagacaattatgagttatttaatatatttatataatatttaattaacttaatacaatttgtgtgtaatatattataataaatataattgtatatattttaaataagttattatcgtattatttttgggttatgcgtgtcaatttaaaaataatctatttagtaagcaggttaaccatgtcagctccaaaataactcaaacccatttatgaaaaacccaaatctgtttatttcgtgcatatttcgaatcatgttatcgtgtctgactcattttattgctcctagcttgaagcatttcttacacgcatgacgcatgttattttcaagatgaagaaggtcgtttcacttcaacaaatatcaacattcaagatcatggtattaaaactcttactaattttaaactttattttgatgaaaaaaattacaattttattagatatacaaatctttcaaaataattatttaaaaagcagtaaggacaagccccttataataactacaacctgtattagaagaagtagtagtcgctaaacaattagctgcattgtttgcagattatttaacaaacatacgagatattgttgatcactgaaattagagtacgtcaatcgaaaataattgaacctaaaggcaataacatttgagttgaaatatgaacaccatcaataacactcttacaattcaactcaaccacaatttgagagtatccttgtcgttttattaaatttatgcttttaattataaataaaattaaaaactcagcaaaacaacatcattaaattgaattaacacgtatagtactgcattaaaaaaatatagtttattaattgagattgcattgtgttataatcgttacaaaaaaaacagaaccatcctccaacaaagttgtcgttttatacaataaaatagtttagtttggtttaataatgtagtaaaataagatgcctctttccttagatagaaaatgacaataacttatgttatgtttcactgttttgttttgtcctcaaactaaacaataatgactcattgtcattgctgacctatgctactacaatttttattacatatttttactccaagaacaaaaatcatgttaagaagtataccacatccaaggctagtgtttacagctttttatatctaatacactatcaatcaatcacaataatatataattaagaaatgataagtaccctcttaagtgtcatgtaattaagtattaaatctcatttaacttaaaataataaagcatcattaccaatcatagagcatcactttagtaggcatgcccaataacaatgatctatacaattagacatatgtttaagtttaagccatattttgtatattaattattaaacatatttaaatattaaaatgtttccagttctaaccaacagtaatcaaatatcaacttacttgagctaaaagtaaaaaccaaaatatcactgaaaatgaatacctgtaactgtaaaagtagtcactttcacataaaaaaacaaacttgtaattcttaattaggatatttgtgtctgacccttgacttttaatggtttggaaaaggcatctacattctacatatagtgagtgaccaatacaattctcatcaatcttggagcttcatgaactgagtactactgttctactaacccatcattggaataaagctctgatctttaattccatggcagataggtggctttgccatgtgcctgaaagtgcccaagttcacttggcctccattttgttccaggtgggacatgctgggaaccatgtattgcttaaaactgcccttaacatgggtgtgagcaagctagttttcccactttataggaatatcattgccttctctgtcttgatgccctttgcatatattttagagaagtatgaagttttattataataaagtacttcccacaatttctttcatgaaaattcttgatttttagtttctgggttcttatttttctcttcaattaaatattttgtttttatgttataggaaagataggccacccttgagcttttccttcctgattcaattttttatccatggactagttgggtatgttatgtgtttgatctttttccccaaagacaagaaacaatcttttttattttggaaaaatctgaagttttggaaatttttgttttctgagcagaattacattaaatcaaggattgtacctcttgggaatggagaaaacatcaccaacttttgcttgtgcaatggataatgctattcctgctataacatttatcatggcaaccatattcaggcaagttattacatagaaaatttaatctcttaaagcttgaaatagaacagaataacttacaattgagtttgggttgtagattagaacaggttcacttgaacagaaaagatggtatagctaaggtgcttggaactatgtcttcagtagctggagcttcagttataacactctatagaggaccaactatctataaaccaactttacagatccaccactctcaattaatgtccacacttgaagatgatcaagataagaactgggcattgggttgtgtcattctcctctgccgttgcctatgttggtccagttggtttgtgttacaagccccattattgaagaaatacccggcaaggctctcagtcacctcatatacttgcttcttcagtatactgcaattttttgtaattgcagtatcatttgaaccagatttccaagcttggcaatttagctctaggagtgaactcttcattcttttctactcggttagttagtttttactcaatgaggaaaattagcttggtttatttttgttttaacttatatgcattggtgggggtggttgcagggtctggtagcttcaggcatggcatttgcaatacagatatgggttactggcaaaagtggccctgtgtttgtttccttgtacatgcctttacagaccttacttgtggccatattggcctccattgttttaggagaagaatttcacttgggagggtaggttctaaccattccaacttgattctttcttattgtcttcttctttaagttttatgtattgaaacttagtgtttttcttggattgcagcattatcggcgcagtgttggttgctacgggtctttacttagtggtttggggaaagaatgaggaaagaaagtttgcccaagagagaatgaaacttccttcaatgtcaaataaagataaggtggacaattttgagaaatctacccttgcccaaccattaattcaagcctgtaatgaatagtagtgtcatgaaaagaaaaggtgtgtgatcattacactaactttactcaaatttggttgcttatagttgtgcttgcttaagatgcagatgcaatttaagaggaaaaagcatgtgagtgaggggtcaagaaaagtatatgtctatgtagagatagaggtgcaatgaacaataatgatatctccctcaagattttgagatatatttatgttatagtttgattcgaatcatatttagacaagtgccttatagtatttctcacaaataagtaatcttttatcaccaaatttgtgtataacctatgtaatactttttttaagactttaggttgcatttagatgtctgaactctcataccactatttattctatgtattaaaagtgatacttttagagaaatctaaggaatattttgtaagcacacaacacaatcaaatcaaaatttggtagattatatcttagaaaaacaataacaaataatgcagaaaacaaaataaaagaaattgacaaatcataaccaaatttatactagttcagccttaatgtatagcctactccacctcctctaagagattttaatatgagcaaagtatctgttagagacttatctcttatcagcaaagatcaatctaggaaaccatcgtgaattaaaaatcactcatttagagaatcttaattgctgatccctttgaatagagctggtatcactcaaatacaattctaaaaaataaatattgtagtagtcttttcaaaattcaaaattaatattattttttcttttttgggattaggagggaataccaatacaaagcaagtgttcacagctttttagatgatcaatacttatagtactgtcataaaaaggtgtgttgtcattacactagctttactcacttagaaagtaaattgtgtctaatctggttggtcaatgtggctgcttatagttgtgcttgtttaagatacagatgaaatttaagagaagtaattatgagtgaagggactagaagagaactgatttgttgaaattaaataaaaaggctaaaaaaatagtaataataaaaaattatattacacgttccactgaagtttcttgaaatctaaatacttatcttaaaaaagaaagacaagacctaaaccattgtagaagttgtgttctacttcactggaaaatagtgtgttatgtatccatagagaatcaacagcaactgcctcactatcttggtttcgatgcctgctgtaattttgccaaaatctatttcattcacatcaactcttcttcttgtagacgaagcaaaaggcaacctagtagttggctacttgatcttcatttcggtggatacacttcatacttcattcaaggcttcatcaaagactaaatgaggcttcggctccccttaaccagctgcttgcaatcagaaagaatgattggacaggcccgatccctcgaatcagcaagtgcaacagcatgaagaagagcataggcttctacattctactacaagaagattgccaacttgagacttgatagtgaaagtctcaatcaccataagttaacaaccctatcaccagcagccaaagactccttttggtttagaaggaaaggaggatcaacgataagcatcactcctaatagctaaaaaatagataaaaggaaggaatcctcattattgtgacacaaagcataattaacaacattgtccaagagctgttggaggcaagctccaaatgcaaagatgtctctccccactttccaaacaattaaattgatcctctatacaacaagtagcttccacacctctttccaaacactgaggtggtgtttggttggaggtaataaaatggaatggaaataaaataatttttatttttctttgttttgttgcatttcataaagtatttgaatgtcactccaataaaatgacttttccatcattttgataaaatggttattctattttgaaatggaatgaaagatcattccaatacaatataagaacaaatttaataatttttttatgcattttaaatttaattccattctatttctatatctattctcatttacattcctatttctatatttttattccctttaaccaaacgttgcctaaagtcttattttgtatgaagtctaattagagctctacgcctctttaatagtaaaactgttgtcaaatgaacctttccaaaaaagcacatcagtggcctttctaggtaatcttttagcaaggtttatcgagctcgccaaaccaaactaggaacaaaccaaatgttcaattcatcaaactcccaactgtcatgcgatcaaagagcaccgatccctcatagcaaccatttctttcacatcaaggatttaaggtagccaaatactaatcccaactcaaccatgctatccaaggagaatttcaaaggtccgttgagtatagaaattagaaagaatgccctctgccatccaagaagcagagtaggggattgaaactgaccaaagggagtcatcatatttcaaatatttcgctctcaaaaccttacaccaaagagattaatgattcacagcaagcttccaaccaagcttaattaatatccataaacttcttgagaccaagacctccaaacccttttggggaacaaagggagtcccaatttgtcaatgctaagaacttggttttgttcgaattgccaatccaccaaatttctagacgagcttatcaagagagtcgcaacagatctgctcttcagaagaaggagagtagactattttagatcaaagtaatcctatgagtttcagagaagatcctataatccttaattctactgtttgaagaaaaaaaaaaagaatacgatttcccaagaagttgtctctccgatctaactcacagaaacctaaaaaagccataatagaattctttgtacaaagacttgtatttgaataaaaaatcacagccgactacctcacatttagcagctgtccacaccacaaacaacacttttgaagacaatttgaaaccccttcagcttcctcaaccaaagctttacttactatatataagtgagtaagagaacatagaaagtatgcaatgaattgagtaaatcactatttgcatcaaaggggctaagagctcccatcagtttgtaaatgggttttctcatacattcaatatcaatcttccataattttctactattttcttgtcactgttctattgtttcctgctgtcattgctactggtttgagtactctacagcaggtttccatcaaaatcacagccaacaccctcacctttccataaacaatacttttgaagacaatttgaaacccctccaccttcctcaaccaaagcttttcattacaaaaacaaaaaacaaaaaaagtgtcatcaacacacataagatttataatagcaggactttaaaaccatggataattccaatagtttctgagatcatcaggagctgaacttgaacatcaaattttgttagtacttatcaacaagacacaatcaatcaatttgttatcatattctaaatttcaaagaagatactcctaaatttcattatttcagctaatatgagcagcattttttccaaattcaatataatctagaacaagtaattatagcaaaagcataattaaaggtcaaattttgttagtacttatcaacaagacagacaatcaatttgattatattctaaggttcaaagatgatattcctaaatttcta

SEQ ID NO: 184602 - DNA, 2368 bp, Cannabis indica
attagcaaaggtggtacaataatcagaaaatcacgtagtgcgtatgtatcagggcgttatagggcatgaatgggtcgtactagcaactgttgattaaaattccataactttaatatattggtgaatgttttatatatggctaagtgatcttaattctccgtacaatacaaattacaccctcatgtatgaataaggaattttttgatacttatatataattattcaatataaaatattaataatttaacattcaagcatatatgaaaatgttcaacttatatttataaacataaatgtctttacaggcttttcagggcataaatcctaatacatggcctatagttttgcttgactctgccccgcagattaattggatggccaagttctgaggcttgagcatcccattctatctgctggggttgccgactgctcttttgttcttcagagggtcacccattacacccttccgtttgtcatttactagggtagacaatccaactctaagataattaaactttttagtaagagggttttcttcaatgagcttagcctgtgcctataatcgtgcaagagcttcttgcatttgacgcgagacttcctcttgatccactaacctcctttgagtgtctgcaagctcttgcttcattcgtactactttagggtcttgcttgtagtgttgttcttcataatttttgttgtgaattttattgtggtcattcttagggtcatcttcatgaccttgctgctcatcttcgtcaatgggatcatcatcaacgcgttattcgtaatgctggtcccctcaacgcggatgactacctacctcccatgcgttctcgtaccccacgacacctgcctgatcgtttattgggggcagctggttatcgtcatcattggcgacattatctttaccttctcgagtaggtggtttggccataacgttttgggttgcgaccattgtgtagatgacaactatggaaaaactttcttcaagctctcaatgaaagcaccaaaatatttaccgagattcttggaaaccgattatgaaataaattaagcttaaagcagaaataaatttaaagaagaagaaacaagaatttttacgtggttcaggcattaatgagccttagtccacaagtcaatattattgagttagaaaagcttaaaagtattttacacaagagtgttcttaccaaagtttaagaaccctgattcttagcccttaatagcagaaatgattttccaacactttgcatgaaggaataatgttctatttatagggtagaattaggtgtgggtgaactcggacccggtaggatttagaggtgtcaactaaggccatagatggggtaaaatacaatatatattgactttaggctaattaggtgaggctcaattctcgagttaatgatcatccatacgagtagggactgtttggtgattacaatttttatgcgcaaccatattggtactgagaatgtcagggaatacgacgttggacaaaaatgtgattttcttttggtggtgcgcgcactccctgagtctaacattagagacaagcccttaacacggtaggaccctgtgtttggaggatgccacataggatggtatttagaggcttctagatgtctcttcagttgcccgttccggattaccctatgaaggtatctagatttgtcttgatggacctttcaacttttgggtaggacagtttttctcgaatcaaagcagtctggtcttatcgcatttataagttagacttgcatccgaatctggagccataatcgtagccgtagcctgactaatgctagattttagaagtacacgtgccattaattcgaaaacacaattaacacttaaaaatagctaaaatgtcaacttgtaaaaaaaagtaccctaataacattaaaattttaagaattaaccttaaaaaaattaagaattaagtgtaaataattactaaaatttactaattttaaatattattagaaacattaatgtttattcaaattacataaatcatgtacaaaagtacaaaaaaaaaaatgatttcctttcacaatataaaaattatttatttattatttcaaatgaataaaatttattatttagaatttgacaataaccaaaaaaaaaaaagttatagggacttattatgttgtgaaaggttttcattttcatttgagaattgctaaaagattttcattttcattttattccataaggacttatataattacttttaaaataagaagaataaatatattttttattttttatttttttagtaagaaaaataagagaaatgttaaaaggtattagtattgtctagattttttatgtttaatattggctcaactaattatcacta

SEQ ID NO: 184603 - DNA, 3003 bp, Cannabis indica
aattttttaataaaactttttcctataatcatgtacattataattatttagtacattctgacaaaattttgagaaattcgaaaaaaattaacacagcgaaaataagatttaaacaatgtgttgcatgagtaactattttattttatacgcgtgttaaataaactatttgaacattgctttctatattataaattattctaaatttatcaaaattttataaaatattttaaaaatttataacgtacatgaatatataaaaaaaattagattaaaaatttcttttaatgcctaactaaataaatatatctttttaagaagatgcattattaaaacaccctatattataaatctcttaaaataaaattacgtatattaattaaaattaacctggaatcaacagaataacaatgatattcatatgtatgagctaaacttgcattatttaaagcaacttcatcaacctgcatatgtaaatataaatatatattacaatattttttatattaattttttaacttaatttatttaaaaaaatatattagaaaaagaaaagaaataattacttacagccatgataaaagacttgtaaagatgttttggaagataagcaagagttgttccagaatcaactactgtgtcattagtggttgataataatgaatactcttttgaatcaatgcccattaattcttttccattaacagatatattcacaaggtttatgttataatgaagcctgaaaattaattaattataattaatactatattagacatataattattattattggataaatagagaatttaatcggtaacttttataaaattcataatccaaaataatatttaccaattattatttgataattaattataccttaattaaggaatttttttaaaaaaatgacttactttgatggaacaattggagtataaaccatatttggatgttgaacatcaccaaaaagtaatgtaccaccaccattatcatctcctttcaaacaatgtgaaaaaatctttggtgaaattccttgtgaggatagttgagaaatcactgacatttatttcgacccaaaatcccatctactgcactttctgttctgctcaattctccacttgcaatcttgctacacctgaatatcatatgtatctatatgtttatattaaatgtcactatataacatataagtgtggatgttaaaatgtgtaacaaaaaatacaatgtatcttcaaaatttgatggtaggatttgactaaaaggctctatacattgagagagtaattttctttgccctagttacaaatttggtttaaaagtcttttatcattacaagagtttttttggcttcattaacataaaagatggcagttttagtagttaaaagtaatgataaattttgtacctaacataatttaggtacaaaatttaatgtatatcaacatcattacatgcatatgtaagtctaggttaattaccttataattgacttttattatatattaggctataatgagtatagagactagagggattaattaatgataatgaatgtaattaagtgcttgttaggtaacaattgaataattaattttttgttaagttaattaaaaactaaaataagaagtatttacccaaagacaacagaggcagaagagttagtgtgagaagaaccatcgattgtgtcaaacgacaacaaatctgaaacataaaaccctgtcgttgtgcttccatctccataagtaaaagtgtaaatacatcgattagagtggaaagaacaaagagattcttctactccaactccatctttacacatttgatttgaacataatatcgatgaagatgtattcgaactctttggatcataagaattcagctcaatctgatcatcgtcattaaaaattcagttaaatcatcgtcaacaattaatattacactattatataaaactttaaaaactatattctttctttttataataattgatcatatttgtagtataagtaattaaagttttaagtttataagtgaaataaatctatgattatatcaacaacataaatatttattattagtaaaactataattttcatcaagtcctattagtacatactttgttacagtgtcttaaatttataatcaaactttagtttttgaatttgttgaaagaagacttaaagtaattgatactacatgtttctatccagatttaatgatatagaaatgagcttacacttgtaatcaaacttacttaaagtaattgatattacacttttcggtccagactcaatgattcaaaatctacaaacactaacaaagtctgtactggtgaaattggaaaaaaaattacaattttactaacattgaatacttatactgttaaaaaatcataaaatttatatctgttacaaactcaaaaatttaagaattttttatactacaaatatctctcaaaaaattaatgaactcacatttaagcttgtaaatagtgggcaaccaatacatggaaaaccgtagagccaaagaacatcacttcctgtgtcaatttgcacatggtatttttgtggaggagaacccaattttatttctgcataataaagcctaaaaacaaattatcagtttaattcttaaaaaattaaaataaaaatcaatatatatatatgtatatatatttatataatatcataccctacttggcttgggttgaatgttcctccaactggaaagttaatgacactattattagtgtcttgtaactttctaccatgtctgagctcgtcacgagctctgagttgtctcagttcaattaaatgatttggtggaaaagccctttttaatgtcatcatacttgaagaataatgcaaatcatgcatagttgttgtcgccgttgtgtgtagtagtgtcacgacggtaacggtaactaaaagtaaccttagttgagaattattcattcttgtattcgccgtgtagcttagtgtatttatgttttttttttcttatttt

SEQ ID NO: 184604 - DNA, 3482 bp, Cannabis indica
tatcttttattttgataataatatttatttaccaaatttacttctatactctcatatggtattttatttatttattcttttttttaaaataaaataaattaatgaaaattatagtaattgcaaagatattatagaatatactattattataataaatattaggatatttgcctaaaaacgatcaaatctgatatttacttatttgtcaaaacaaacatatctgatatttatcaaaaacgttaaatagtaaagttcacagtttacacacgagtctgaccaaggtaaaccaatccaaaatgagaaaaacccaacagaaagcaagcaaagaaagtaactcaaaacccacgtggagctcaactgagctatccacctgtccccagacgctttttagagtctgcacgtgggaaaattccgcacgtgcgaacactcctacgtggctggaagtgatacgtggcgaacgcagatacatggggatagtaggggaagatgtcgaggagtgaggtgtctcgacacgtgtcaatcaaagacagcctgtgggctttactccttctaaccagtaattctttttctttcttttttttttccttctctttctctttctctctctaacttcacttcactacttacttcttctccctctctctctctctttgttcctcttctttctctctctactagagccatgatttcgggaagttattctggttcgagctcttcgggttgttattcggcttcttcttcttccgaaaattcttcaccgccggcggccacagcggcgggaaagttattttgcggcggagcagatcggatggtagaggaggaacttgaggccgcggaggcgttggctgatttggcacatttgggtatgcgagggagttgtggtggcggtgaatcagtggggattaggagtagcaaagggaagcgagtcaagagccagtcgcctccggtggtgtttggtgtggacctggctgactcggccactaagtgctcggatcttgttcaggttagtttttcatagttaatcattcttttgattttgtatttattttcttttaatgtttttttttttattttgactttggttactgtattggatatcataacattttatccgaaaaaataaatatataaatagttggttctgttaaaatttactgtttttgaaattacaaaactcctgataaccgaaatttgaatgttataaactatgaagttcggcaattaggacttgtaaatctccctttttggttgtaatgtttttattttcttgagaattggaaggtgaatttttttactcaatttaaggtgaatttgaagttattcattttttgctttatgttgttaaattgaataagttaggctcattaagtggaagcaactgattatccaatttgcgtactctatgttggattggcaacatgtttgtgcatattaattggatccggaaaatactcaggataaagacaacatcgtaacagagaatgcacccatgggaccaacgtcactggcattgaactagaaatttaagtttcgaacacaaatttgtgatattaagttgcataaattaggtttaggttagtttggtaataagctgaactagagttcaaagaaatatgcatattgatgatcatgtatctaaaaatgagtaatactgcatttaagaaatattagttgaagtttcaagatatggattggtatgatgatgatggcggatcattgatgctactctaatgctgggttactctgggacatagttatgactttgggctatttaatttgaggcttcttctcccttcctttgctgtgcttggttcttcttttggattttctgctgaattgttgagaattttcacttgacatctgaatacccagatgcctgatcttgttattgtgctctgtaatgtctgaaaatacttctctatgggtctgtcaccaagtcacaccatcttctgcaggagttgaaaaatatttttgtttgtagcaggatagaaaagtaagtcatcagcaacatgaaaaggtatgtggaaatgtactaactgagccatggaagactgaagatgatcacagagaaaaaaatatgaaggttgaaaaagacactgatttaccgaacacaagtcctataggcacttcaagatactcgtcgatgggatgcagcaagtcaagacgcaatttgacggaggtactacatgttatagacttattttattcctctacattagttgtgcatttcttttttctttttaaatgttttaacccctagagtagctggtcatattaaagtcgtgtttggtccctatttaggcagaaaaggaagcacgcagaatacgcagggttttagctaacagagagtcagctaggcaaacgattcgccgaaggcaggtaatagtttactctagctgcacttgctgattttggcttttggttccacccttttcatgctcaatgtgtcaattggaaattgttgtcttgtatacaagtcctttctttgtctaggtttcagtctgtagattagataacagataatttatctttttatgtggttctttttttaatcattgagcagctattgtttggattggttcttctctaagtgatatatacataatacatgtgaaacagaagccctatcgattagtactcacagaagaaatcaattatggggactaacaatcctatctggggactaatatagttagatcctctttattgcaaaaccaatcatgctggtgacatggaggtgtatgcatctatacatggaggaacaataacatgttattctcaatttctcactggtggttaaaaggttatatcttcaagcaacatgcacaatgcattatttcaaagctggaatgatgaaaaaacctgtctcacaataaataaatttcactctctttctgaggatactacaattattcataaggcgctttgcgcttgccatgtcaagattgtttgaacaactacttcaattaaatcaaaagattttgatactaaattgcaccaagttcttgttacagagggatgtatttaagatgccttttcccttaaaagtgccttttctactaaatattgtttcaattttgtatacgatttgtttgtgtgtaaattatacaggccctttgtgaggagttgacaaaaaaagctgctaatttagcttcggagaatgacaccttaaagcgggtaggcagtaatcccattctctttctgtaaagcctctccttttccttcagtttttcatgcacacactaacacatcagttacacttgaaatttttgtcaacaacttcattttacattttcccaattaaataatactatgcttcctctctcttttttttttttgagttgagttgaacaacttataagcaccgaatcattacaccattgacattgagcggtttttatgtatcaggatatggagatggcattgaaagagtaccagtcattggaaatcacaaataaacaattaaaagatcaggtaagtaa

SEQ ID NO: 184605 - DNA, 1415 bp, Cannabis indica
ttgacaacttcagggtcgtgattccttttacaatggctgctaggctttcaaactctgtcatattgacaccatgggtggtggcttacgtcccagtcagaacttctattgcccaatcaggatcacctgtagaagctcccgcttccaccagccatcttttagtgagggtgtcgtgagagtcttctggtcttccaagtcgatcatgaactctagtcgacttagatctggttgttgtctcctaaccacggagtcatgaaggcaacactagtgatgtttctagcgtgaggtctaaatcgtcttgggatgattcgctgtgagattgatcattcggagcattatagtgactacttccctcgaaatagtcttcaggaggatcacaagtgtgaagagaattgaattagtttctcaagtttaactcttctccatatacttgagggaagtattcatattgttggccatcaaggccacgagcaaagtaacgcataactcacctctatcatctcagaagtactttaaagtatgaagtagtttgttagtccttactcgccggatttcataccattcgatttcgaagtagagtcttcgacttcccccttcggtgtgagtagcaggttcttttccctttgcagggtctcgaggtttagtgtcgttagagcaacggggagaacttgatggaggagttaatttgttggttctctctgtattccgtggttgctctacatcaggtggagggcccattggttggcgcgtttgagcttgagttcttttggactctttcccaaagttttcttccctctgtggagtctcagcccctattgttttcatagtacttgcacggttaccatgtgtggtagtaatgtttcgtgcattaagggtttcccccttgagtacttgttctcacgtggcaagttggtcaatggggagtctctccagccagctcagaaagacttctacagggactagtcctgcgatcggagagataagctttcctatttcattgagataggttagctctttgttgctcctactcaactagttgattctcaatattctaccaattctacacaaaacagttatgaaaatgtatgtgttgtttgtcaagagaatcccgtagttgttgttgcaggtcagccacaatttggctaagttgttcaacttgaggatcagcctccttcgggtcttctagttcaacacgtggttccccatgtggaatttgttcagttgttttagtatcaggagcagctggtggtcttggtggacgagttgtggagcagatctaaggcctccacctggtatctaagatccaggtgtagtcccatcatcaactttagtgactgacttgcccccaggccactagccagttgttgtggatcttctttcaccacttgaagagcgttttgcaaccatcttgtaaatga

SEQ ID NO: 184606 - DNA, 5759 bp, Cannabis indica
tgtgtgttctggagcctgttctccttagaaatagaacaacaaggaatgggttatcaactattcaataaaacttctgatgcatcaaaaaaaaaactattcaatgcaaattatctcttttataatatctatgtttttcggtctatatttaggaaaattcatgaagtcctctaaactgaatttatgtttgttaaaaaaaaatattacgtctgttgtttttttgttataattatttttttttccgagcagttctggcatgtttattagtgcttttgaagaccaaacagggactttggaagttattgaggaaaaaattgcaagggcaacaatgattcccagaattcatggcgaggtactttttggtaaaataataatttcaaaagtcatctctcaccaaccattttatgctgcctgcgttaatgctgctgagcatgcttgtagaagtttaattttaaaatgtctttccttacacatatgggaaaattcaaggggaaggggtatttagttcatcactttttgtccctgttctcaagatggtaaaccaagtcataaattcttcttctctgactcatgagatggggtaaagttgcagagtgagtttaaaactaaatttacataacagttgactccttaaaatttcaacattatttgttatgtgactgcatttttgctttaagacaaattagtattcaacttacaaagtctactataggtggttgcttttgaagaagaaaaagagaaaagaatagttacagctgtctgccccttttttttatctggaatttatcttagatctatgtttttctttaaaaaaaatataaaatcttgatgaactatcatgattaattgagtgttgtaattttggttgatttagcagtttatatactaaaattgttgtggattatcatgtttcagcctttcaacattttgaggtataatcttggtcagaagtatgactctcactatgacgcgttcaatgcagaagagtatggccctcaaaagagccaaagggtaaatttctaaatttaaacaatatggattttgtttgatcattgtgcattctggttataggctttatgtctttgtcgaaatagtatttgtacatgcttgcccacacaaactcatgaaagatgtatagatagatgggtaagacttgataattttcatgctccggtggcaaagtctataaagtcataagctttgatgaagaatttcaagctaaatttcatcttcaagcttaaagcaaattgcattcaagtaaaccttgtaatatataatagcatctctaatggaatgctaaaatggtggtgcagtattatattttaatacttttaaaataattagctctccaatggtgtgctaaatttggcctatgctaaaaattatactgaatttagtacacaataaattcacattttttaattatagttttgtcattgaacattgatgataaattttaatacacattttttaattacaatattgctattaattattttttaaatatttaatatattaataatcattaatgctattttacattttgttataatttgcatcataaaatgttattgtgcattagagcacaataacaaacattgtaacaaatatagcatttgttagttttttgtgccttaagacaatgtttagactttacactggagatggtgtaagcatgactactgattcacttatctgaaacaaacggatttacagagttgcatataaactttcttctttgtttgtatgccttgatgatttattaaattgaattattacaaatctctttgttaacattagaatttgtgaccaaaaatctattagagaactaacacattggtcttgatttgagtgcgacaggcggcctcttttttgttgtatctatctgatgtgcaagaaggtggtgaaacaatgtttccttttgaggtacaaattggggcatccttttttgtacttcattttggtttctttatttttttcgatgtaagaaatcatccagtttgatgtgcagaatggtcttaacatgaatgggaactataattatgaggattgtattggtttaaaagtgaagcctcggaaaggggatgggcttctgttttattcattgtttccaaacggtacaattgatccggttagtgtttcttgatctcatcaacctcactaaaaaaattgtacaattagaattttcgttccccattaaatttatccaagtttatagctaacattgtaaacttcaatggaagtaataggatcaagtggcaaaagggctattcttcatataaatttttatgtttttagtttttctactttcataagtgaataaagcgtggtgagatattgagattgtcctctagatgtggttcatatatcttcaccattcctttcatttcactttttcctttttctcttttagaaaaaaagaaatataaaatatgagaagtccttttttcttttttgaagtaaagtagttaaaccatcttaaaatcagttttttttttctttttctttttggttacttttaccagacatcacttcacggtagttgtcctgtaaccaaaggggaaaaatgggtggctaccaagtggatcaggaatcaagaatttgaggattagcatttgtacatacatgtaagtgtgttttttttcttcttcttctctttttaggtgagcttagagtttttcatttaatatttgacctaccactctgagagttgcagctgcagtgcagctgtttggaaatgtaatagtgggggcattatgacttgggtattcttataataataactcagtttcaaactcaatattttgttcgttgtctattatcaatatagataaactatatgtctgtattatgtatattaactagacatgtcttgaacagtgatgaataagtttccaggaaaaaaaaataattagtatttttacactatcaaacctctgaacaattgcaattactgtaatgtagtcctcttgtcacaatttgctctatttttttgtgaaattagtgatgtggcaatgtaaatttggaggataaaatagcaggaaaaaccagtgtaaagggaatcacacacttttggtgcgagggtggtcagagtgagtgagacggtgggtgtggcttacaagtactgaagttgagaatgggaaaaaaaagtattgttgagttaaagaataagggctctcaaaggaccagagaatcgacattcattttatggtcactcattttacaataaaattatgcagagtgtgacataaagaccacattattgtaaaacttacaagttatattttgaggggtattattaataagcaatatagcatagagggtacaactttatagtataaaaagttcaggggatgaaattgttatatttattttaatgtatagtagtttcttgtcaaggctacttattctactttaatcaaaggttatgattttcgttccttataaaagtgattaaaaacaaaaaaaaccccacaggatcaaaaataaataggtagaatgtattatatgtgcattgctattaggcaccagtggtgcttagcaccttctcgacatgtcgcgttgcgattggctagcgatacttcctaaaaattattatattaaattatgagactcgatacttatttggaccaatagcgatattgacacataggagggtgctaggcagtgctaggcaccactggtgtcttttagcatttttttttttttaggataaatgctaccaaatagtattttggtaattagataaatgtttttttaaataaaacctaaccaagtggttaagagcacgaggatttggtgaatgactaaaatcatcctcccctcacacacgcaaaaaaaaaaaataataagcatttgtcaatagatcactaatagtgtattttttgctttaaaaaatgaacaatatacaacaaaaggatcaattttgcaatagttacaaaatgaacaattttgctatttatcttttattttactagtgtaaaaggaaaacaaagaagtgtcccacataatcattttcttttgtcttctaaattctaattatatttaaataccttctattttatttttattttcaaataaagcaatatatactcatcatcataaatactaccgattttattttttttttgaaataaacatatataataaaaaataacaaaagttgctctacaaattgatcctaagtaataattccttcacttcaaaatctttatgtctaatatcctaccatgtacaaagcaccttcaaaacttttaaaaataaattggtaagcgccaaaaaaataatgacacatgtttcccatattagcattccaaattcataacatcgacaataaagttcatgacttgtgccaattttgatatggctgctttccccatcgtttcagcatatgcatagagcctgctgctgtaaacagccccattgcagcaatgaccagaattgtagaattctcaatgtttcgatagtagcctccctgaaacaaaaatgttgtaaaaaaaaaagaaatcatggtcagttcagaagttgttccgagctattctttttgtattgtaagtcatcaaaataagtgaatcgagtatcattattatttgaccataataaatgccttcactcaagtgacaaaagatagagaaacgcacttgcaccagaaaaaacagaattgtgacatttgcaggggcttgagaaaggcttatcatccctccacgcaactcattgggcacatacctgagaacatgaggtaacagaaagccatggaaattaaactcaatcgtaataacaaatgactaatttttattgtgaaagaaaaaagggaaagaactcttattcaatgtacatggtccttaatctggcaagtgaaggcaaaatcagaccaacagaagcactaaacaagcaaaatagcatcactaaaacttcaatttcctgcaaattaacaataaaatcattataaactcaatagctagaaaataaatattgcattcttaatactaaaaacacgattcatacctgataatcgtaagctgtaatacacaataccatcccggctataataaatgcacatgttaagtaatcctcagttctgagagatgatagtccaccagtaatccatgggaataatgtgcttcctagcattcttgagcctagaagacatggaaatatcaatcctaggtgcacttctcgtccatcagcctaaaaccagaggcactggaaataaatttatggaattcaaaacttgccacaaaattaatggttaaaagaaactccattaatggttgaattgaaagacaaaagacaaggaaagacaatataatcacttgagttttgcaagcaattcttgaaatggttaccataccaccacagttggagcccacagaatccagaagaccacataggaaaagtgaaggcaagcttgtgcccaagccagcagccatatccttttatctgtcaactaaccaaaaaattatcaaaaactagatcatttatgtcgaccttttcaagcagcagttaaatatctttctatttaattatattttacatatttttgccactccatgacatctataaaatgccccaaattacaacaaaaaaacagaaggcatttgtgagaaattcctcttggaacctcgtttcaataaactcaagaagcaaaaaagctttgccaaaagagaagtaattactgtactaagtgtacattgagcaagtaagcaatgtagttcaagtagagaaggaaagaaagtgggatgaacgttataaatagtatataa

SEQ ID NO: 184607 - DNA, 3432 bp, Cannabis indica
aaaaaaaaaaatgatgcccataacgcaccactgcgcaaaatagcatcctccaccattaaacactattaacacaccgtttattacaattcttcccagaaaattaaaaaataaagaaaaaaaccacacaatttcttttttattaccagtaaattgtctccatttccgatcggctcaatcgacggaatctagaattcttcgccgccgattagccggaatttttcttttatccgattctctgaaaattttggttccctaaaccctagaaaacctttactatttagtacttccactataatcacatattatttatatatagatataaattatatataaaaaagaaaatgcgttttttttctctgtctgtgctttaggtacagtgagatttacaattagctcagcttgatttagctcgagctcccaagtacacgtggcgatctgggtcttcttcacctccacttctgctcaagtttcagtgagtattttactataatctttgtgctacatcgttagtgtgtactacttccgttttccagttttgttttttgaattgtcaggaatggaatttgagctttaattttgtagtttttgggagatgggttttcgatctcagcgcattattctttggggtttgagttgagtggaattcggatcttagatttaggatattcagctgattcttacttatttggggattttgaagaatggacttgattttgattgtggatagtgtttggtggttggaaaaatcgaggattatgtaggaaaaggaaattctagttgtatttcttggtttgcatttatgtcttataaatcttaacagtataaagttcaaatcttcggttatgatattacgtttttttaatttcttcggtcgatcgcaaggtcaatcataaatccttgcttcagatttagactttttgtgtagctgctgctggaacgtaaacgtaagagattgcgtttctgactttattgtcattaatacgacatggtcaatcacagttcttagtctttttctttatttatttatttttgaagcgcaatacttgatgcccatcaaccgtctttatttatatatacatatgtattgcgattttaatttgttgctaattatttgcagaaatgaaaatgtgggtatgcttgagaattgagcttctttcgtggttaagcacgttgtcttggttgtagcttaattttcaaagttttggttttgatgtaatttgaattactacactacatggaagctaacaaggaagaagctctgaaagcgaaagagatcgctgagaagcgatttttggagaaagactttgctggtgcaaaaaattatgcgttaaaggccaagacactgtatccgggactggagggtatatcccaaatggtcacgacatatgacgtttatattgcttctgagggtaaatccaacggtgaaacagattactattctattctcgggttgaaaccttttgcagataaagatgcagtaaagaaacagtacagaaaaatggccgtgttgcttcatcctgataagaacaaatgtgtgggagctgatggtgctttcaaacttgtttctgaggcgtggaccttgttgtcagataattccaaaaagaagtcttacgatcaccagagaaacaaacaatcctccacagttgttaaccagacaaatttgtcttctgttcattcttctggtgttgttacaggctataataattgctccaattcctctgcttctcacggtagacttgacacgttctggacagtttgcacttcatgtaaagtgcagtatgagtatcttcggaagtatgtgaacaagagactttcgtgtaaaaattgtcggggcgttttcattgctgtggaaacagggacagccccagcaaatggatctttcccctatactccttggtcctatgtacctggcaatggttatgctggaagtcatggctacgatggggttacatatgttccctcgaacacaacctattttgcgggaaatggggtctccggttatcattctggacatggatttgaatatgtttccaatgtatcatttcagtggagttcgtattctggaagttctgttggagttatgggtcctactggaccgtcttctgtagcccctgatgctatttatcacacccatggaaacgtagctggagctaagttaaacaccaaagccaatggaaagcgttccatgaaaaatgttggggctaatggaaatttgaatatgcccagtggtggttacgattcatcagggtcaaaggtcaacaaacttgataagagaagaaaacttacagtgtcttccagtttccgcaatggatatgacgaagctgttccaccatctgatttggaaacaaaaatggaaaatgggaatgcaagtagtgtgcctgatcataaactatctagtccagttgaagttctgaataaacgatgctcggcagcacctgcattcgatgctagaaagctgttgattgagaaggcaaggacagaaattctgaagaaattggaagagattaagttggattcaactgcggaacccatagttaaaaagtcaaaagcgctatctgaagttggtcaagctatggtagctaaagaaataaccgaaaaagtggactcagatgcttctgttttccaattaaatggacgtaaaactgctcctctctctattactgtacctgaccctgatttccatgattttgacaaagatagatcagaggaatgcttcaagccaaaacaaatatgggctctgtatgatgacgaagatggtatgcctcgtttgtactgtctgatacgtgaagtgctctcacttaatccctttaagatccttattacttacttgagctcgaaaaccgacagtgaattcgggttggtgaattggctggattgtggatttaccaagtcttgtggaaatttcagggcgtacaactctgatattgttgaacaagtcaacattttctctcaccttttgagccgggaaaaagctggtaggggaggatgtgttcggttatacccgaggggtggagatatttgggctgtgtacaggaattggtcaccagattgggacagatcaacaccagacgaagtgaggcaccaatacgaaatggtggaggtccttgatgattactctgaagagtttgggtgttgtgtttctcctctcgtgaaagtcacaggattcaaaacagtatatggcaggaactctgacaagaatgccatacgatggatcccgaggagggagatgctacgcttttctcatcaggtgccgtcgtggttgctcaagggagaagagaatgatttgccagagaaacgttgggatctggacccagcggcgaccccagatgatctgcttcatgctgctggagaggcagaggcttaacacactagaagagcagtggagcacaatttacttggtggggaatgtcattttagcattctttaaacaaa

SEQ ID NO: 184608 - DNA, 5039 bp, Cannabis indica
cttgcttcttttctcacaagttagtacaagtaaaatgggaatagactattaccactatgacgagtcgaacctctataacaacttcgtgttcttattgcttaattattaatattaattatttttaatcactttaattgatttattatcgttggctaaaaagtaaggtcaacaaaggtgattctcctaattagctaaattttatttagattttttcataaaattaatgttattttcaacaataaattgttaaaatactaatctaattctttataaatttaaaatattttatttctttttgtagctttaaatatttttattttattttaattgattatgaaattctaataattttaataaatgaaaaaatatatatttttttacaagtacttaattataataaatcaaaatacataaaaaaaatttgcatgccactattctttgtgtaggtatgagcaagaaaatctatttctttttaaatgaaatatcaacttcattgaaatagcttagcattctgagtacaaaatattttggaattcaactgaaataggaaagtccaaaatgctacaatcagcatgaaactgagagtgcctagcaacaaagtttgctactcgatttgttgatcgtctaataaagtgtaaataaatattgggtaaggaagataaaattacttgacaatcgtgaataataaaaccaaatgtagaacccagtgagtgattggttcggattgcttgcaccatgaccatactatatgtttgaatctcaacgtgctcctaatgtttggttttaatctagctaagagcctcctttatacccaaggcttcgatcactggagcagaataagtaccaccatagtagcctgcccgtgctgcaataaggctaccagatccatatttttcctccctttcaaaaagcgtagcatccgcgtttaacttgattttattcatgtctggtttagaccaacgctagcactatcacccttgttattaagacacaaagatgttagtgaggttttatcctaagctttcttccaatgatcaagtgttatggtggccaatgcaataaattctataacggaggtctttttttcttccaaactattttgttcctagatttctacattgtccagcaagtcatggcaatcatacttacgtgttcagcaggagtcgtggcaaataaaagctccagctagctaccaaaatttccaccagggtaaaaaacaaatgagattccaatctttctctagcaagcgagagcaaaagagaaaaatattaaagcatgactagtcgtttcaaaatggaaattacacactaggcaaatagtagaaacctccacatgttttatgacaagattaacacaggtaggtagacaatttatggtaactctccacaaaaagttcttgaccttaggaggaatattgagatcccaaagatgagaccagaagctcaaaatagatttgtccacctaagttttttctgatctggaacaaatttataggcactttttacaaagaactcacctatatttttgctcaaccaagtccaagtatcacaagtagcattttggctaagaggaatgcccataattgcagcagcttcaatagcatcaaacatgtctcgaaaaagatcaatatcccaggcctgaatatcggtaagaaataaggaattgatttgttagttcaccaaactagggtgcttcattgtcacataatgatttttcaggttaggtagccaaggatgttgaaggatacttacactctcacctgaaccagttattatccttacaccagcatgaagcgacccttgagaactccatatactctgccaaacaaagctaggattatgacccaactcagttgaaagaaaatcagaatgagggtaatatctagctttgtaaattttcctaacaagagaatcagtattaagcattagtctccagccttgcttagcgagcatagcaaggttaaagtcatgtaggttatggaaacccatgtcgccatcaaatttatgggctgccattcactcccgtgacatccaaataataccatgacccttactagaagaggttttccaccaaaagcgagccataagtttttcaatttcttgacaagtacctttaggaaagaggaaaacactcatggcataagttgggagtgattggacaaccgttttgagaagaatttccttacctgcacgggaaaggagcttcccaacccatctgttaattttcccaatgacattattcttcaaaaagcctagaacctcgttcttattttgcccaatgatttttaggagacccaaagaaagactcccttccgaagcttgtggcatgccaaggctttcacaaatttgagaacgtgcatcaacaactatatttggactaaagaagatcgtagacttattgaaatttattttttgacttgatgcattcttgaagacatgaagtaaattagaaacacccacagtcgcaccttgggttaattgatagaaaagataactatcattgccaaagagcatatgactaataggaggtgccccatgaaccacctgatagccttgtaaaacccgttgggattcaaacttcttaataagaggacaaaagccttcaacacaaataataagcagataagtggatagcggatcaccctgtcgagtgcctctcgaaggatgaataggacccatacaatgacacctgtgcataatagagtagctaacaaaagacacgcaatacataaccagattatcccatctttctgcaaaacccatccatgtcataacagtttaaagatagtcccattccatctgatcgtaggccttgctcatgtccagttgaagggatataaagcctttcttgccttttgtttttctcttaagatagtgcataacctcaaacgctaccatgacattattagagatgagtcgccgtaggataaaagcactttatgtgtcagaaatgacgagatcaatgatgcttctcatacaattagcaagaactttagagatcactttatacataacattacaaagagcgaataggccttaaatcacccactgtagtgaagttcttcttttttgggatcaaaacaagattagtttcattcagttcttgaggaaatgaacctaaatcaagaaatccataacaactttgaatacatccatacccacagtatcctagtgttgttgaaaaaaccttggacccataccgtcaagactatgagctttatccgggtgcattttaaacaaagctatttcaatttcctcaacagtaactagttttagaagctcttcattttgaaaactactcactgaacatttaatctcattgatcactaaagcactatccaaacaattggcagtgtaaagatcagtaaaataatttacaataacctaatcaaggccagcttcccaatctatccagactcaatcagagctttgcaattgttgaatttgattgttccttttctgggcactagctatagcatgaaagtattttgtattcttatcaccatagtgaagccaaaattgctttgaccgttgcttccaatagaattcttgctgtgccaaaagctcaatataattattttgtttagtgctaaattctgtattagagaaagaatcctaccggctcttcagtcgcgacataatcttcttgcttctaactatacgcttcttgaaatttctagtaagctctctgccccactcgtccagcttaaccccataatttttaatcttatcttgtatagaagaatcacgagagttggcccaacaatcttagcataaataggttcgcgagactaggcattctgtacctaaaacaatgaacgggagcaaccaaaatgagagcttcaagttgcagaaatattggggtatgatcaaaacagctgtagccaatattagtgagagttgcttgattgaaaacatctagccaactttgagtaataatggatttatcaagcctaatctcaatataatggtcaatacctttcccacgttaccaagtaaaagggtatcctcgaaggtccaaatcagcaagatgacaatcttcaagcactgatttgcaaccaaagattaaggaagaaggataaggccatcgacctctttttttgtcttagtttgcaatgttgtttaattccccaattaaacaccaagggagaggcgactcgtgagatagagtacaaatcagatgtgaggttttatcaaatagtcgatggtttggttcgccataaaaatcggttagatgctagttcatcatgcctctattgcaaacctcaatctcaatatgatttggagaatagccaagcaactaaccttattcaaaagacctccaaaacagagtaattcccccttttctaccatgagcatacgacaaaaaaaaaaaaacaccttcaaagcctaacttgattctaactcgatccaccaaatcttttttgcaaagagtttcacataagaaaagaacatgggattcttttgaaaaaaaatgtccccatgaactgaatggcccatgggttcccaagcccatggcagttctaactaattgtactcataattgttaggtcatttttttacaatttagtgtcaaaatattttttaattaatgtgtattttattgagcatttaaattatttttattacattgattttgtacattttattgttctattctatcttaggacagaatcatttttcagttagacttttctttgtttggaaacttcttgtaagagaagaaattctcttatggaaagttgtctaatttttggaaacttgtctttccctttttctaattgatgatttcgattttgcctttattagaacaaatcaaactttctttatttggcagttttgatgtccaaatttttgattttggttcaatttggaaagtttcctttgtggtcctgatctgctactgcgaaacccgattgtgatgctgcaaattaagaatttttttaagaaagttttgtacagctaggaaatcatttttgtggttgtctctagggttgctatgttctataaataggacctagagagcagccaaacgaattt

SEQ ID NO: 184609 - DNA, 2778 bp, Cannabis indica
gtggttacagaaaggtgataggaactcgttctttttttcatgcctcaacaatggtgcgcagaaagcaagaatcacatttagaacctacaagaatcctagaggccaattgcgttctaaagagcaggaaaatgggagtatactcaatgactatttcaaagagttgtatatgtctaatggcgaggttcaattcgatgggttggaggaacttattgacctctctgttaccatggaggagaattctctgcttacgggtatccctgatgctgaggagatcaaatcccatgtgttcaatatgcaccctctcaaagccccaggaccggacgggttttcgggatgcttctatcgaaaatgttggaacgttatcggtagtgatgttgttggctgtattcagaaggttttctccactggggtcatgtgtccggggttaaatcatacgttcatttgtctcattcccaaaggcaccaacccggatagtgtcgatcggttccgccctattgctctgtgctactttgtttataaaataattgctcgaatcctggcgcaaagactaagagtgattcttgacaaattgattgctcctacccaattggctttcctaccgggacggtggattgctgaatcgacacttctaatccaagaaattgtgggagttattaaaaagaagaaagggaaagagggtctaatggcgatgaagatagacatgaacaaggcttacgatcgaatggagtggaagttcttggagaaagtgctccaattgttcgggtttagttcgtcctttatcaaactgatcatggtgtgtgttacttcggtttcatacgcggtcctcttgaatggaagacctcttcgcaagttttatccgggaagggggctaaggcaaggtgatcccttgcgccctatttgtttttattgtgtaatgaggtgttttctcgtatcctgtaccaagaacaacagaaggggaacttacatgggattcgggtggctcagaatagtcttgaaatctcccacttaatgttcgcagatgataacattattttcctcagagccaattcttcggaagcggaaactttggttcggtgtatcaagaaatttgaagcctggtctggccaggtctacagcaagccaaaatcgggtctgctcatttcaaacaactgtcatcctgggctgaaagagaatttatggaggattttgggagttggaaatgtcaatgaatccaaaaaacatctgggcaatcctttcctttttgagcgaagtaagagaagggacttcaatttcatcaagaccaagctttgtgaacgccttgagggctggagaatcaaacatctctcaaaggttggtagaatgacttttatcaagtcggttgctctctcgatcccctcatataccatgtccactttcaaactcccaagcctctcttgcaacgagcatgattcgattgtgagaatgttttggtggacaggttcaattgatactaaacatttcctggccacgaaatcttggaatgctctatgccaaccgaagtagagaggaggccttggctttcgtcggttcgaggatatcaatgagtccttcctatccaaactggcctggcagctggccattaacgacaatcggccttggtgtcaagctttgaaagccaagtatttcccgagagagagtttttggagtgtgtcggagaagaactcggatagttttgtttggaggagtatcctcaaagccatatctggtgtggctgaaggtgcttgttctgtcattgtctctggtgagttcatcgatatctggtggcaatcgtggttccgtggttgggttataacgaattcaggtctactatggagaaagtgagagaaattgctccttacctagtttgtgtggctgatctaatgtaccgcaatacaaagagttggaaccatggctttctgagatttctgtttggtaatgagcttggtgcaaagataggggacatccaaattgtgaaaaatgggaaagaagacttccttatgtgaaagagttccactacggggcgtttctctgttaaaggggcttattgggcggctcaatcgggtagattcaatgataccaacagattgtggagttggatttggaatgctaatattcaccctcgattaagcttgatgctgtggcggacttgtgcaaatgtcctccccacgctaacttacttaatcccaacaatagtaagtgtttcctttgtgattcgtgtgctgagaacccccttcatttatttgcatcctgcccttttgctttggctctttggttcagctgcccggtaccctataaggttggatacaattcattttggaagcatcactgagttgctgtgcaaactctgtgagggagttgatattgaaagaagaagtcaaatgcttagttgttttgctgtactgtttgagaccatttggaatgtaaggaacataattctccacaatgcaattgcctcttggagtgttgatcaggcgcgaagggacattgctaaccggtatcaagaatttgtctctgcccctccttcaccttctccaagcaactctgcctctggaccgtggaggtttctcttaacatcacctctaagaagctggtagtggtggatgactcgttctctagtggtttgtttggttgtgttgctatttatttagaccgtgactctttggtagtggggtcgacttctcggcttttggttcctgcgccacgtgcactcgcggcagagatggaagcggtaagttcatggagttaaatgggtcgtcaggatgatggttgggtacggatttc

SEQ ID NO: 184610 - DNA, 2126 bp, Cannabis indica
tatttacacttccattagagatgctctaacatgtcaaaaaattattcaatcaactcatactttattaaaaccaataaaaattgatattaactcaaataaatataaatatatactttatgtgcaattctttgtttgatttaatttgatgctttgactttaagaactttatgtgaaattgaatactttgtttgatttcattattttattgggtgcttaataattatcatcatcaaagacaacaatgtggtccattaattctcaaataaaatttaaacagtgattattaaaaataagataatttgagcatgtggttattaatcttacctatcaagcatacatgtcacattaccctcatttgttttttcatattgtaccttatttaaattattaatatttttttagcttagcttagcttagggcatgtatctcacggccattatttctataatttgttcccttatttttacacttgtttgcctttatgattataaataatttttttaattattaataataaaataataataataatgtcacaataaaaccatgcataaataataaattggagaaccaatttggggtttcacccctagtgttcgtcgagctcttcggtttgataagtctttttctgttgtaattatttatttttttttttgtaaaaatacagtatatatatgtataatttggtagttttgaaagaaaataagcatttaaaataaaaaaaaccagttgtccttgttaataataaaccaccattttttgtttttttgaagcaaataaaccactattcttattatttttaaataaaatagactcaaatcatgtgttaagtttaaaagctttatattaataacatatataggaataataggagcaaaataagaagaaccttcactgtgtaattacttaatttatgtagtgtactccattcaggtttgataataataattgcatgtttattacaagtactgtttattaatgacttttgttatcatatatatgtaaatgctctttatctaattaatatattatattaaagaagcttaacaaaatgagtaaaaatgacagctgttaaacgttatttaataagtatgtgcacatctttaattgttatttattagtggtaaaaataaataatcataatttaatttaattgcttttgaaaccaattaattaaatatttttttttgaaagaaaattcattaattcaattaatagttacaggcaagtcattcataatcccatgagtacaagagggtacaaccccaatccatataactctaattttggatttcaatacttaagcaaaacctttgtgtcccatatattttaaattatatattttagatgttgggtgacatttttttttttaacttttaaaatttatatttggagaagtgtgttttgttgggaattattttaccaggatcttagatctactcacaagtatgtttattaacatcctaaatatgaactttctaaaacgataaaataaacacatataaagttaagaaaaccttacattgatgcagcggaataaatgtctccttccactcagatctctaacccttgattcctttctgtagcagagtataatcaagatctgagcccgaatctccttcttcttcaagctttgatccttcacagtcttccaatctatgattgagttactgcttgctgtgtgtgggcacttactctttcactagggtcacgaaaaagatgaaggaaaagagggagagaggtttcggccaaggtagagagtgagggaaggctcagtttttctgaagagagaaatttctgtcagaaagctaatgaaagcatgtgttgtgaatgagccatcactttctatttataggcaacttactaggtttaggttaggatttatttggcattaaaataatgaaaatattaatttgaaaaagccttataagtggccggccataggtgttgtaatgggcctcacttaattttgcaattttatcaaattttatctctattttctcaaaaatgccaattttccaattctaaccttttaaatgccaaaactaattatttaataattaaaatacattattaaataatattgtcatttaatttaattattaattagacatataaagtccatt

SEQ ID NO: 184611 - DNA, 1885 bp, Cannabis indica
ttcaactaacagacaataagttgacaacgacccaagcttttagaaagaaaaaaatttacatttattctatactaacaacagtaaataaatcatcattattattattattattagctgctagatatagagaatgtgttctttcctttcaatttcacaacctaagattggataagtaggggaccaatcaatgccatccctatgttgacagtccaacactacaacactcgtgaggtaataggtatggactaaacaatcaaagaaagggtctttttactctaactaagctactacgtatgcactaaatataccactgtttaatatgaggtcgagatgaacaaacaagtcctataatggaatgaagcaatcttatccatctgcctgcctgcctgcctgacctgcaattgtaactctcctcgttccagacaaataagtgcatatcaacaccataaagaacaataagattccaattttactttgtgggccatgtccagcaaacgatcaagttttttacattcactataatcacaaacaaacaagagatgaagagagtttcgttgtcccatcttcttcgttaccacttatctgtacagatagacgatatttatgcccacctactaaaggatcccctcttgcaaacacaaagctacaatctgtttcaactgaagcatcttttcccgcccaaactgcatttaattggaattataacatgttatgagattgcaaatatctaattacttgacttcttcacagagcaaggtgtactaaatttaaagggaaaaaaaaaacttgcctcgtgggtggccgtgattttcctttcagcatcatttaatagggtctggattgcctcttctacttgcaacataagctttcgatgtgatatttctgtaaatagaaaaacagtaccagaattcagtataaaattagtttacaatacggtattacaagcaatgaaatgcagactatactatagtgttccagtgacagacttaaatgaaagtcaaaaacgtcatggatgggatggcttcaaaattctttataggaaaaggaaaggcgaacatttcctctgtgcttagatgggaaagattttatcttaatcagtaaaagctcacattaacgtaggtgagtagacatactaaattataatttgtcatcttggagagtactatttcctagaggaaatttaggtaccccttactgcataaagcacaagaagtgatatcatgtctacttgcatatgagcttttagcaaatgtaccattaccattcttatacgccaacctcaaaaatagtacaaccctataaaaaatggtatgctaaagtattcaacaagactaaattttgtacatccatctcaaactatcatacatacactacatgattgataccatgctagcagcacttctaaccagaaattcattgaatcatgagtaaatatgcaagtataaagaaatgaaagttgacatacttcgcttctccatggtttctttcaactgtaaatgatctgtttccagcccatcaaatgagcttttgcagtcctgcagatgttgattgatctgttccttgaacctttcataaatcaattgcaatttttcttgttgctctgcaaaatagaagtttagaaccttgttatgtgtttcaacaagggggaaaatctcatctatttagtcacacaaaactgattctctaattgcactgacaagtgacaacgaaatttaaataattaatacagcatatacaagggattctgagatcacttttgtaagggggcaccttaaaaccgtggtcctctaccaactaaagtgaaggtatctcaacttttttctttcttttttaaggggaaaagaaatctccagttaatttccaaattcacctcactagctcaaaa

SEQ ID NO: 184612 - DNA, 6754 bp, Cannabis indica
ctctctctctctctctctagattgttctgtttgcattgtcattgtcagtgtcggacctaaatttacttactttgaactgaaatggcttcggtattggtgttattggtttagcatcagtaacgggatagagttctaaaatttgtgcttagatccattcacataatgtttttgttcaaagtaaaattcagaatttatttatatgggtaaacggtgtagaaaaattaatctaaacgcttttagatagtcagtttctgttcatatcgtttatcaatggaaacaagtaaacaatttcaatctcaatcatgaagtaaatgctcaaactttgcatttcagaatgaagactactattagtctgataacatgaaactaaaaatttgattactttaagcctgaagattatgcaacgtgttgaaaagtttgattttttaaatgcagatggacaagtatcaagaacaggggcagctactggagccttacttggaaaccatagtttcccctctgatgtttattgtccgttctaaaacgattgagctaggtgtagcttctgacgaaatttttgaagttattaagccaatatgcatcattctttattctctggtcactgtctgtggatacaaggctgtaatcaggttctttccccatcaagtttcggacttggagctagctgtctctctcttggagaagtgtcattatacaaaatctgtgtcgtctctccggcaggaaagtacaggagaaatggaagctaaatgtgtaatgcttttgtggctctcaatactggtcttggttccatttgatatctccagtgttgatacgagtataacaagtaacactaatcttggtgaacatgagccagctcctttggttttgaagattataggattttccaaagattatttggcaaatgcaggccctatgcgatctatatctgctcttgtactctctaaacttctaacacgtccagatatgccaaaggccttttccaggtttcttaaattgttcccattttcatgcttacttgctggctgataaattgataatattgattgcccctttaattttattttgaatcattgtcacaattatttataggtttctttaaacaggtgtcactttattcttagaataattcttttctcccctcaaaatctagtgaagtgacacatttcacatgttgatgtcagtttaatagctagtttctatgaaataatgcggtctctttaatgtctaaatctatgattacatgcttgcttgtgttacaactatttttcatactgcttcgacttacttttcctatttgataatttcttcttcagttttgttgattggacacatgaagtcctatcttctgtcgtagatgatgccatggatcacttccggttacttggagttgtagaagcacttactgccatttttaaggtatgagttttggatggagtatcattttattattaaatatttccttgttgtttccagtagaagcacttatggatacatctttctttaaataaacatatcgttaatagtcttttctaccccatttgaatttcaacaaaattttcttatcatagtgctgtttggtaactgccttaataccttagcttctgtatatcttatgtatgatctgtaatagacagagtggtggacggaacctcttgcttgatgtagttgctaaagtttgggatgacaccgcattattgatcaagtcaagttatgcagcacggagtcctttgcttcgcaaatatttgatgaagttaactcagcggattgggtttatttgtctccctcatcgtataccttcatggcgttatgtggttagagatgttaaatctttgtttgctttctatacttcatatttcccaaagaattattctgtttccatcccaaattttaatatgtttgaattgaaacgcagagcaaaaccacctcattaggagaaaatgtatctctctctgcatccagggaaagtgatcaacacagttatggcacgaacgttgttgattgcggctctgataaaacttccagctgcctgcaggatgaagatatagatgttccagaaattgttgaagaaatcattgagatgttacttactggtttaagagacacagtatgtctattgggctaggccttgttaagagcttggttacttccttataaggctaaaataagtatttatgttctgtcacaaattcaataggacatttttcttctgacgctttattatattttttaaattttagttgtgttgctggttgtctctgagaagtgcttatctatgatataaaattaacgttaaactccacatgaactatatatatgagtttgctgttgttggttatgtgatgcaggatactgtagtgcgttggtctgctgcaaaaggtataggccgtattacttcacgtcttacatctgccctctcagaggaggtgctctcatctgtcttggagctattttcacctggcgaggtacccttatgcatttgtactataaataatttgttatatgattctacctagtttttctgtaaaatggcttaagttgccaacttcataccatgaatttgtcctctcatgtcaaattccagggtgatggttcttggcatggaggttgcttagctttggctgaattggctcgtagaggattgctgttgccagttagtcttccgaatgtcgtacctgttgttgcgaaggttacattgaaaagtttttcatctctatacatctgtagaagttagtgtactgtactatgtttataaccttatttggaaccatgttgaaataagtttgtattttttttttgtagattgtataacttatcttcaaaacaatgtatctactcataattctttaatttcattaggcttgagtatttggatgttgcttgatagatataaggactgatgatggataaatctttaaaacaggcactgcattatgatatacgaaggggtccacatagtgttggttctcatgtacgcgatgctgctgcttatgtttgttgggcttttggtcgtgcatattatcactcagatatgaggaacattttggaccaacttgctccgcatcttttgacggtggcctgctatgaccgtgaggtgcaatttaatttatttatttaagtatggatttagttgctacttaaatatcacctgtgtgaagtttctgagctatcatgtcaggtgaactgtcgaagagcagcagcagcagcttttcaggagaatgttggaagacaagggaattacccacatggcattgacattgtgaacacagcagattatttttcactttcttctcgagtacactcctacactcatgttgctgtgtttattgctcaatttgagggttatctttatccgtttgcagaggagcttctatataacaagatctgtcactgggtaagctcctactttgttttattattattattgttgttattttaactaaagatatatttctgcatagttttctttttttattattatttgtttttggaaattttaagaacagttgccctaatttcatcaggataaaggtttgagagaacttgcagcggaggctctttctgctcttgtcaagtatgacccagtgtattttgcggactctgttttggaaacactaattccttgtactctttcatctgacttgtgcatgcgtcatggggcaacattggccgttggtgaacttgttttggcactacatcaatgtgattacgcgctttcttctggtgagtgatcttgccttctttgaactgtttaaggatatgcttggaagtaactgtgtaatactaccctaatcattacactatattttaaaattcaatgtgtttggatgtcaagtagtaattgcatatgaattcttattttcatatttggcaaatgagttggtagttacatagttcaataatattaattagccaaaaatggtaatattttgtaattacaccccattctcatgggtgaccatgagaatttgagtgtaactgagacccctcaaattcaattacctccaattacatgggtacagtataattatctagctgaacaaacacaccaaaccttgtagttacttcgacttacactcaattccaattacatagtgtctttccaaatgcgccctaaatgtttagacgaacttggagaatttataattggtatcacagttacaatttgggtctttgaagtttcagtttgtgagttaaggtgaggtatttaatttttttcatttccattatgtgtgttaggaagttagaattcaaagcactaaaaccgtgttagaataccagttcttgtcatgactagaatacattgtattcttgaaatttgtcaaattttaaagtcactagaaatgtatcgtcttgtatcgtttgaccttgttccccttgtgatgcacaaaccaaaagttctaaattgtgattttactcaacttgtcttgttcagaaaaacaaaaacgtgttgctgctgttgttcctgctattgagaaagcacgcttatatcgtggaaagggtggagagataatgcgtttagctgtttcacgattcattgaatgtatatctttagttcgtttgtcattaacagaaaagataaaacggagtttgcttgagactctaaacgaaaatttgaggcatcctaattctcagattcaggtgctttttcttatccccaagttgttcattaatgtcataaacaagtttgctaatctatttttttcacatataatatacattgtataggatgctgctgttaaagctctaaaagagtttgttctagcatacttagttgctcatgacgtcggaggtactagtgatataacgtctaagtatcttctattgttggctgatcaaaatgttgctgtgagaagaggatcagctttggcaataggtgttttgccatatgaactattggccaagaggtggagggatgtccttacaaagctctgtagctgttgtgcaattgaggtgtgttgaagtttaatcatcttaaaagttttctcctttccatgcgcaaattgttgattatcataattggatcatttttgcaggataatcctgatgatagagatgctgaagcacgagtaaatgctgtgaaaggacttgtatcagtttgtgaaaaattaactcaagatcaaaatagtgatggtagtagacctctagaggaggattatatggatttgatactgctgataaaaaatgaagtgatgacgagtctattgaaagctcttgatgattattctgttgataacagaggtgatgtgggctcttgggttcgtgaggctgccatggatggccttgagagatgtacttacatactttgtaatagagcttcagttggtttaactgaaatttcaggtgaagttgagccttcatcagagcttcataacagtgatctggtcgagaataatcagtcaacttcaattttcgatgctaaccttgcaactactgttgttgggggaatatgcaagcaagctgttgaaaaaatggacaaactaagagaagtggctgctatggttcttcagaggattttgtattgtaagatagtttatatcccacatataccttacagggaaaagctggaaggaattgttcctgagaaaaccgacttgaaatggactgtgagtgaatatgctatttatcagtactttggaatgtaattgacttctttaagttagcaaaaacaaaacatttatacttgattgattcattgtttgtaggtaccctctttctcatatccacgcttcgtacaattgcttcagttcagctgttatagcaggttagtactgtctggtctagtaatctctattggtggcttgcaagaatctttgaggaagtcatctctgtcagcattgttggactatcttcaagctgttgaaattggaaacgaggatgagagaaagtctagagaatatatgctatcaaccgacatgctttgggtactccagaattacaggaagtgtgacagggtcattatacctacattaaaggtatattcatataaactccgcttaaatataaaactatacttcttgtgaaatgttctgattttgacaatattctgttctgtattgcagaccattgaaattctcttcagtaataagatatttctgaatatggaggttggttgttctttttatttattttccttctcctaagtcctaactatactattacatatgtgccggtatttatttctattcttttattgcctggatattaatttcaatccacaggctcacaccacggtctttcttgctggtgtgttggattctctggaagctgaattaaagggatcaagagacttctccaagttatatgcaggaatcgcaatacttggatatgtagcttctactttggaaagccccggaaatgttcaggctttctctcatcttctcagcttcttaggtcaccggtaccctaaggtcagtaatactcccaatatacgactacggctaataagatgaattactttctgcccctgtatgagaatcggtattaacatgtcaccccgattaagttacctccattcttgctctcaactctttgccattgatactggcaaaaatggtctttactttttcactttccatccctgtattgcaatgtagtgacttacgctactattttatttgcgcttacattctgattattactttttggtatcaatctagataaggaaagctgctgctgaacaagtataccttgtgctcctgcaaaatggggatcttgtgaatgagaacaagatcgagaaggctcttgaaataatatc

SEQ ID NO: 184613 - DNA, 1594 bp, Cannabis indica
tataaaatttaatatttaattaagtcaatataaaaaaatatacacactataggaaagaaaaaatgtagtatttttgtgaatataatgtactaattatttaatataattgctgacaagagtcaacgacctttagcatgatagtaccgtcgccggggccggacaccctcgttgactttccatgtaccaaccatgatatatatcatcatataaatatatagattgtgtatatgtgtcatatatatatatacacacacttaaaaaaatcattgtacttacatagttacttaatttgaatagtactatatacattcattcaaatttgttacaagagtctccatgcatcgtatattaaagatttggggtaatttttttatttataattttacagtaaaaaaaaaattaattgtaaaaatatacttataaaattttaaaattataaaaatacactttgttcgataaataaaaaataacgaaaaataaatctcacaacaactataaattaactataagtaatttataaaacaattaaaaacaactaaaaaaataattttatgagaactatgatacaacctataaaataatcaaaaaatgagttccctatttttatttaagaaatattttgtaaataaaaaagtttgaaaagtaaaaataatttttttccgtattgatgtatttttataatatatttttttttatattaatttttgatctattatgtaaatttttcaaagacttaatattgagctttaaatgagtacgaggacgttggagaaagatttaacttggagaagagttacaaaaactaaatattgagttttttggaaacggttgtttcatattattgttaatcttatatcgatatcttatattttcttaacacatttatctagttcggtatttagaataattttttaatctatttttttttttttttataattgtgtatgttataggtatttaaaatatcttacaaataaattttaagaaatttataataatttacaatataaaagtcagtattcaaatagcctatttcatatatatatgcgtataaaatacaagagttacttgtgtatgcaatagactatttgaactctattttcagcatgttaaatttttttaaaatttacgaaatatcttaaataatagactaaaaattctcttaaatattcgataaattaagatatatatattggtaaattatttttaagaagtacatatgacattgttacaagctatttgcatggataaaactaaatatttgttgaacagaacaggcaatgtcttcagcagtaaatctcgaatcactagtaacctgttacataatacaaataatataagaataattatttgtatgtaataaatacttaattgtttattagtacttaattatatttatatataatattatataaatacctaccttgacattgaaagagtaaagaacagtttgttcaatggttgtaatattagtgtggagaatattaaattgcaaatcctcaagagctgcaatggccttaataagttgtcccggtcttcgccttgataaaatttttatcatcgcatcaaaccctaatagcttcacttcaacatc

SEQ ID NO: 184614 - DNA, 2090 bp, Cannabis indica
tatttttatttaaaaaaaatacttagcttaacacaaaacccgacccaagcccacccgagctcgtcccaatccgaacccaaaaatccaaaactcgttaaaacccacccgatgtgtacccctaccgagaagtggtatggaagggtgagtatgaattggaaataaaattttggatttcaattttttctatcttaaaattcaaaatctaaacgaggcattaaaattttttttattaaatgaatatggtatgtattctattatgaacattttttttttatttcttgcaactattgtaagtaactcctttcaaaataaaaataaaaagaaataaaatggtaaagtaaccactactagaggaaacctccaatacccgtcaactaaccggtaaggacgccttaacgggacggcaacttccacgtcaacatcgtcgtgacatgcacgatgcttaatgataaaagaagaattctgtttatacccaaaatacccttcattagtctactgcaaatcagtgaagtataaggatacttacgtaatttagattcccacctaataagaaaaatatattattattattatttttttggtttgagagtagtaaaaggaagttgcagagaaagtgctctggttaatcaccaacaagagacttaggtactgattcgatctctcgcaattactcttctttttctttttcaatattcttatttaatttgattgtatagtgttactgatcatcaccatttacaatttcttttagtttgtaaattgattggattgtacagtgaatttttttcagaagtcaaaagcttcaaattcttgtagtgccatgaattatgtgattttcaagttcttatttatttatttggatttttcatgtactttaagttaagagcttgggtttaatggaagatttagtttttgaggttttgttagctttcatatgaacaattttggtctaaaagcaaagtttcatcagatttttgtgtgttagagctgtataatggttgcaggtatattctataatcggatacaatagtttggaaaaaagaatgttattatttattttcataatcttgctctgtggataattatgaattatgttcacaagagagaattaatctttcatggtgacttttaattttgtttccccttcataaattgggtcatttgaagtgattttgtttccgaggtttatgggattgagttagttggcaattttattgtgaattatactatttcatgatgtaaatttttattttttctctagtgttttatattggcatttacttgttagtgtctggattttggatgtacattaatcaatgaatctttttagatagagtcacgaagaatatgctcatttgtgtttaagggcttaaatcatagtcatggattcagcacgaagttggtttcagaaatttcagcctagatcaaagcctgtgccaacaaaaaagaagggtgcagataatttaaaagatgcgaacaagcctcctattgatgatgcaccttcaaatgtaacaaaacaaaaagttgaagcagctaagcagtatatagagaatcattacaaatctcaaatgaagtgtttgcaagataggaaagagaggtaggtgtgtcaaattaaagcactatttttctcattttttttaaccattcatatatggtgtgactataaaaactcatgctgttttgtggtaactacagtttggattgtaatatttttttaagattgtattgttactaactgcaagatgtatttagtttttttcctagttttttcgtaagttttgatgactccggttatgagatactgataaaaaagatattgtgcagcactactaaaaatttctgatatcctggtgttttctaaaaattattaaaggaattaagatacaacgatactctttttcatggcttttggacatgcctaaagtaaaaatattactactttctagatgcctcctcatttttcttaattgttgacaagcgtacatttaattagcataatctatcattaaaatagtacaataggtgcttgtgaaaatttttcttattaaagctgttgttttgttacttttcgatgtgcacctgatcttgca

SEQ ID NO: 184615 - DNA, 2915 bp, Cannabis indica
gttaatggatacaaaaaagaggtgttcaccaacttatcccaattatttatacagggccggccacgagtaataatgcgcccaaaaatatttttgtatgtgttatatctaaagtaaagtgtgagtattaattattggacttctttttgtaaaatttataaaaatattattttttttcttatgtaaagatattatataaaaattttaggtttcaggtttgggtgggctttaggcacgggtctagtttgtcttaattcaggaccagacctgtaatataaaatgctacctcataaaagtgttaggcacctaagagcatctcaatagtgttgctcgaacaaaatgcttaatgatgtggaagaatgcttgaaagggagctacccgtttgagatcaaatgtttggatgtaaaaccaaaaactaatattgattctaaaacttggcaatattgatgcaatatcatacccatttttctccattttttttaaataaagtgaaagcaaataatatattacataacaaattagtgtgatatggtagtaactttaagaattgcttattatattaaacatgtaaaaaataatgtgaaagaaaaataaaacaaaataatttttcttgaattatgtaaaaaaatttaacagcttttaaagagtactattggagatgctgaatagtgttggagttaatataatagtaatgcccataaacttaagcatattatatgtagtattaatgttatcattaacattaattagttatggttgatcagagacttcgattaagagaactataaaattctcttacaaaaactcgtgtgttaattaatcccaacaacaaactcctgactaataaacctcaaataaattaattagccacattactttgttttgaaacaacaaatttgactccattttttttttcttattatatagctcgattgaaattctaagtctcatgaagtatatataaatatatactacacacacaattatacacatatacgtatatgaataagaataatctacaagttgaacctttattattttataaattaaattgagtgtctgtgattagtttgttgtgaatattttgtgtcaactctataaatattatttttcattgataacacatctgtcgtcaaaagagagaactaagcaaacaaaatataatagtattaaaaaaatagatcaaaagtcacaaaaagaatatgcatactctatagttggtttgttttgttttgtttttcttttttttgaagtttaataaattaattcattatatgtatatgtataattttaatgaataataaaaaaaatgtatcttttatcaagagggataatggagagtttatgaccttgctatatatcttttgcaaatattggttttgttataattcttttattttaataattaatgaactcaaaaaaatcttcaaccaaaataagcttttccaacagcgacaactaattatatatagtttaaggactaattatacaaatttgagaacagcaacaagcaaattttattgattaattagttatttaatcatattatgagggaactaaatcttcattatgcttttattccttagctgtcttttttttaattaacaattaattaatccacacctacttatgaataaacattgtatcaagctcctcgacaaacttacaacccatacgctgaatattaatgttgatgtacttttatttatattattatgtataaattaatgtatcactaaaaatatgaaagacgtgcagttttatataattagtttatgtgtagtatatattttaaattaatggtgttgtttgaatttatatgtcttccaacaatattatcatgtcttaaaagaattaaactattctgtgatagaaatgaagatcaattattacaaggattataatgaatgagagttatcctaatatgttttttttttttatttggagggcagacaccattgacccacccaattaatagatagaatattgggattattttagaaatattgaaaaatatttaaaaaaattatgtttttatagaattatgagtttttttatacatttttacggattttttttttacaaattgttatttacatgttgttctaaaaaaaaacttttatttttatgttgtgaaaatatattataacattgttacaacatgaaaataacattgaaatacaaaatgtattaaaaatgtaaataaaaaaatatgtaaaaatgtaaaattaaaaatttcatttttaggtgtgtgtaaatttccctatatattacaagaacttaggaatcaattatgatattttgtttgttgttgaaataaacattgaaatataattgataaattaataaaattattcctacatattaaaatagttttatatttatagagaaatggtattagaattattttagttttactttaatatttaatcatttgtaatattttatttttaaaaaatcatttgtaattcttactacatagcttctctgaattcgtttggtacgccatattgtattgtattgtatacaatattatattttggtggagtgactattccatatttgaaatggaaggaaaatccattccaatacaagattggaaaaaaaaaattataatgtttttctaatgtattttaaatttaattcggtaattttattcatatttcaattactatttttatttttattcctatgttttcatttcttttaaacaaacacatctcattatattacttttagcaaaccaaattaacattatattagttatattttgattttattacagcaccaactatacagcaaaccaaacatgttcttataatttttgttaggagaatatccctaacctaacttgtcaaataatccataatcgagcttagaatacgttatatcttttcaatagttattaaattaagact

SEQ ID NO: 184616 - DNA, 2304 bp, Cannabis indica
actccctggaactgtagccattctcttccttggcaggccaaacacatgcaaactacttttctttatgttcgtacaaaagaccccacactgtgtcaactggctaaataacctcatggtcactgggtggctgggtcccacacatttctatgaatgtatctttcccttttcatatcttgctacccacatccacaccacgttacttttcagtttcaatcccttgccttttactatattaaaaccttcaaagttacaaaggaaaagctaataggtttcttaattttcactttccagtgttcaaatcaacatgaaaccgatctaaggccacggtaactctccaatttaaaattcatatgataccaaaaatcaaagttgagtttcagagttatggtatagatgtatacatacataaataaataattaaagtacgggtttctcaatgtatgcatggacgagatactatacaccacccttgtaattttcattaagttgggaatattctcttgcatacaaatattttatgatataaaaaagccatacaaatatatcttatgatattaaagaaaggctgcaaaacaagccttcacaactaggttgccatacacaaatcaatcagtcgatagtggcaaaaaagctgagaagaacatttcaaggtagggaagttttgttttaaccctataccttaagatacgtagcatcactgaacttacgttcaagttacaacataaaatataactctaaaggctaacccttgtatggtcggtactattccttttggaagaaagaaagcacaagatctgtatgtccagaaaacagttgcgtgtccacaaaatgcttcatgtattaaaaaacaaaaacaaaaagaagcatcagtattagcttacatatcagattattggaacaggactaagagtataaaccaaaccccccgaaccttctttcgggaaatttttggaaaattagcacaaagaaagtaagattatgcaagagcataccttcataaatggtcgatcgcgactagggaatgaatcgatgaaactctccttcaggagtaaagataccttaacattgaagaaacacagtatcagaaattctgttatctgctaaataagatagaaatttttagtgtgatatgattgtgcatgcctgctttgtatgcgtaactgtaacaattattacatccaaaacaaaagctacaatatttatttttcactcctactccaacataattaaatggtcttgtaagtcacaaattgatgtatcgtgcttcttttatttgcgtaccactccacaaaacacatcgtcaggtttaagttgatttgttccgttatttgtttgtaataaggatagtttgtgtctctttttttcttttaatgatgtcactacttaatgaatctattttgtaattcaacacataaacatcttcatcattgcagagtttaagacaatgtttgttcggaaagatcatttatgattttcttttgcagaaatacagcagagcaggcataccaaccttatcatcattggactgtacatttgtaattgtgtggggacggaggtttgagcaaagtgaatctgagtaatctcttagcactgataagaatcccttggcggcttcaacctacatgcaacgtgaaaatttcagattggaatcttcaccaagttttcccggaaattaacaccaacaaaatttcccagacacaaactacaattctaagacatttactaggagaactggacattcagtattgttttccaaccagaacaaacaattcatacaagcaggagagttttctagtactcattttaaaaccaactcattgtatttgtagatcttcagacaacaatggtgactcttggttccactttattacataacacaaaattattcatgtagatgaagcaagagatcacacctgtacatctgtgcattcatatattggtcttttcttccccaagtaactttctccaacgagctttgcatgataaggacttagggatgcatacaattccttttgtttaggcagctgaggtatggtaggcgatttcacctatagaaaaaagcaatggggaaaaaagaatctttatacttgaactatctttatataagcataatcacatttgccaaaagaaaaaaacaaatggtacaaagtttggaacctaaacaagcattcatgaacatgtactcattacccatccaccatatcaaacggtgattaattttgaaagaagaaaggtgtaaagcctatttttggccaaaaataacacatcaatatacaccacactgacagcatagtcatcaatata

SEQ ID NO: 184617 - DNA, 3937 bp, Cannabis indica
ctatacttagggccgaccctgacaatattatactatgtttcttctatgtgagaatgtgtaaataatgtttttttaaaaacaaccgtaaaaaaataaaaaatgtaaagaaattctttttgggtatctctgaattttaccttccgagaaacatttgctcagccaatatgaaagcccccaagatagcaacaataaccatgcaaaggggactaaaagctgtcacaaaaacagggcctctgtctttcattataattccttgaatatagtaagctaatccagaacacaccacaccctgcatatacataataacatttaaaaaaaaataaaaatgatttgatctaatttgttttcatatgaacatgttcaattatattaaattaggttatttgtggtgaaacattcttatattttaattttttacacttaaccctcttatatttattcttctttgtaaatttaaggtgtcaactagatatcaccgttagataggtatatacaatgatcattcagttgatatttaacagtaatattttactgacgtctcaaatttataaaaaaaaggataaatataaaagggttttaccactaaaaaataaaaagatcagagagttaagtgtataaaaattaaaacataagagagtttcgctgccaattaagttatgttcttacactgtaaacagctgccattaattttgtgtcccattgaatagcccaaacagaagaatttcctctttccataaccaaagccacagcagttccttccaatgtgcctaataagcaaatccatgctgtgagggacaactcagcagggtatgtcttcagagtgattgccttgtggaacaagtaaacaaacaaacaaacaaaaaaccaatttcatttctctatgtatctttaatttaattattagagatttgttgatcacatttttttctttttgtacctgcaaaaccatgaaacaagcccaactaaagcacccaattgtgatcatgagtgagcccttgatagaattagcaaggctaatcccgccgccgccttcgccgtgatgcccgccacttgttgttgctttagtccaaaagagatgtaagatgggacctttcatcaaagtcatcaccatagcccctgcaaccgttgctacggttcccaccacctttgcttgtgttcgaattgacttaatgttgagcttttctagcctaccctacaaaaaaaaataataataataacatattacaactcgggacagagctagacttgaaatttaggggcctaaaaggataaattaaaattaaaagggccaaattataaattttagagaaaatgaggaaaaaatacaaaaatatgtatataatttcgtccctattttgtaataattttttaattaaatctgaaagatacccaagtatgcaagccaaaacaaaagttatggctggaagaatattagtcatagctgctgcaaatgttgctgttgtgtatttcattcccatgaaatacaagttttggtcaataactggtctgaaaaagtcaaattaaatacattattagaagaaaagaaaaaactcaatatagaaaataattaagtaaagagaaaatgagaagagatgaagattattactcaagtaaactcaaagcaactaatttgatgaagataggaagtgtcatctttggccttacttttctgtttaagaaaaaaaaaaaaccaaaccccattttagtaaccttttattagtaaaatttcttcgaaaatgaaaggggaaaaaaatgcgacatacttgtctagaaaaattgcgaaaggagcaatgatgatggtggcgacggcatggcgatagacaacgaggacatagttgctcattccttgatttaacgcggccttagagagaacatccattcctgcaaaaccgaattgcaagaacacaacaccaagaaatggctttgctttttcaaacaaagttttgccatcactactactcatcatcatattcactaataattactcaaataatatatcttaattgtgatttaatttcctccctatacaaaatctagtagtacttgatgagcttagcttatagaatgaacttgtgtgtgtccttgtgtttatatagacaaaagaaaaatacattacgtgtggtatttatacactttgggatttaatgagagatatgtataattaatcaagtattaattatgattgttatttaattagttgatgtatgagtagttcttcaacttaattaatttgtttagagcacttaacaaatgtccttattatatggtgggcacctcaacttcacttataattagggttggtcctaaatataggccgtttaagctcgtgtttaggactcacatttttcaagaacctaaaataaaaaataaaatattgttagacttttattttagtaacaaatatttacagttaaattaattagagtgtatgtcacattatacaatagtatcagttcgagtattctgatatgttatgtgtcaataattgattgatgatgtatatgaaatgcatgggatttttgagcataattcattcaattatgtcgtcatatcatatggacaaaatttaataaagcctccattattggtatttctttcttttttatatttaaaacaaagaaagataaacaaagtgttagatgatagtgcctccattaaataaaatatttatgtatatattttgtaatattaattcatgagtagctttgcatggttcttagtggaataaaccctttatttatttactaataaatagattctcagataaaggattcctttgccagccataatttattttattcatatttattattatttcatactaaaatattaacttcatatatagtattatattataataaaacttttttaataggagaatgagagctaaaaagcaagtgcactaaaatttcttgttggaagatttgttacttcttttcataaatagtaatattatatttcatatattcttatactcttttttttatatataaatatatatatatatatatgtgtaaatgttctaataatttggattttgatatatgattcatcatttaatttttattctacaaattagtatctaattattagaaaatcttaaaataggtgctctcattttaatcatgtcattattaagttaaatatagtgttattattattattattatatgtacctcgtttcattattaattaataatattccacttatcaatcgattaataatattgatcatcaagagattcttgaataactagcttagaatcatatcataccttggataagagaaagtaaaaatatgatttaaataatttgataatgttgatggaagtgacattatataagattgcattaacaaaaggtattaaaaattaaattaaggtcaaattactccactaatcttaatactatgttcatctagtgtacactatgtggatttaatttgtcccttgatttactttatggatacataaattatgatcaatttaatattattcaaagtcactaaaaggattaacacctttattaacgcaatttgacacctgcaaaagtatcgcaggcgaatttttgagcttccacgtctagaaatagtattaaggaataaattaaataatgatatatttgattgtttaagaaatcgaaagatataaagataagaattaacgattcaaacatttgagaagatttcagactagctaactagttggcgatactcaaaaattactactcaagaaaaatcggaaagaatgagaatagaatcaaagtgatgttctttttgcttgaacaaaaaaaggaagagtatatagtataatgtagacataatttggaatggtggtggtatccaaatatgatctggaacccatttttgtttgtgtgattgtagctagctagtagctaggtttaggagcttggtaggtccattaattcacttgaattt

SEQ ID NO: 184618 - DNA, 1695 bp, Cannabis indica
cttaggactaccaactaattcccattcccatgtgtaagtgcttttattgatctcaacctcaaatcttataaatatatttattatatatatatataaaaaaataataatataacacatcaacttttattttttagacatacatttcatgcgtttttataataaaactttttaagtaacacacctatatacgtaagtgatcatatgtgtattttatcttgttttgttttgtccacatgatatttatacatatcttaatttttttaaaaaaaaattatacatttgagctgtttgttataacttatatatataaaagtttcaataattaatatttattaattatattcttacgtgttttttgtaccgagtaccacacctcgcattgtaataagtatcttgaccctaaaagactctcagaagagaaagtcaataagggaacgttattaattaattaattaaattgtacaaatctcaatgctgtgacaatttgacagacaaaattttgtattattttattttatttttttagatacaaattactaggaatttattagtccttttcaaatggtgtagtgtatggggtaagggcatgaggccatacccctggccctggccgatcaattaagtaattaatgattttgtagctggattttgttgacttttgtttttcctacaaaacagtcaaatgatattgtaataaactttaatttggtgtaacaatattcatcaattcatcatttacattttagtgtaagaaattaattgtgtcatcactaggggcaataaaaagaaatgcacattaattaattaagggtattgtctaataagaacaattattaatattgtaattaagcagaagtcgtcccattgaaagaagcatttcaagtcatgaaaatggttggacagttgctgatcatgatcaagatttcagagaaaatggtgccaaggtacatacatatatatatatatacttctatatatattatacttattaatgaattaatatggttgattatatatagttaatctataataataataataattgtgtacgtacgtaggtggagaaagtgagttcaggctcatcattgtcattgtcatcttcttcgaatatgcgtcttaaccttgagttcacccttggaaggccaagctggcagaaggactatgctcatcatcatgactcatccaacgaagtactaacccttctcaaatgttgaattaattatataacataattaatattattacttctacaactacataacgttaattaaattttctcactctgtcggtggttgcaaaaaatatacaaatgtacaccctacgcattttgttccattttcccccccaattttgtctttcttagttttgtcatagtacgtacgtagttataaatcataattaatgaaggatgggaaaatgtaggttatatttgcatagctctactaatatattataatatttgtgctatactataataattagtttgttctctataatataaaattttattatattactcggacaaaatggtattagacgtcaattcataactcgcacgaaataagttttaattaaaattaatacgataacgatcttatttaaaagtataaacatttatataatttagtgtcgtaaaaaaaataaaatggactacataaattgtctcaggtcaaccaatttataaacacgtcgtat

SEQ ID NO: 184619 - DNA, 4743 bp, Cannabis indica
taattatttaataattgtaatttttttagtttatcaccaaaaatgttgcataatacctcattttacatttttgccaaaccattgtttagctatgtatgccactgactacagggctgggcctcccatccccaaccataaatccatggaagaaaacatctcccaagcaattagaatgcttttcatcatcatcaaaatcagcattatagaacatcaaacacgtacaagatgactgaacacaactgcacaattcttcttctctctcacttcttctgtgctgttgattgtcgtgttttttcctacctggttctaccactgacaattggtttgaatgtcattgaatctcattacatatattaataacacatacttttagaaagtgttatgaatcttgagcagccttgagatggaaatgaatgacagcaaagaccaaagagtatagtttacgcacctgttgtaccgatcttgcttctgatagtcagggcaaagtttcttttgataaccacttcgagccatgattaagttagtctttgggaaaaaacagcttcttgtattcacagccagaatctctgaactaagaattataagtggtgatcacttccactcaggccatttgattgaatcagatcttctcatatttgatgaacccgaattatcagcagcatcatgccacaccatctccatctggacgaaatagtaacagcggatgagacatatataacagtaaaaagcttgaaatgaaatcatacatgtatagacattctgttgctaaacaatgataacaaattctttcaagtgtgaggaggaagagtgatgaatcatacatagagagtaaggatcaagaataatcaataggattgtacatgtattttttaaaaaaaaaataaaaaattaaacaaaccaacctctccaataatcactgtgtcaccttccttaacaccctgtttcattagagacttggtcacaccacaagcttctagaacatgttggaaccttttctcagaatccatgtatctgtgtaaataatggctattaataagttctgcttgatgagaaatttagaaaacagccaattgagaaaccattgacaaggtgaacctagacatcttgctactcgaaaatgtcataataagaacagtcatcaaagagaacaacaagaagagggattgatcataataatgacatggatatccacacccaagagtcaggaccttgtaggacctcataggtgcaataatctcaaaaaggggctaaaagttacaagaggctctagttataataatacatatttcggtatttagtgttgtatgcataatttgcaagtcatactaatgaggaacaatcaggcctaaacagtcttgtaaggaacattagaaggcataatataggacaaaacatagtaatactgatttcagttatgaaatctacctccagtttgtcatctgaacaaatctctgcaacccagatcccacaacatgccatgtattggtactactgtcatgagaaatctcaaactcattgatcgatgcagttctctgcttacgcactgtggtagctacatggttcaaatcaacagcatctccccaacctaaatcaataagacttgtcaacagagtgtataaatactcataccagttcaaaagaaccacatgttgagcttgaaaggtagaattaaactaatgaaaagactttgaagattcaaaacaaaaataaaataaacttccaaccgtgtgattcctcctccatggttgcttttctttcttgaagaatcttgtaagcagcacagatcacttcatgagtgccatctcttagtactgcactaatacaaaatggttcaatgcctagagcttgtagatgttctttgaaggaaggccagttttcccgtgcctccggaaggtccattttgttaaaagcaacgacaaaaggcttttctgcaatttcaggactgaacatttcaagctccaaacgaactgcatcgaactcaaactctggttgtggtgatgaaccatcaacaacatgcacctacgcttccagataacaggttttattaacacactgtaatacataaaatacatgttgcaccaacacaattatgaagccactatatactgaagaaaattccagccaaaagatcacacaaacaacatattttatgatacaaaggaaatcattaattatcatataaagaaccttttgcatcacctttaagctatccagaaagatgtataatatataagtcagtcattttctctctcagcatcattaggtttaagtgtcttatattgctcttatcctattcctagaaaatatcaaacttacgtcttttgtaaaatcactccaatattattttgttctcttatctgccaatttggaaatgatattataaagaaaaactctacatgttaaatatttttatttttatatgttagttaaaagacagaagttcatttctaatggattgaaatgatgatcaatacaactaggggaactagaaagaaaaccataccagtgcagaacacctttcagtgtgccttagaaactcatgacctaaaccaaaccctcggtgtgctccttcaagtaaacctggcagatccgctacaaccatggtagaatcgtagtcaaaagaaactacacccaaattcggcaataaagttgtaaaggggtagtttgctattgttggctgcgctgcacttatcacactaaggagtgtgctctttcctgcatttggtgcaccaactattccaacatccgcaactaactttagctccagctccaaccacctgatcaacaatactgtgttacttcaactgctcataacctatgaatctatgattatctcccaaaagcgttaattgactctgggtaacctttaggagattcagcaaagtaattaggaggacagactattgcacatccgtacccattgttagctgaccaatttgtaaaatatgcaagctaccacatatggttcagcgagcctcatttcagcaaacatcaaattcttttaaatcttatcaactaagcggacatcaagtacttactttctttttcaagcaatatttttcacatagttaaattgcttttagaatggaaagtggaaacaaatgataccaaagctcaataagctatcgatttcattttctaaaggaaggacaatgaaagaggtatacagtaacaaaaagccaaagggctcctgaggtaacctgttaagagttatcacacttttcgcaaacaaagagtacttattattcatactgacaaaccaaagaatgctcctctcagaaagttagagttaacacagttttaagttttagcacattacttctcttctagcaaacaaagaatactgataagaataggcaaaactagatgcaagtaaaagaccacatagaaagctaagtaaaacaatagaaacaaaactattaacaattgacaataacagaagcagaaaagactacatagaaagctaagtaaaacaatagaaacaaaactattagcaattgacaataacagaagcagaaaaggagctcacatttcaggaccctcttcaccattttcagcaatcctgggcaccttattagtcccagacttaaaggctgtattccctctcccacctctaccaccgggcaaaagcaaagctcgttgtcccggatgtaacaactccaacagcacttcatccttaccagcttctctgattaatgtccccggcgccaccttcaccaccacatcctctcccttagccccagccatcatcttcccttgcccagtgactccctctcccagctcgaaaatgcacactatttctaaacggcaacagagaattcatcgacccatcgacctcaatatacacattcccacctcgcccgccgtctccaccagaaggaccccccaaaggcacgtacttctctcgccggaatgccaccactccattccctccgtccccagcttttgcaaatatttttgccctgtcaaaacatcgcattacagccggaactcccttctctttaacagtcccatcctctagctccatggctccacctccatcgtaaaacccttctacttcttcttcttcatcatcttcttcatcgtcaatatcctcttcgtcttcatccacttcaaatatctcaaatttaccgtacttcagccccaaatcaccatcttcaatttcttcttcatcatcatcatcttcattatcctcttcgatggctaaattctcaacttcgcggttagtctgcaatcgccaagctcgattcggatagcttaacttcggatgagaactggtaggaaactgaatcatctaatgaaggtagagaaaagtcatccctgggaggcaagcgagtgtaggtagtggcttcgacgccgagggagaaaagctctttctccccctttgggaggttgagctgtggaggaggggtaggaggagggtttttgaggttcctctctcgtcgggatttcctattggatgaagagcggcgagggtgttgaaccctaggtcgagactgtgcgtagggacagaagcatgacatggatatggatatggaagacgccattgttagaggcccccgaagaaaagctttgagtgatataacagagagtttgtttacagaagagaactacaaagcgggaagggaacgtgacgccacgtgttcattctctggatgaggcttccttagacgacgaaagcgacgacgtcgtatcatagggaaattgcgtaacaaaattgtattttcttttctttttcttctt

SEQ ID NO: 184620 - DNA, 8559 bp, Cannabis indica
agtcctttttaagtgtttgggttaagaaaagtgtgatcttgggttgtttattataatctgggttttctcatgaaactgtgttttgtttatttataaagagctgattatatatatatatatatgctatttggataagcctttttgggttttgaagttatccaaagggacaaacaaaagaacaaaagatatttgctttatttttttccaagtgggtatcttgaagggaacactaaaaaatcaaattcaacaaaagtgttgaacttgatttttgattgtgaggccattatagttttccccttctttctgggctcactcaatagttaaagaagatatttttatgaatttttaggggaaaaggtctaaacttttttgtgtgtttggaaaatttggggtgaagaagattatgagaggagtaggaggagagaaaattagtatgagtggtggtattatgtttcctaggcttcatgttaatgatgcagataaaggaggtccaagggcaccaccaaggaataaaatggctttgtatgaacagtttagtgttccttctcaaacatctctcactaaatcaccacctaaacaacataataacaataccaacaccacctttctttcttccatttcctcaccccaagtaagtctctaattcatcattcattgctatgtatatatgtatgtgtatatgtgtatatcaatcactgtatatgtataatgtttattgatgtaatgttttcaccttaatcagattcactgctatgttgttgtttagctcattttacatttactattgctgaattggatgagtgccttttttctttggtgtattacaatatgtttaggaattggagaattagtgtcttttgaaattaaactctttgttaataacaattagagtttaatacaataataagaaatgatagaaacttatccatccaagcctgttcagaattcatgatgagcaactttattggttgtacgagagacatgaattaggaatgtctcgggaaaaactggaaagtaaactatcatatgtttaggaattggagaattagtgtctttttgaaattaaactctctgttaacaacaattagagtttaatacaataataagaaatgatagaaaattatctatccgagtctgttcaccatccaccctaagttcatgtacagctaattcatgatgagtaatcttattggctatacgagagagacatgaactagggatgattcgggaaaactggaaagtaaattagtcatcaccgaaagtgaattagtatttagaggctatagcattttacaacttattaccatttgcaatgatcaagcttgtcaatgtttgattgaaaagatttattatgtctaaactactacaacaccagtcatttttggtatgaacattgttattcttatgttctgatcatctgttatttatcggtttgaacaagataggacttatttaaaattaactgaacgaacaattcatataaatcttctgtcaattttgagttcttacttatctagttattcaagtatatgtatgaatttcttgtaggctacttttacaccaactacttattgtgtttgaataattaattgatttcctaggcttcgggttttccaagttcattcaccccattccgcgattccaccgcaccttcaaatttggctacttcttctggcggtggtggaatgattaagttaaactatcaaaggtcagactcagatgcatctggtggaattaagtcgacagctaaatctgtttcgtcgtctcaaacttgcaattactctcaagttaagagcttttctttcaagatgcctggcaatgacaataatgctgttagatcttctatgtcgggtagtcaaagtaataaaatcccgcgtagttctagcactcaacaaagcaaagacagtaaaagattgcatcataaaagctcatgtgaaaacataaagtcatcaggacactcagtgagggaacattctgatcaaaacacaagaccatcatcatcgtcggtgaggattaggaaggagcatgtggaggtgttgaatcaagaaagtcataatagttcaaggaatgtttcttctagcaaattccttgctatgtgtgagaaagttatagttagagataacaatgtggtggaaccaaaggcaagagttggaataagtgaatcattttcgaggcaactacttacgacaaaagatgatgatggtggtatcgagtctgagaagaattgtaagaccccaacaacaggcagacatgttgatggtgatgatgttcgagaggtttccatggtcgatgctacattattgatcttgaatgttcgccccgatgatgttgtacatgtgataggtgaaaagcaattttggaaagcaagaagaactattacctagtaagtatctacttactactaaaatagagttgtttaagtctagtagtgaatcaatgtgtagtagctggtgtatggaatagggtcaaaactaagaattgtgtatagggagtggaatagtttgttacctatattttctactgtttggcttttgttctattggttttctcgagtttagagtttcggttcttatcaatttgttgctcagcttattatctatagcagaatatgaagaatgaaacataatagttcagtatattagtcactaaggagctgttgttgaaagttgttatggcttatcagacaaaaggtgccatggtaggaatcgaaatatttgatcttattcatcgtgtaacgattttatacatcaaatatttcgttatgacatatttgtgtaccattcttgcttgaatgttcttcattctgttttttgatctatttcagtcaacagaggatctttgcattgcaagtgttcgagttgcatagattgataaaggtgagaaatttgattgctgcttaggaagttttgacattttgaaaaaggaaaaaggaaaagcaagttcataataatattaagtttggaacaggttcaaaggtcgattgctggatcgccagatgtattgctcaatcatagcgcctatttgcacaagtcacgagcaaaacaagcgtctcctcaagtgaagaaaacacaatctgaacacattaatgtgaagaagccaccagcagcagttgtcaagcacaaaaattgtcacgatcagaaactactcggtcaagaggatgatacagcagttaggaagcttcgtcttccttataaaggaggagtctttactaaacaatcgagttatgatgaatacttgagaaacccgacaccagcagcagcagctcctcgtcctcctcctgcagcgatgaacaattcagctgcgtggcctttccactctgcatcgggaaatcagtggttagttccagttatgacaccttctgaaggacttgtttacaagccttattcaactcccggctttgctgtaccaaattatgggagttgtggccctatgagcttaaacgctggaagtacttatggcggtccaggtccaggttcgggttcagcttgtaataataacactagtgatcataatcataatcatgatcataatcagcaagcagttggaacacctgctatgatgggtaatcagacttactatcatcctccacctttcgggttaccagtaatgaatccttttgtaccgagttcaggtgtggaacagatggtaccatttggcataggccgaacgaatgaggcagaatacaataatcagtgttcatttgaggaagttaacttcacaaaaccgccgtcacacctgcagagttcatgtaacatatcgagtcaaatgagtcgagcaatgtcctatcctgctggcgaggcatttcaaggctcgaaagggatgagcgagttacaacaacagacaagtacagctagtagttcttcggaaaggagtagaggagatgctattcctcttctccttttccctatgggaccaaccccggctcttgatgagcgagttgatcaaaataccgacgatgaagaagaagaagaagaagaaagtagtaagcatcgtagtcaaactcgagttatcaaggttgttccacataatgcaacattagcaactgaatcagcagctcggatatttcgatccatacaagaagaaaggaagcatttgcagttaatctcatcttgaatcatatattaatttggaaactctaaaagttaagctaagctaactaacatgatatgataccttgtatgatgataattttgtatttatttttacaaaattaaaggttgataattttgtaaaaaaagaaaaaaagaccaaaatcacaatgcttgactaaatctattgactcaattttttgagaaaaatcttctcatatgaaattatgacaatggttttggtgatgtgtgttataatggagttaattttgtttgtgtagaaaggaccaaagagtattttttttttattataattgatattttattattttagaaagaatgcgagttcccattactaaataaaattagaaaaatgattaggataaagacacaatttgtttctttgttgcattgatttgagaattagaataaaatcttaccttctttagataatatattataataaaattacaaaatgtgtttagatatttgatgttaatgatttaacggttaattacatacgaatttctgttattttgtggtaaaaataattaataattacactaaaaaaataaatatatttagcaattaatatttaaaatgaatttttttgaagtaattataaaacagcaaaagactcaaaggaaatcaacatcatcaacttgatgttccaaaacaatggtggccagagcaagtctgtatgccgtggaccggagattccgaacaagaacatatatctctttctttcttctttgttgctgttttacttccgaatcttcttcgttccaccattgctcttttcgaaggtgagcaagtaacaacgcctcgcaaaatgcttccgccactagcttcttcttgctgttcacgaaaaaacaaaaaaggaagaaactttaaaaacaaaagaatggtatgaagttgccaaaagttcattcattctgttactgttactaactaacctccctctgacaaatccagttgtgacgaaaccgattggcattcgatgattagtagttgtagtgggatcttctggcatttgaagttcccatttcccagaagaatcttctttgaagtatgatgttactgctgactcgggaatttgaagtcctccttcaatgttcactgaactgaaattgacatgttcatgtcaaggatatgatgattaaaagtgtgtttggttggatgtaataaaatagaatggaatagaaaagaatcaaattttcattccattccaggtgaaaaatataaggaaaaaccgttctaatgcaatgtatattaaattttaggctaattaagatttttatctttgcaattgttagatttaagaacttttatctaattttactaataaaaacttagggagcacaatttagtatataccaaagtttgggagacaagagatggtagatatcaaagttcagaggacacgatttggtagaagacaatcgtcgtgttagtaaaattaaacggaattggacagaaattctataatccaacaatcacaataattcaaggaacaaaaattataattagcctaaatttaatttgtatttgtattcttctgttttcactccttctaaccgaacgtatcctaaagtatacaaatttgaaacacataaaactatatactaattagaaagaaagaactctaccttgaagtccacaatgatatatcggtggaacgaggtgcgcaaataactgctccctcttcgaaagaaccttccttgaatgcatgaagaagaaccctaacgaaacatagtttactgttccaaataatgttgctggcaattctagtttgaccctgctcaaaatgattgctttcatcctttgccaacttcgaaaatgatttcttcttatttgctattcgaggaaatagaagtaaatgatcgcctttgatttcgttcaagaaattagtcagcaaggaagatgtccttggtaccaaactgtctaatgaagtacaaccactatccgaatttgatgctgaattgttgttgtcatctccaattgtcgcgaggagtttgtttagagtaatctggacactatcccatggtggaagaacgggaactctcaagggtcgtgttgataaaggatgaagttgctctttttgatcaaaggaagcagcttcggttgctttcaggcttgaataagcattgcaatcaggaaaatccgaaggaaaacaaggcaaaccgagctgcaagaattagagcaaaaaaaccattagatgacaatagtattagcctgaacagttctttaaggctttaaaatgcacacttacttcagatgcaacccaatgcttctccctcaaaccgattgcacgagcacctttagagacgagaggaatccaaaacgccctgacccaacttagtgggagtacaatagaccagctaaaaaggtaatgaaagatcatatttttagttaccaaaacacagcaaatgacaataatgaaagaataggccaagcaaaggaggttacccgatagctaatccctccttgttcttatctttgagaagcataataggacaacatcttgagcactgcacctcggttgaagttggacgatcaagataaaagaatttcttctgctgttcatttttctccttgcaaagaatattctctgctacaggaggactaacactagagctagcatcccacaaatttctgttatcgagtgtactttggctatcgagttctgagcttgacgggaatgactcttcacgcctgtctgaagtttctgatacgctagcaagctctctaatttcattccccagaatatcacaaggcatgtcactggatactgcctctggaacattggggattgtcctttttttcgttattgttcgaggatccatgacactaagtgataacattgctttagaagatacgtgatcttcattttcaagtacacaattctttttatctacttgctgagaatcctctgatatcctgtaaatatcaaacatcatttagctaacccgaaaaacttggctacacaaagcaaaaacatctaaataacatacaatgacttttgaagaacttcgaatgcctttgatcccatgacttgtaatttcgcaagctgaccctcacgtgaaaaacaacgaatcaatatatccttctcttccatctgaaatttacattggaaagagagtaacataattagcatcacttcaaattctgtttttcaattgtatagactatttctaactctaaagtgttaagaatgaaagaatgtcaaagcttacctctttctggcaagcaaatttaagagcaccatatccttcatcgaaagcagaagcatgtatccagacccaaagctgacgaaaacaagacccgaaatctgtagtctctggtttcacagatcctagaccattaacagcatcagcagcagtagcattattcctatttcttaaggaacaaggacgccacatatatgttacaggagcgatcggcttagaaactggtgcattaatatggtggagctgcaacatggggattagtcagacatagccaattccttaatccacctcaatgaaaaagaaaaggacagtaactaaccattgcattatcatagatggcaccataaatgatagaagtggaaacatcaccggaataaccaggttgagaaggcactagcatcgcgtttagaattgacaataaagagccctggatatgaagaacataagaatattgctaatatttattttcgatgaaactttcagtaagttcctgaagcctaaaccaatggctatgattgatcaaaacatcagttagttaaaaaatgtgtgtttaggatggaatgactacctctggaccctccaattggatgggaacataatagcttgcatcatgaattagagctccatttctgaaccacttcaacaaagctctagaaccccttccactgcctcatcatttacaacgattgaaaaataaaactttaagataataaagaatgaaaacattaacaacactcaaaaacaacccaatgccggcatagtttctttttcttttaaaacttagcatccccgcctaactctaaaatatttgggaccaagaaactatagcaattgtttgtaggtaccctagggactcgaaaaacccactgaccttctgggagcaaaccacatgtctgaccatttgagctaccctttttggtacccaatatcgacattgttatcaatctaaaacacttggtatagataaagataatgtttttttaaagttaaaaaaagaaagaaatacaaatccaaacactcaaagacacccgaaatcgacattggttttccttttttcgaaactaggatccccgcctaaccctacaatatttagagaccagaaaactatagcaattattatgtaggtactaagagggactcgaaacctcagaccttgtgggagcaaaccacatgcttgactatttgagctacccaatatcgacattgttatcaatctaaaaatacttagtaaagataaagat

SEQ ID NO: 184621 - DNA, 1638 bp, Cannabis indica
tcactagcaaactttctagataagaacaacacaatttttttctacttttctttgtagaaataaaccaaaaatattccttctaaagaatgacaaatttttacaataataagaaaattctaaggtgacaacatacattaaaaatgatttgttttatatgacgtttacatttagaaatttaatacgttcttaataggataaaatttcttgcttaaatagagaatagagtgaagattggaattatattttatctttgaatattaaacggagtgcggatagggatagcatccccgccaccaggagacccgtttaatttttatttattttataaaattattttctaagataattactctacttaaattttaggctaatttagatttttactccctgaattttaacatttgaactttttgaattgttaaaaatccctcgagctattaaaattgttagatttaagaatttttgtctaattttactaaataaaagtttgaaatagataaaaatttagagaatacaattcggtacatgttaaagtttaggagatataattttataaatatcaaagttcgggggcacaatttaataaatagataattatcatattagtaaaattaaataaaaattcttaaattaaaaaacctcaataattaaaacagaaaaactaaaaaacataatttattacatatcaaaattcaaaaagaaaattccaaattatttctaacttcacttctaccaaataacatacatcatatcttatagtacctaatttagagtgcctcttattattttcatttccattattataaactcatgttcacataattttgtcattttaaaggcacaaccacaaaacgaccacgtttctgaaaaagataatgcaaaataaaaccttccattgcttcatcctaggaaataggaaaataggatttagcagccaaagccagctaaccaatcagaatccatccaggtcaaacattgactttcttcacacaaacacacgtaactaaccaaccaacccaaacaaacagcttgtccacagtgacttttcttaacggcaccgtcactttcttccactctactccaccgacgcatacgccgttaactaacggcataaacatcagttatcgtttcacgcgccaccaccaagctggcacacgcgtattgcataatcttttaagcaagtggaccccactcgctcgctattttaccaaccgaaaaaaaataaaaccgtcccgaaatttaagctaaatattttccaatttttatttttattattttgaaaaaaaatttgggaagaagaaatggagaccaaaacgacggcgttgagattcacactggggaagcagtcatccatggcgccggagcgagctagtacggagaggaagctgaacgaagaggacgaagacgaagattcggtgaagatcgatcctagagttaagcttatgtacttggctaacgaaggtgatttggatgggattcgcgagattttggactcaggtatcgatgttaattttcgcgatattgatgatcggactgctcttcatgtcgccgcttgtcaaggattgaacgacgttgttcagttgttgcttgatcgtggtgctcagcttgatactaaagatcgatggggtagcactgtaa

SEQ ID NO: 184622 - DNA, 5522 bp, Cannabis indica
agtacttattccgttcatagtgcactttacactttttattagttaattaatttattatattaataatattattattagtcatagtttacaatactaatttatacgatttgtaaatattttaagattatatttatctatattaattttttagccaatacaaaaagaaaatcaaagttttttttaaaaaaaaaattggataacaatgcgtaaagcgcaaattagttcactagttttaaaaaaaaaaatgtattctctagttaaataattaaacctaagaataaatattattcaaccttcattactttttgaatataacggtgtgatacattacttttttttaaaaaaaaaagtaaaaataaaataaaaattattaaaaatacagtaattttagtataataacaatgatagttttatggtaatttttgttatgagagtgagcaatggcgattcttttatggtgtatgttttatctaatcttgagaaggatgttattctcactttttagatattatgtaatttactcaagatggtcgggtatgctttcttgtaagtatagtcaagggaatatttgtgttagactcatggagttagttgaccagagggaaaaaaaatttctctggtgtatgttcattgtttaaggggtttgtagtttgttgttctctttattttaatttctctcatttattaagttgacctgttactttttttccttttattgtaatttctgaacttatcttatgcttttggttgttgtagggaacttttcagtcatacaagcgaaagctttagcattaatagttgcttttggtcttcctctttatattgtagagtctgattgcttagtctcggtttcggtttccctaagcgtttttcttttgtaatgaactagatttcttattagataatattgctagtttgctctctaattttcttgagacatccttaattcatgtttgacgtacaactaataaaactgctcattaattaattgtgcatgcacttagggtagatagtaaatttagcttggattgagaattttccttcttttctcattgatatattaaactctgattgttgttaatacgagtttaatttcaaaaagaaaaacaataatagtaaaaggcaatgctaaaaccaacttccctactttatgtaagcccgttcatcaaaaccaatttcgacgataaagttgcaaagtatatgaattcatgaaaaacaatgttcgaacatacattgaagaagaccacaccgaaaagccacacacagtttttttcttgaaaaaaaaaaattagagttcccaagactcagaattctcagaataattgtttataaattatgaactaattatagcatacaataaaatcagaaatttatggtttgttacattgaactcagctggacaaaatccatgaaagcaatttttgcataaatcatcaagcgaaagttcataaatggtaaataaagaataacttgaatgtcaagctcaatactggaaaaaaattataatcaatgacgaacctcaagagttactcgccataatttgtctaaactgttccttaggtgctgcaagcaaaacaggagaaaagaaacgaaacaaaaagtcaattgaagattactaaatggagacaggttggtaaacgataatgttaattcttttcaatatagcttacctggcagtccagtaaatttttcaaactggtcgtaggcttgtcctatgaacatctctaagccagtaacaattgtggctccagattcctctgcttcgcgtaggagtctggtaattctgggggtatatacggcgtcaaacaccagcgagtaaaatcgtagagcatgctgcaaaaacagaagcctgacttttaatgctctcacttcgaaagaggttactagttaatgaacagtggcactaactatatgaaacccaggtatcaaaccaacaaactttcatacatcacatcataaagaattagactttcatgcacattcattaaatctgtacacaaatttaccatcggtggtgtttttatagaaaatgcactttaaggatgcatgagacttaaagaggtgcaagcagtgtggcaatagaaaaccttagaaataggtgtttcatcaacttttggatgcattccaatagatgttgtgtttgcaagaatcatcccatcctcgggatggaaatcttgtaagtcagcaagtgataaagcttctcctccaattgtgtctgcgagttcttttgcccgaccttcaaggatgaaacaaataaaaatatcagattagcaaataattttaaataaaaaacatgaacaatgcaaggatttaagcatcacagaaatatatattgttaagcacagcattctttacatatttattccatcttcaaaatgatgttacaatacatacatcaggcaaagtctgattgcattataagagagagcattataattaaccataacactaccaaagtcaaccaaaatacattttggttcttcgaaagttctaatcataaactttgaactctaagaaagttttatttgttcatttattaaccaaaacactttcaacaatctcactgttggaaacacttttgttttttgtttcctatggcttttctatcatgtcaattgtaaacaatggatgtcaggaaaatagtcatttcacccccatcaaggaaaacaactagcacaccttctaaacaaaaacaagtacatatatattactgacaagagacacagcaaaatgaaagagaatgtttgattgaaaaagtagatcataaaattcactgagcatcggagtagctgagtcattaaaaaccaataacgagaaagataaaaaggatagaacagaaccataggtacgattggcaatcacaacccttgctcccttctcttttgcaccataagcaagcgccttgccagcaccaccagcaccaatgacaatgaacagtttaccagctaaaggtgaaccacccatactgctagcattaagcgaacctgtacacatagaaggaacaacaaacaagatatagcttacggataaatctattgatgcatataaaaaaattatattgcagttaaagtaaacctcgcaatccatcttcaatagcagaaatggcaccaatatagtctgtattgtatcccaataacttcccatcactttgtctccttataatgcaattaacagctcctattgacttgtatggtgtcaagatataaaccattcacatataagaaaatcttgaaaatagaaataaaatacattgaacaataaaagattagaaactgagccatactacaaattgtgcggttatacaacaaataacatgaatggtttccatctaccttggcaactggatcaacctcgtcacagcaggcaagtgcagcttccttgtgaggaattgtgacactgcatttgatacaaatttaattttattaccaacatgcaatcaacattgcactttccaaatacatatttttcttttcaaatagatctcgtccacacagcattatatacatacatatatatttatatagaattagattaatgtataaatattatataaatgcttatcagtggtcaaatgaaaatttgggaagtataggctttgtcatacaagagtaagagcaaattttgttgataaaatatttcaacatgaaaaagaaaaatgaaaaaatgaacctgaatccagcaaaatctgcagaagagtaagtttgaagaaaatttgcaatgtcatctaccagcaaatgcagataaactccattaaaaccaagtgacttgaaggcttcattatacaaaaatggggatttgctgtggccaactggctttccaataacaccaaacacttttgtgtcgggccctatctgtctgaaattgtataaatgtagaagctcatccattgtaggttgaccaggtgctgaaacaaatcccgactcaagagtaccaaaagtcagataaccaccaaactttgcacaaagtattcgcgaaatcaaacccctctcactcataacaagtgctattattggaacctgaatcaccggtgagcaataaattaatatttcatatcatatgaagaagaagaaaagccagcagttgctagccaacatttatactaaacaggaatttttctagaaataggaaatgcaagaaagctctgttcaactgatagcatttcttggtcaacctctgttctttaaccaaattactatactggcaaacaacccaaccactcactaacttgataagataaagatattccacaataagaggaaaacttattcaatgcccacttgtaacttgaattgaactgttgatacatacatctagggtacagaggatctacaattttgattaaaattcagccagaaattgctataaagtggtaccatcattcataaacagataatttcgattaatgattctagatttacagaaacaagaaattagagagaaactttaattgggatacctgagaatgcacggttatctggaaaacacgtgctgcgtcagttatatctaaggcagaagttgcaaacttcactatatctgctccagttgcttgtattttcgcgacaagattaccaagatcctccgtagatggtgtattttgataattgtgggaagaaacaatgatcttaaacttgtcaggcttctttccagctatggattgaatgaactcatgagcaaccttcacaaagaggaaataggatcactaaaacttaatcgtgctgccatactggtggaaatcagaagatgaaaactgtaacacaaactagcttccatgagtggttgacgtttattttagcttgcactgtatgtatgagagacgtatccactagaagtaaataacaaattattgcaaccactaataaaaaaaaaaaaaataaataaataaatcctattacaagttttactttttctgtcagtataagaaaactaagctttcgtatgtgctactattgagggtgttgcttacatatgaaaatgctgatgttacacttgctcttagagcttgtaagtgacaagtgaatgaaacaaagactcacataaaaccggggagaggattcttggacaatgccttcaaccatcagggagcattataaattccatgaaggaaatggacgccaatatcattctacaaagaactttctaataaagcaaaggatccatcaacataactaaagaccctgccaatatataaataatgaaatgacaggactgccaaatcaagtatctcatctagactcttgaggaaatttcttagattagctagcacattacaagcacaaatgatatccaccaaaagctacagacctcctgtctttaatataagtatatatccagcaattaccatggcttatgtaaactaacttcaaccgattgtacttctatacaagcatatgtgcatggatgtaatttctgaagtcaccaaatgaaaatatttatatgatgtttttaacaggaaacacatgccaacatgagatagttgtagattcaataaagaagtaacctgaagctcaacatcaatgaatcag

SEQ ID NO: 184623 - DNA, 3669 bp, Cannabis indica
cttttggtatgctagtctcttcttagcaattggatctaaagtttttttttcccatttttctttcattttagagacatttcaacataattagcacgagaaagaaattctatcattaattaagtatacaaaatcatataataggtattagatacataaactatattatgtttgtagctattatacataatcctaaagtaatattatctaacatgtgtgacatattattgtagttgatacaattagttttagtaaccaagaatgttcaattctaagtagtcattgtaattttattcggtactataattattttacatatataataatttaaaatgtaaataatattgtaaatgtaagaaaaaaaatagtcatgaaagatatactaagtaatataaattatatttcataactaattagtgatgaataaaataactcttgttataaatatgttatggatacttaatatctttttatggttttaagataatagctatttatgctcattaatcttaaattattgaagcataagtgactcatttatttaattattataagaataatatttgacatgtaagtcttttttgactcatttattattttaaaattatgatataaatatatattataattatgtaaaatgagtaatacattttttttataatttactcaagtcatattgtaaagttaaattaagttaagatattactaatacgtcatatataattataaaagatagtgaataaatttacattcttataatatattttaacgagtaactcgtgacttatttttataacttacttaaatcatattgtaaaatcaaattaaattattcaattactaatacattatatatatttaagaagataataccttgtgtatatataacgagtaactcacgattcatttacttacttaaatcatatcataaaattaaattgtatcagtcaatcgctattacattatatatattattcataaaaagtaacatataatttattttcttataatacgttttatatataaaacaattaactcgtgactcattttttataacttattttgatgagatttgtggggtctcatctcaaaattaattggtaatgagtgaagtagctcatgttcttatatatggttcaatacttttacatgtaatgcatgtgggacaatgttctccaatatctcccttcaagatggtggttatttttgctcgcaatcttgaatactagggatatagctctgataccatcagaatcatggggttccatttcaaaaccaattggtaatgagtggagtagcccatgttcttatatatagctcaatacttttacatttaatccaagtgggacagtgttctccaatatatttaaatcatatcgtaaaatcaaatttgagtccgtcaatcactgatacatcatatatattcataaaagatagctacaaatttactctcacagtatgtttcatttgaaaaaaaaacgaataactcgtgactcattttataacttctttaaatcatgttgtaaaatcaaatttgagtccgtcggtcaatgatacatcatatatattcataaaagataactacaaatttactctctcacaataggtttcatatgaaaaaaacgagtatctcgtgacttatttttgtaactctcgctcggcgaaaagataacggtaaatatttcatattaattagaaatggaaaatgaggaaaaaaacaggtcagcatacagtcaatatagaaagaaaaggagtaaggttcttggctggctctgaaagagatagataggtgacagactggcaatagccaagtcaagaacaacaacagaaaaagactctctctttatccttctccctctctctactctattctatataaataatattaataaaattgtaagtatgtcggtataaattttctttctttctccaaatttgtgccctgtattctagcttcaccagattctcattcagatagagacacaatgagtctatttggtcttggaagcaggtactttttgttgtcttctttggatttattctcaatcaaaccttagctatatttgttttttagtttcaatcttcatggattagtgattctgagttaaaccctttagtattattcttgattgaacaattgttttggtcctcacagaaaccagaaaacgtttcgtcctaagaagaatgctaccccaaggactaaggtcacctttacaactgttatttatttttgtttttatgtgttatatgtaatgaccattaatgaaatttaacagggagctcaacttcagaaacacattgattcaactttgggaaatgggaatttaagggaagtcattagacttcctcctggtgaagatagtaatgaatggctagctgtgaacagtaagatttaagatagaatttaaaacaagtatcattcatatatgttttttgttttgttttaacaactttgttttgtttgtgtttattactgtagctgtggacttttttaaccaagtgaacatcctgtatggtactctcactgagttctgcactgaaaccaattgtccagtcatgaatgctggaccagtgtaagtactcagagctatttacatatatattaatacaactggatttgatccttatttttgtacttttcattcttggtatatagatactcatataagtgggctgatggggtgaccataaaagagccaataaaggtctctgctccaaaatatgttgagctgttaatggattggattgaagttcaacttgatgatgagtcaacattccctcaaagattgggttagtaaactatttgccttaaagttagaaaacctcttttttttcttgtttacatcaatgatttttcctttataggtgttccttttccacccaatttcaaagaagtggtgaagacaatcttcaagagaatgtttcgtgtgtatgcacacatttaccatagccattttgagaagatactgagtttgaaagaagaagctcatctcaatacttgctttaagcactttattctctttactagggtaagttataattaagtgtttcattatattcttatttcttttcatatttttattagttgtttttatttatatttaattaatgcaggagttcaagttaattgacaaacgacagcttgagcctcttcacgaacttgtggagtctattcttcgacaatataataccagcatggatgaatgggaatgggaatgggaatgggaatgagatcaccctcaaattttgtggactttttttttaatttattttatttagttttgcaatttgggaacacattatatatgtgattttttgttggagtgtgggagtgaaatatatttttcttcttctctccagcaccaacaactcatcacttgcagttttttttgggagttagacattatcagaataataaaaataaatacaaagtcgcacaagtttttagattacaaagtatggtattggtgatggtgtgtatattctaatagtttacttgttcacgagagagccatgttttaaaaatacaaaaataaccgccaatatatataataagtcaaacaaacaacaacaaagaattatggaccaaaccaacaaattattataattgtaaaacgtggctatcaatattgttgattgtagtggtagaacacttctaaaatcaaagaaaaa

SEQ ID NO: 184624 - DNA, 1178 bp, Cannabis indica
agtcatatattgcctatggtatagcatataggtttagaaaaataattttaggattttttaagtatagaaaatcaaatttcccatttagagtatgtgcttggtaaaacttacaagtgtgactaggctgtccgagtattctgcacttttgctcctgttgttctgtctaccagtcacaatttccaacacaagcactccaaagctataaacgtcaactttttctgttaattggccatgagctaggtactctggagccatatatcctctataagcaaaaccaaaaatcatatgaggtttcagtacattttctaagatgaactatgttaatcttttcctaaaaaaggccaagagtaatactaataaagataaactcacaatgttcctgcaatggcggtactaatgtggctcttgtcttcttggaacgatctggctaacccgaaatcagcaatcttagcacgaagcctggaatctaagagaatattactggatttgatgtccctgtgaatgatcctgatgttgttgttctcatgaagataaactaaaccctctgcagtcccaacaatgatctcatatctcttctcccaatgcagtcctttgcctctagtttgatctaagaatttaattcaaaagtgttagaacatgttttttcagtgatcagagccatagtgaatatgaactgtgtcataccgaagataaaccggtcgagactcttgttaggcaaaaactcatacaccagaaggctttcaggaccagaacaactgcaacccaataacctgaccaagttcttgtgctccacagtgcttattatgttgacttcattgtagaaatctcctgctctatgtctgttgttaaagaaaagtctctttacagcaatctctcttccatcaggtaaaactccctgcaagttagtaaaattaattattacaaatttttttcaaggaaaaagcaattaaaaatggacaagttaccttataaactgatccaaaacctccttgtccaagcttgttattgtcatcaaatgattcagtagccttctctaatgtagaatacttgaaatttaagctactatcattcaacgttctcactaacttgttagcctcgtttgaacctaaaataccaaaaatttacacagaaaccaaaattatcaactaaggctaattttaatttttgcctcctgaatt

SEQ ID NO: 184625 - DNA, 3644 bp, Cannabis indica
ctgctacaaacgccttgatgactgcatagcgtaagtggatgctatttacatctaccgttttttttcttgctgtcttagttgcattcatcatttattactgttgagtatcattattctatttgtaattagggaactactagcatattatattgagagcgagacactttatttcttaatcaactttatgaccttatacattatctacttatttttaggatgtagaaaacaatccacagtatgctgaatctggcgtttactactcaaatttcgacaactgcaggtagaaacaaatttatgcagattattgatcagataacattatatttttgctttttgttccaccactgaaattggtttccattttcaataattgagtaatatttttttgttatgacagtctcgagcgttgggtatgattcgttctcatgtactgtctgtactcaaaagtgcgtcttcacaggtaaaataatgcaggggttgaattattggcctccattgttttgtactgttttgttgggttgatttctctgtttccttttggtcttaaatcaagtgctctatttgttacctaaaaaagaaaatgttctggtactatattggtattgtgtctcttcatcaggttcagtcagcaatccggagcaatagtagcagcaagacatcccttgcagagggtgttgaggcatctgttatatatgtccgtttcaaggcagcagcaagtgaggtactgtttcatttttggtcgaatgatgtcattgaataagtaggtgctataggaagcaaatcaaaatcctttcttgtgggatacattgggtggagtggatttctcaatttgagatattttgttttgccatgtctaacatacgaagttttgcagcttaagccagtgctgaaggaaattgaaagtagatcatcaagaaaagagtatattcagctacttgcagaatgtcacaaactttattgtgagcagaggctttccttggtgagctcatcattggttttttagtatatgacaaaggttcattgattctcttagtttactgttgctaacttgtatttgttttatttaacagattaaaggcatagtttaccaacgaatatctgagtttgcaaagaaggagtccttgccatctttgactagatctggatgcgcatatttaatgcaggtatgatattatatcttttgtcttagttgtaaacatgttaattcctttacctactaggaaggcataggacaaaaaatgtttatttcaaaaggaatgacattgacgatgtatgatttactttgatattagatttatacttaaaaaatccgtgattccatttacttagtaattgggtccttatttagaagggttagacttgtagtgatgcagactgtatgggtcctttggttgttatttattaatttatactctttctgtgtccttttattttatctttccttttttatgtgcgatttagatctagtaaaaaaaatatacaattactagatcaatttttagtttctcatccatttgacttcgttacttttgtaggtttgtcagcttgagcagcaactctttgatcattttttcccagcctcttcagaggacgtgtcaagtttggctccattgatagatcctttgtaagtattgagtttcttgataatgttattgaggcaatttctcatattagttactggtaactagaggttggaattttattttcaatgtgtttggagaaactgtatcaaagagaagggtttcttttaaatcagtaaatgagaactcccaagggaatataatgaacaaaaatgatcaaaaacagttctctctaagttctaattatttaagaattacatttgacattgtaaaaatatgtgcaatttttacctgaaagtcaaaattatatgaaacatgacactagcaaaacatgaggtcctatagttatcatttttcacgaaaatgccttgactcggtatgcaaagaaaattaaaactcactaaaacaagacactagcaagttcctacaattatcagtgtaactatatacagctctttattaattgatgttgtatattgcaggtctacatacttatatgatacattgcggccaaaactaattcacgaaacaaatattgattttctttgtgagcttgttgatattcttaaagtcgaagtcttgggggagcaacaaagcagacggagtgaatctttgtctggactacgtcctacattacagaggattcttgcagatgttcatgaaaggctgactttccgagcccgaacacatattcgtgatgaggtgatttttagtttaataaatttataatactattactaacttaactttatgttccaataactttttgtattttcattggggtttttatattttaatgttcacttgaatgtttttatcggaagggagtttgcaaattctaagaagcatttgaaaggtgtattgctatgtgggcaccataatggtgaccaacaccacttgattgcggcattttctaattaattaaatataatattgggtcttacatatgactaaataaaatgtaaatggttacatttaatggattaagtttatcttaataaaatatgtaggacacaatattaaatttattcaattagaaaatgcgcatcaagtggtgtcccatatcaatattcatttgaaatattagctttttggaaaaccattaatatggcacattcaaaattagaaaaatcaggaatttgtggtgtcattttaaggatgttaaaagggtagtacaaatggtgaggcatgtgatttgctctctcacaaagtatgaagttgagttcctcttgagcacttatatagaaattgccataatttcccggcctccaaatattgtaggggtagccaggaatcatagctttgaaagaaaaaaggataaggtagataatttgtgggattgaattaaatattaagtagtagctatctggttgtttagtataaagagataaaagggcttttgttttctgatctttctagagataggagctttcttatgcaaattattgtcggaattatttgtttttgacttgctgtattactattacttcataattaatgtaagtttctgtttttttctcttcgagttctacattgcagtaataaaattcattagatacataactgctcaatcaagttgaatgtgtaacatattgtggaagaaatttgattagttttatgttattttccagattgctaattatctgcctttaaacgaagacttggattaccctgctaagctggagcagtctgctgagaaaaaacctgaaacagcttctgtaaggcctctcaatcttcctttatgttcttgtctgtaaaaatatttcctatgtttcatttgaatatttatttataatttcattcaaggcagtgtttactgcttaagctaaagtcctaaatggaaatgtgttatatgcaatcaattaatggtataactttcattctgtggtcgacatgaaagtaggatgttgtatttaggggtcaacttagtcttgtcaaggactttagaagattgcagaacttttaggacgtggctcagcattttcaattttctatacctatatttgccaaatagtatatactgagatggaacatggtatggcatgcgagacttgttccttaatg

SEQ ID NO: 184626 - DNA, 6792 bp, Cannabis indica
aaaaaaagtaatgtaaaaacaaattgcattcatcaaacaatttttatttttgtttaaagtgatctgaataagacagaacatcgaagcaggaattccggccgacaagccaaaagtatacaacacggttattttgatatttcatattgtagggaataactgaatgtcatatattctatgaagtgtttctcagtttccaaatatttccaacagattaattctatgcaattttttagtaactatttatatatatattctcagttacatgacttattcctacaattgtcttgtattctcagttgaaaagtataaaactgtctctcgaaaggcttccttttccctctggcttttaccaaaaacttaagcatatacaacacaggttaaatgaaacaaaaatttcaaagggtgaaaaggtaggagaaaatgacctaataaagtataaggattcttgagtttcatcaagcaaatatatgatccaattatacatatatgagctattttcactgaggtccttgcgtaagtctctgcatctcattttggtcattgagagtttcaatgagaaggggaggagcgtattgtgcggtcccttggtgctcttccgagtcttggcagaaagaaagaatgatggtgtcgatggacatctccaccaccgcaaagaaaagagtggcgacgacataaccaaggccccaacaaacctgcatgaaacacaacacaaaataacaatgaaagaggtttaatttaaaaaacatatctgattttaatgaagaacaagtgacgtttagctattgatcataacataccagcacaggaaacagcggagaagagatcttgttgtgtgacgatctgtatttgtgagtatccagcatgaggaatgagaaaagagcgcttgagaggctaacacacagctttccaaggaataagatcacatctccaatcacattgactctccctattcgaagtatgttgttgataatcaaatctgtggcaatggaagatgacttgcagaagcttttacctgttatcgcaatctgcaaagacattaaaaagcatacaaagaattagaccaaatacttatataacaactaagtatttatggtggcatgaaattattattgccgtagaacataacatgtatatgggactctagtatatcccaaggacgatattggtgatggtgaagccaaacatcaatgcattcagaactaactacacaagtcatgactacaagtagaatttcttgaattaccatgatgtaggcattgcggttcactgatctgatggtccaatcaatacatcttaggcaaaacttggaaatatggaatgccactcttccaaaccaattatcaggcgaggtgccagcaactttcagtttccgacgaattgattcaagcataaaacggattgattccacgaatgacagaatcagggagccaagagcaactgacccgaggccgtaccttataagccgcttcatggaggaaaagactggaagaaatggaatttctggctgcgtatagaataattacaataagcatatgatgagaaaagcaatgcactttaatgaaatagtatttaatatctcaaacaattcatctagcagttgcaaacttgcaagaaggaaaaaaacttcatcttgcagagactattatatccaaattatgagaagatattatatccaaacaaagttcctcttacaaaaagtcaatcacatacaacttttgagacctcagatggaccaggtaaattaaaatccaggccacttcattgctatttcaacaattcaaccaacccacattacaaagaagaggttaactgaggcttaggcctcactatttcaggcacccaaaaagggaacgtctcaaggctacagtctcactttttggattgttcaaagtgttgaacctaacaaaaatagcttaaataacaattatattatttatgttaattgaattttctaaatactgggcctaacaatagtgcctcttctagcaatttattcctaaaatcctagtactggttttgatagatactagtgcttcgaagtttacagttcaaaaataaagatatttaatgtaggatttgaggcttacgcctcacctcaccaggacaaaatgcgtcgggtgaggattaaatgacacacataggacctgacgaattctataacaaactggtggaaaaacaattggaagaattaaatgtccccatgctaagttatacatatttcagtgtcatgcaattaacccagtcttagatattctcccatatgataataccacattacagtggccatctctggtctaaaaatatatattttcttaagttcttgtcatccaaataaaaattaaataattataaacagaaccacaacacatgtcattgatgttaatataaatacatatttcttcagaacttactgatgtttcaccacgagcccaatagtaagaagctactgaacccgcaatcactgttgaggagcatgctataaaaaactgtgtagcccaatatcccccgaataagtggaaaagaatggcaactccaatatgaggagtgtaatgaatgctgtaaccgcagcaacgatcacagttgacctttcttgacacgagatcatatgcacagcagttggagttacagttattctggaggacctcacccgaactgaacagatggaaggcagcagaaaaccaaaacatgtaaaaaattgcaaggatggcatatggtatgactggaaaaattatgagcgcttgaacttctccaatgacctttgcagcaacctgtaatatcaatatttatgttatagaagaatctaacaaattaattagtaaatgaaatgaaaaaatccaggtcagtgattcagtttgtcagaatcgatgaaattgatttaaaggacaagcaggtgtgtcaagaatccaatatgcatgatgaaaatatatttatctttttcctcttgatagtggtattaagaagtttacaatttcctatgaatgttaacaattcaatcaaattcttagagagatttttccatctgtgaaaagtaattgcctcatcttggggaaacatcacttgatagttgaccctggcagattgtaataacaaagtctctttgatacacggctacaagaaaataagacatccttctataaatctagatattcacaactacaaaaacaagatatccttttataaatccagagttctccgatttcgatgaaggtttggtagctagctaactttgattaataagtagattttttccttcctttccataaattaatgctttgtcacagaatgcacatttatttgaagtatatcatacttgccttaagaacagatgttgccataaggatacggcggactatagcaattgatgtaagaacagcaacaaccataacaaaagtcataagaacagtaacaccacgaagttgatttagctcctgaaagcacaaaaaatgtaagaagcaatgtataggcagatttcagggttgagggttaggctaatgatggtacctacccttgcagacacatggacataaggatcatggggaccgataatgggagtgatggcatcatttccaatccatccagctagaaagcaagggagatcaaattcagcatttatgtttaaagaaaaacatttccacagtaagcatacatgatagagaacaattattattcaaagcccaatgcttgactctaatacaagcatcagaaagtacaacaagacctgggaatgtgccagtaaccgcattaacaaggcctcaaaaagctactcaccttttaaataataaaacatagtgactgatattatgagaatattaaagaggacaactgttatccaaggcattgcagcaacaaaatgccgaatcatcagaagccaaatcaccgacaaaaacagaggcaagattgctccacaaactattagcactggccatgattttccaatatcagccatgtacctctgcaaataagttgtaacacatgaatatacatttgaaaactagatacatatcaggcaaataagcttatttatcagtgtcttatcaaacaaataattttgtgtccatcatccactaattaatcaagtttccattttggggaatcagagagagaccatatatttttcgtctaaataataccatgatgaatgacatttatgtctggttcacttcattgccttagaagtagataggccacagacagggtttgtcttataaagataactataagataaacctaaaatatgttgttatcaacaatagtagttcatactcagagaaaagcataggaatttaataccctaccattaacctaattgatctcaaatcttgaatcagttaggttggtcgacaacatctataggaaaacataacaaaatcaactgtatttggaaaagtccttgcatgttaagaagttttatttatatatttccctgttaattataaattagtaacaagctaaaagcagagaccatactacaaaattttcatatattgaaagactaagacattttctctaagaattcaaagcattataattttttaacaataaaaatatactaaataaccataagataaatcacctttaaaacagatgactgagaattgatggatctgtgaatggatttatctataacaatgtcctcattgatgcgcactccgcccatttgctgccaatgcctcatagacatgtttgatgaacgtgcaataaattggcagctccagtaaactggaaaagggaaagatttgtttagtaacattttataatgcagacataaaaaatgaatttacaaactgaacaggaaacagaagataacattttcttgcataaactgaaaaagaaatgtctgtgtaatgctatataatgcaaaaatcatcaatcaaacaaacaaacagggagcttctcatgcataaagcacaattacacagaatgaaaaaatcccttggcaacaaaacagtaatcatagcgaatccacttaccattgacactcggaaatatgataggataacaaggaccctgaagctgaagagagctgtttctcatttcaggtgtgagaaactcaaaataatcatagtttctatcaatccaatcgttcattgagaggcggatatctccttctggataatcacacacccaatttagtgcatcatcagaagggataggacaatccaataagcatatagttcttgcattggttaactcaaagtcactgtctttcaaaccactttgatagacctggttaggatttaaccaatatttaagttcaagctgatgaagaccaggtttcgcatgcttgtccccacaaacatttcctttgtagtccagcccataggtgagcctggttaatcacagtactataggtcacaatgttgatgaagaaaaaaatctttagcaatcatgtggtaacatcgatcaggaagtgaacatttaattttttttccaaacaccaacagagtcacagaaaattgcattgacagttgagcaaaaataacaaaatcacacgaacaacatgcataaaccaagctaagaagtgagcttatcctctctttctcccttgagttgctccatacaataaaatgaagaaaacaaattgagtcccaagaaaaggtataggatgtatgatagagtttgttagacttaatggaggtgagataatagtttttggcatatcataggagcaaaaagtagttctttttctcacgcatcttatcgaaacaaacgtattatcaaaaatactaacaagggcatcactatcaggctaaaaaaatgaagaaaatactaaaaatgcagctattaagcaagtgcaggttaaagaaacttaaaaccttgtagcttttcatcaagtaaatgaataaagcttctcattctcactttctcagtaccaaacaaacattaaacacaaaacccaatttttcgtttccattaatccagtggatctctacagaaataggaaaatgcaagactcgaaaagagggtaagtcagacatgagcactctttgttgtaacagttaagctaaagtgataaatatagaaaagaaggaaaaacaatgacagacccagaacaaggattagaggtacatgagctaacaaagaaacttatttaagagaaattaatcattaccataaaaatcatataaaacccaaacttaagaaaaataaaggtaggcatttgtagcaaaaagaagagagaagaaatggggtagtttcaagattcttaccttaaagggtttcctttgttgaatccaaagctggagttaacaatcatagcaacccagaaagatataaagatcacaagaaaaacaatatccctacatttcctgttatgactaatgattccacccatttgagtaccatcacttgatgggtatcttccaatgactgcacctaaaggacccctcattttttcactcacacactgctaaactatcaatcgtcttcttcagtagactagagagagaaaaagctaaattctttgaagaaacagagtgccttttgggaagagaagaagaaagaaagaagagagaggaaaaataaaaaagcagtagtagagtagagtagaaagaagaagagtgtgaaaagtttaaggagagggttttaagatttggaatatttttaagactttggttttaggctctattttattattttctctttaaacaaagatagtaacacaacactagttgcttggcttacagaatccatgtctggtggcttcagatttagatatgtacaccattggcttggcttacaggctcatcaacccaattgaccaatgtcatacttttcttttaattataatat

SEQ ID NO: 184627 - DNA, 4265 bp, Cannabis indica
aggagcttgtttcaaatcatagatggctttgtgaagatgacacacatgagttggtctgtcaggatcctcaaaaccctttggttgcctcatataaactgtctcatgcaaatcaccattcaagaaggcattgctaacatccaactgtttgactggccaattggaggtgacagcaagagagagaattgtcctaacagtaataggtttgaccactgggctaaaggtttcttcataatcaatgccaggtgtttgaagatatccttttgctactaatcttgacttatatgtattgagagacccatcaacattaagcttaattctgtagacccacttgttgtcaataacatgcatatcaggatgatatggaacaagagtccaagtgttagatcttatcaaggctgtattctctctttgcatagactgaaaccatttgggatctttaagagcttgttgaagtgatttcggctcagttggaaggagagattcctttaaaggatgtctagtagccaagtaagcctttggtttgtaaataccactttgagacctggttttcatatgatgtattcgagatacaatggtagaagtgattggtggtggagtctgcacatcagaattggaagtgataacaggagctgcagatgcaatggtgttactggcatctgatgtaaaaggacctgtagaaacaggttgttgcactactgaaatgggactagaagcaggttgagtgactggtgcaatggacagggatatatttggctggtgtatgtcttgctgggatgtcattattgctggggtgtttgtgttttggacagcaatcgattggtgaatatctgaagtggttggttgtggttctggtatgggaggctgatctgaagtatttgggacaggtataataggtgcagaacctcgggtagatatgggaggttgggggtgttgtgtttggatgttgggtgaggcagtatcagtagtagaacaactagtaaaggtaggtgcatccgcattatcattagaaaaagaagaagtaggaaataatgatgatggagatgcgtgtacctgatgtgtataggaactgatgtgagctggaaaatggccttcatcaaataccacatttcgggctatgtatatccttccattggaattttcacaaatataacctttgtggtgagatgaataaccaagaaacagacattgatcagatatgtaatcaagtttatgaatgttgtatggcctcaagtgcggaaaacaagcacatccaaacggctttaggatcttataatttggtggactaccgaaaagacattcatatggacttttaaatccaagaacatcacttggaagtctattgattgtaaacacggcactttgaaaagcataccaccaatatataaagacaaaccagcttgagcaagaaacaccaaaccggtttcagttatatgccggtgctttctttcagctcttccattttgttcatgttcatgtggacaaggatgctgaaaatggtcccttgatcaattaaaaatctagcaaatggtctatattcccccacccccccccaattggattggacacgtttgatgggcaaattcaattgtttttctgccttacttttaaatttaataaagacatcaaatgcttgggatttaagagtcaaaggataaatccatgtgtatctagtatgatcatctataaagtggatggaatattgataaccctctttagaaaagccttgagaaggaccccaaaggtcagtatgaatcaactctagaggttgtgaggcatgactagtagacataggataaggttgtttgtgactcttgcctttttgacaggcaatacaaaagtgcagatcttttaaggtgccagaatggggaagagtttttaaaattctgcttaatattgcaggtgatgggtgccctagtttttggtgccaaatgttaatatcttggtgtgaagtagtagagaaaacagtaggaaaacaatgtgagatatactcaaaatcatttgcttaataatgttgggtatagtacatgactctactggtatagcagtagatttattacaatcttgaggaatactaggaatactaggaatgctatacaattgagacatagtagcaagattgcattgcaatgcaggggcagaagggttggaatcaccaagcacatagaggccatctttaactggtcccttgagaagaacagctcctgtgagtttgtccttgacaaaacaacaatgtttgtgaaactcaagatagacatcattatcatgtgttagcttagagacactaactaaattcgttttcatggtaggaacattaataatagatcttaagtgtaaaggatgtgaactatgtggggataaaagagtggaccctatgtgagtgatgaataattgcttaccatcaccaacagccaaggactcggttccattgtagggagtgagattgtcaaggttttcatatccatttgtcacatgaacattagctcctgtatcaataaaccagagattatcatcaccaaagtcaggtaaaatagtggtgttatatacttgactgtcattgtccatttccacttcagcaaggtatgcccaaggtgatgcagcacttggtttcaggggaacaaagttcttgtcaaatctgtagttgcacacagcagcagtgtgtccacttttgaggcacaattgacacatcaaacggttctgaaatggaccacgatagccaactctgccaacaattcttgaatatgggtcactggcatttcctcgagcaggtggagggatgtatctgcctgtgttagttcgattattaccaagagccagattggcttgaagcctcatggaagtatcagttatggtgctgtgatgctcaagtcggctctcatgagacatgagaagagcctgaacctcatcaagagataaagaatcacttcttgatgtgattatgaaaatgacaggatcaaattcagcacctagaccattcaaaatctgaagaatcacatcttgatcacagttgtggtgagctttcatttggagaattacattgttgtgttgaatttttatgtcaaattttttcaaaattttctaagcatgattgaaacattctgtttgagttggtttttgctatgtttagctattaaggagtgattttcagagttctttaatgcactttccaaacatgtggtaagatggttgttaacacaaatagttgagaaaattttcaagcttaaagttttccattttttttttgaacaaaatgcctctttatatagagtttggtgaccccttttgtctcataaaatcattaaaagaatatagatatgaacattttcgagtaattgaaaataatacacttttaatgcaaaattagaaacgatagcacacagctggagcatttcatatgttttccaatctcctttatgatgttttgactttatcacatgaagaagatttgccgagtgggagccatgtgtgcgtgaaatggagcattaatgtctttgattcaatccaatttacaaggaaacaaagtaagcacatgttggtctaagccaaatgaattgagcttcatttttgggcttccttctcttttgccatttcatttatttcttctacaattttggcactttttctacaaaaatgacataaattaaattcaaatcgaattccaatatataaatataacacaataattttatgaaaatattaatttaaactcaattcattttgcactttaagatcaataaaatgacatttttgaacacgaatcaatcactaatgttagacccagcaatagtcaaagaatcagcaagcatctgaaatttatccacgtaatcagctatggagagattgcctttatgaacattagagaactgacctttcaattgaagcagtcgagcacgagattgattagcaaatctttgctccaaggcacgccagacagcaaacgatgtgtggtgattagcgaccgaggcaagaactccttcagtcatggaggatcgaagccatgaaagaagcagttgataaagaactagaaaatggattccaaacaggggtgctggaattggaagaatttgcagacatggcagggtgagtagcagtaacagtggaaggtgtaggattgggagatggaatcgatgactccatgggagacttctactaccatgtggaagcttagcaagctaacaagaattggtatgaaccaaaaacaagtaaagactgagagagagagagagagagagagagagagagagagagagagagagagagagagagag

SEQ ID NO: 184628 - DNA, 3775 bp, Cannabis indica
attaccaaaagccacatatattaacaggaatcttacaataatttacactatcaaaatcagtcaataatatgaaagcaaacaggtgaaaacctaggaatcgtacaattaaacattaaagaacaaaagaaattgatgttagctcatcaactaaaaattaagtttctctttgcataatttcataaatctacctataattcataccatgggagaattttcagctaactcatcaactaaaatttgaaatattcagtttatatcatataataaataattagactgctgattctccaagtagatactatggagtagacatatgaaagctagataaaagtagaattctaacaaaagatattagaaaaaaaaccagctaaattttactataatgcggaaaaatagtgaaacatctgggggtatatcatcaccaattagtaagataagtaactaaagcatgataaagaattccacaaagattgagcgagaataatacaaaaccaaataccttggagtacagctgcgtccaagatgtagttgacaaacgcttcatggaaccaacctttgacactggaacttttccatgtaaacattggatagaagtgttatcaagaggactgcacaggtcattaaaatttaagtcactgaaaaatgttcacaaatacacaaagataatgtcatttccaaagaaaagctatacagaaatgcgtagacctgaaacatattagacacaaattgagaaaagctatacagaaatgcgtagacactgaaacatataaaacacaaatagagatgcaggatgcttatgttgggaaacttagcatatcatgaaaacaagcaagagttttctgagacacctaaaactttaagggcagacttgaaaactattaagattcaccaagagacatacagcaaatttgcattcaagaaagaaagaaataaaaatttgaagaatgaatgcaaccatctctaatttacatttaacaaaaatagatcttacggggcagtaatgttgtcagcccattgacgaagccaatctgcagaaatccagcaaaatggttcttcgagtgatttaacaggggcctcagacaaaatagatcgaacttcctgctttctttctgaaatacagttcagctccatttccttctttgatgtgtattgtacacaagcatcagcacatgatgcattcaacttttctacctcttcagaaagatgggaaggcagagaaacaccatgatgcaaggaagtcacatttccatctatttccatatcattagcaccacaaactgcaggacatttaccattctcctttctaccacacctgagattatacatcaacatatatgcatcacttgaagaaaatgtccctacatgaccaccactactagaactaggatcataagattcttgctgaactacatccttatgattgccattggcaacatcactcattagttctgtactggtgggattcacgaaaggctcagttttagcaggcctgtgactatttgaagaaccttctccaaatggatgatgacctaagtttgagacatgctcatcgtcaaactcccaccattgccctgtattttcatccttaatatgagctatataatggccactgttaactgcagtacccttgtgaatcagcacagccgagagatcatagattgattcagtctgagtaggctcagataccctatgatgcatgtctaattctccagggaaactaaatacagaagtgattttcttcttcatagtggtctactgacacaaatcaacaacagcagaaaataccacaaaaacattatgccaaaatacttgtaatgatacatacaataagtaaaattattctaataataacctcaactccattaaaaagggaagacatacaaaactaatagaaaaattagttgtgtcaattttagctttgacatgtagcaaattacactagcaattatcaaacacagactacagcatatattgactaacatatgattccaaaagaagtgatagtaccttcggaacaaacacacatcgcttgagctgaaaatttagtacaggtggcaatgtccgcagcttgatgctacgagtagcattaactcttgttttacaagactcgcagtaatattgattatctccatgtagctcttctacactaagataatcatccaagctattatctaaacttttcaaacccttcacattcagctctagctcataaaagtcttgcatatttgaagatgcttcagaatcctgtccacattgagagcacctacaaaagaaaataaacaatagagtaaaatgcataacctttacccgcagaatatacaacttaattttttttagaataaagtagctatgcatgataaggtgaaggtatatttagaacgagaaaacagatgtaaattatcctgttagaatccaagaatataacaagaaaattcaaattcaatgaagagcaagccatcaacagaatgccatagtaaccatacatagaaaattaaaaccagatcctatcttacgttgtcacatgagacacagttccacgaaaaagatcttggacaacagttcttgccttggaaaccttagaatggttaagacaacgctcaagcaacgaaagaagcaatgtcaaaaactcatggctatcttgttgaactccattatccaactcaagtgttttaacaaatggagaagagtcgataaaagccattttactggcatgtaactgagcgaaaagtcgtgctagctgctctaacactggctgttttttcaaaagatctggttcagctgaaaatatgcctccacggaaagatttattcatatacaaacactggagtatgctgttggcatagcatgttgcgccgagatttgtaagtcctgagggagaatcagcagaagcacgaagatcagtggatgggtctggaccaagagcctgaatgatgtctgatgtcttctgccacaaccccacttttcggcttccatttagagggggaattagcccacaaaagcagttaggattatcttttgtattcacacggcatccttgacaaactggtttccaaattttataaagcttggtgacatcctcatcagtaatttcaccggtcatgtggatcttcctacagaacaacccaacaaaggatcaattaatacatatgtccgccaacaaatataatcaaaatcacacagcgccaagttctggctgcaacctcaataattctgaagagatgtcaacatcatccccttgcttgtgtcttttatttttactccgcgttgttggtctgctcatcttaacaaccagatgaccctgcagtgtccatgaacatcaaaagtttaagagagtcaagttagaaccaaaaataaatacatatacaaaataatcaataacaatatacacttcaagccaaaagaaaaaaatatataaaaaacagagccacttacctaaaaatctcttctttttacttatcagacgaaaaaaaaaaatcattgctttttaatatgaagtcaagtttgtcttctttattttctttccctcaatgtaacaatacagaatctaaaaagttatggaggctttcacattcaacacaaagctctgaatgtaagactttcaaatttacagaaatttcaagttcatagactttaactaacacacagaacaaaacaaataactcaatactcataatagtattcaataatactcatgaagaagacccaaattcaactgaaacctgtcgaatattaatccatactttcattgctcatctcaatagaaaaagaaaaagaa

SEQ ID NO: 184629 - DNA, 3418 bp, Cannabis indica
ataattctcaacatttcaaataccaaaataaaaactatataaacaaggatttgtaggtggtgcttttccttcagtgctaccatcttattttcatgatgcataatgacctctgagttatggcacaaaacattcgagattttacacttgaaacagaacaggaattaagccgaacaagtcaaatgaataatgaattctgtttccgccccagaatatatcagatacatcaatcttcatcaaatctatttgctaaaaacaagataacttagacttacttgtgcatatctatccaggttactccaggtttcattgtagatatgaccgcatcatgagaatcgaggacagcctaagaatggagatagtaaaaagaatttactgtaaaaacactaaaaattaatgctcaacattgaaaatattaaatcaactacagtctcatctactcctctttattgtggaaacaccaaaataggcaaaaagagaaataaacacttacattgtatataagtgattgatcagaggaaaatttaccattcacctgcacataaagaataaaaaaatctcggggtaaaaaattcatcatgtagaactagaaattgcccaagtacaataagaaaggacatttcctaattttaacatctcaggaatttctatttttgatttcagcattgaaaccagcgtttcacaattcaactaacaaaaattacagaaatactcactggataagaacaagttatgtcagagccataaaagtgatattcagctcccatatcaagcaaagccatatccccatcattcaaagtctgcaaccaaggacaatgtgattactagaaaaccacaaagaggtaatcatacttcaagaatgattttgttgtaccctatcgttcggagctgctgcatgcccataatggagaacagcactgtaacaaaatattactgccgttaaacaaattttgacttgaagtacatgccttacagaaacactcatgaatggaagtgagaaatctatatcttgataaattggaaaataagtatatttctcgtggcttacagggaaaaaaaaattactattaaaaaaaagtatacctgttcccaccagtagcacatatgcatgtgtaagaacagtgcctacagccaccatacatgtaggtgtgatgaagaaatatgctttctaactgatactctttcatgcctaccctaacttttctcatgacctgctcagaacattttgaatttattacacattttaacaccggaccaggaaacatttgaagtttagatacttgaaacttgagaaaaacaaatacagaatcaagatgtggacaatcatgaagtcactaattactatctacttattctttgaggcattggcatagttcctctggtttccaaattttccccaaacctctagttagtggatttgaggtccaaactaaaacctctgccaaaccaaatcaatctttgggagcattacactttgttataatttgaacccaaaaaggctgggcagtttgtaaaaggttaccttgacatgagcctcagaacttatgtcattagcaaactggataacagaaagctccaggtctgattttaaaacacggcattcagtcaaaattggatgcaaagtagtcaaatcagtttcaaacttatctatcccctgcaaagagcatataaaattttaataagcattctgaactgtaacagagtaaacctatatattgttgcacacacttattcttctttttttgtttaacttgaactcataaccactcatacacactattcaactacttgacctagccagtgtccagtatgatatcaatgtggagtgaccataatttgatagaacagaaaacctgtactgtacataatcttagtatatgttaaaagttcatattcgtgtgtaagaccaaacaggcaagctctatctacatccctatccccaatcaagccttacaaacactgaaggcccggggtatcatgtaacaaaaagataaataggttatgatgtgaacaaaataaatgagtacaaagaaagaggaacctcaaattctgctcgttttgagaagttattactatcagtattcagtccatgaaagaggaacaatagaggtttactggatccctgaaattcatcttgtaacacttgtacaatctcatcagtatagtatgccatgtcaaccttatatttttcctacaagtaacgaacatatatatgagaaaataaatagctatcttgccttagacaaaatcaaatatgaagcattcaatcaccttgaagtgaactaaaggttttatctctcccaaccaaacagcataatcagcaggtaacctaggagcgaatagaatcgattttcctgatgcaatatccttcagggacaaaagaaatatatcaaaatctgtaagtaaccacgtttcagtagcttatcgaaagtatcataaacaccataagtggataaatacagtgaagtaacccaaccaatcccattccaaaagaaaggaaagtaatatgatcatacaaacaagcaatttaagacaataaattacatcaaagagagcaaaaggatccattttcccataaaaaaacttactaaagctccataaaaaccaggctcaaccactccaaacaagtaagcaaagttactctcctgcctacacatcaaacgacatatcagattgttagtacataatacgtttaccaattagccatccaatcttaaaaaacaaacacacataaataaattttataattgagataatccaaacaaaagaaaatacaaaacaatatataaataatttgcaaatgtgttttttatataaatattggttacctgaagagttcgaggtgatcagtatcatgccgagtttgctcctcaccaccctgtgaacgaaaataataatcagacataaaatctactgataaatcaggatttagaaaatacgttcatacacacacacacacacatacatattgaattacatagggaagagggagaatttacctggagaaaaacgaagccatggagtgggcgagaagagtgagaaaggtggtgatgaaaagagtcgataagcttttcccgattattgacgtgaagctccataggtaccggaagaggagagagtcgggacggcgaagccatcgtaaatggtgtccttggtttcgccgtagtcgtgaccgtataaaagtccgaaacgaatacttaccttctcttaacaaaattctgtcccaaaatgacagctttcggtcacatgcgtaaccacgaggcccagctcagttgtttgatctattgggcctattctacattcaagtagcccaaacgcgtcctgcaattcaaagcccaagcctacactaccttcaaagtcaccaaagtaagtaaaaaaaattagagaaattatactccataccttttttatattattctct

SEQ ID NO: 184630 - DNA, 3876 bp, Cannabis indica
ttgctattttagatttagtcaagaacttttctatttgtcagtttttctttgttaatcgtaatggtttgtcttttgttgatggtttggcaaaacttgctataatttctagcaatggtgctgaatgtttccaaggggagggaattccccctgtgattcccatctatccttctctttaatgagctgtttgttcttccaaaaaaagatgagctcttttagctcaaattttaaagtatactacaatacttctgtacatatagaaagaattatttattcttcaaataatgttttattcaaactttatcgatatgtattttatatactaagtattagtaattgctattatttaattattaatttaaataataataataaaaattaaatatatacaatttaattatacttttaatatatataattttaatctagttttaaatttatttataatatctaaataaaataagcaaataaatttatatattttaatcaatataactaataaatttatcagttatctaattcaaatttaaattaagatttatttaaaaaaataagttattttttttatacttttaaataattaaagatattttaataaataaattaaatataaatattttttttcaaaaaaataataattaattgattgatttaaaggtgtgagctttaatcgttaactttaatagaaaaataataataaaaaactattaaattaaatatttcattagatagcaacatttaatataaaggagtcattaaaataaaaataattgaaatgaatgtagagaaaaaaaaataaagaaacagatgtatggtgtaatgtaaaataaagaaagtaaagttttagtgaagtattttaaaatatagaatagagaatctgatgtgagtgctcttagtattttttattatatgattactagtgctaaaaatctaccaactgaaatattactcaaacgagcaagcaaattcttacaatattgaataagataaccacacaaagataacatattaaatgaactccccaaaacttgcacaacacaaaagcagttcttctccaagcaaacctgctgccattgtttgtcattaatccagcctaaggcttctcaaactcctatggcctcgactagcacaagctccaccgacacgaagaagtgcatagtgcaaccttctaaaagtatacctcgagaatctctagtcaccatcctcacgccataggaccgctcccctcaaacaaagatgcatccatatttctattatttttgttaaacgaccaactaatgtagtagattataatgttagaagtcatcacctcctctaaacttctagaaatttctagttattacatatttgttagttaatttaagacaaagcccattgtaattaccaaagattagtagaaaagtctagataaatgtaagaaatgagtagaaaataattttctagaaatttttagaaacaatagtcactagatgtttctagttatttgggacaagcccaatgctagaattctctagcaaattgaagaggcttcatcaaccaaccatgaggcactataaatagacccttggtctcatggatgtgggtgcacaaaacaagtgaagtcttagtgtgtgctaagttatctatacacaagtgtgtgtgtgttcttaataagtgtctaaatacaaagtgtcccaaaagtgtgagttatatacaagtgtgtagtaaaggtgtctagtgattaaattaaagagtaagtgtttggtgtattgtggtctaataaaaaagtgttcaagtcttggtgtaattactttttcaataataaagtaattacgttttcacgtgttgtggtgtccaacaagtggtatcagagccggatcgagttcgttccgaaagagtcctttgttgagtttcttagagtgatcgtgtgtggtttagtactatagagtttgcacgatgggtgaccttcaagtggtcggcggaattaagaaacttaacaaccaaaattacaacacgtggtcgatgcacatggaggcatatctccaaggccaagacttatgggagatcgttggtggaaatgaagtcacacaaccagaggatgcatccgctttaaagaaatggaagattaaagcgggcaaagccacgtttgcgattcggaccacagttaaagatgagatgttggagcacatcaggccggcgaagacaccgaaggaagcatgggatacttttgcatcgctgttcaccaagaagaatgatacaagattgcagcttctggagaatgagcttctcttaaattacaaggaagccaaaacgataaggttttcattttgggtatctccaagtggtatttgatttcatgaagctaatacaattaattaagctcaaaatcaataccactacaataacaatacaaaaattactaccaccattaatgaaattaaaacaaattaactcttgcatagagtatcatcttgagaactaaacccaaaaaatataataaaaaacaaaagtgaaatcccagcccagcgagatccgacctctgcccacatctgcgagctccaccctgacgacaacgatgaaccccaaccatggttcacatacagagaaaatagacagatctacatatgttagtttttactgcgattttcagaaaccgattaaaatgagagttgagggattaattaaattaatataaagtagagatggaaattttttcgtggttcaggtattaatgaaccttagtccacgagtaatttgtatttggccgaatggccttgatgtattacagtgggatttcacaagttcaagaaccctaatttcttgctatggtattttcacaatgattttacacactctttacatgagggtatagtatagtatttataggctaggaaccagatccgagttcacctgtggcccagtaaggtttttgtgtcaactaggctcactaatagggtaaatacaataaataagtgattatgggcccattttttgaggtctagttcgtggggcagaggtgattcgtacatttggaaaccacacggtccttaacagataccctatgtgcgccgttctcatgtactgtaatgttagatttgtgccgtcaaataaaggagtggtttccttttagtggtgcactcactcttatgctttaacataagggacacacttctaatcctgtgggattgggtgtcagagggtcgcttcttcatcttgcaccaggcttttgaggcgcctcttgggatgctctttttggatgtatcccagaattcatccagaaggttacaatcacttatctcgggaggccttctaggatccagatcatccccattttggaggggcatcctctgggctttggatgggcttgggtccatctttccatttaggctggatatgtccttacagcaagacttttgggccagaaaattataggctgatctttagtcggaaacgccatgcgtcaccctttcaaaaatgccaataacagttagaaataataaaaaagtggttcagggaagaagaacagaaggcaaataagccatgggctgaccgaggtgctcaccggagcatcacattatcgatttggctagaggaaacgggaggagggtgagagaaacagccgctgaaggttttcgacgacgggaaaggccatggtgacctttacttgggttgtcgccgactgatagaggctcaccctgagctagtctcggcaccgtaccaacagatcgagagaaagagagaaagaaggaacgagtgaggaaagagaaagagatataaaatagaatttttgactaaggcttttatattattcttaaatattaattttttttaagttaaattatttgttttaaaaagtcagatccatgtcgtcattaatgtttatagaagtaaaaaaaaaaa

SEQ ID NO: 184631 - DNA, 5195 bp, Cannabis indica
tcattgagtctagacaaaaacatatattataagttacttctaaatattcatttaataaattcaaaacagaatctgataaaattaaataaaaattatagttttataaatatttagtaatcatatattaaaaataaatattaaacttatattgtttagaaatttaaatttgtagtatttatatggctatttatctatatattgaaaaatgaaagtgttgattttgtgaaaaatccaattaaatttgaacccaagtggcataaattgtagtcagaaagtacttatacagatacaaatacagacaaagatacttttcaagtttcaaacttggaactattcttatcttcacccatcattttatttttattatttttggctcaatggactcttttcctttttaaagagattaatattttattaaatgcatataaacaccaaacaaagatgtgaaatttggatttgtgtgcttcatattacttccattcttatagaactttgttgagatttggtcctcatttttgttaggtttttcttttgctattacacttgtttttgtttggtttctaacttgtttaaaaccaaagatttaaaggttatattcaagagttaaaaagtagagtaaatactattttaaaattgtattttgtaataattatcgattagattatctattttgttaaatgataatttagaccatgtatttataaaaatagtacaaaatagaccataagtttaattttggtcaaattaaaacatagtaataatttaagctagaagtgttattaccatattggttacaattgttgcatctgttcgtgttagatattgattttcagttgattatattaaaaacataaatcgttaaaaattgagttcaggatctatattgtactattttgaaaaatataaaatataaattttcatttaacaaaataaaatatttaattagtaaactcttacaaaatacaaggttcaaaatagtatttacccttaaaagtttatatacatgtatatataatagggttatttacagcgaaacattcttatattttgattttttacacttaacttctctattttttttttttgtgacaaaacctctttatatttacttttctttgtaaatttaaggtatcaactggatattacaattaaatatcaactggattattactatattgtcttcgaaatttttattaatttttacgtatatacacgtgtatacagtgattgtctagttagtgtttaacagtgatatttaattgacatctcaaatttgtaaacaaaagtaaacttaaagaagtttacaataaaaaaaaataaagaggttaaatatataaaaattaaatagatttgccaacttactctatttaatatacttaaatttagagatgttggtcattcttggacagaaatgcgagacttttgggagggtttggtaattcttaaacaaaataagaccttttcaaaaaaagttggagacattcctatagttcaaagataaagtttacacactttggaaaatttgaggtttattaaagaactttgtatacacaatgggaaacacatattagttgagagaataaataggcttagagattgttcaaaaagttgatttgtacatttgtaactctttgaaggattagcaagattgattaaggtaacttttgaccaaaatatatttgagttcttcaaactctattaatgataatgtggtggaaagtctcactgttaaatatatttgacttgattaaggtgactagtaagattgttcaaagagttagattagtgttaatttatgatcaaaataatcccatatgaaaatgctacttgggttaaagaaagaaactttgatttctgatttttttttgtaaatatttgctaattgaacaactaacttaactaactttgatttgatcactgcaaaaagtgcaacctttcactctaatatgatgtaaatatagattatatatattcataagtaatgtaaaacaaaactgagtcccaaagaagaaaacataaactagaaagcctctttctttgttttttgttatatcttgcttctcatcctcacaagcttggccaaagtttcttgagcagccaaagtgtgagcatggttatgaccaagcatcacagtcctaatactaatacatgttctacaaagctcttctccactgtcaaaatggcctcctctcatcaacaatttcgcccttgtctcgagcagggtagccttaagcagtgtcacatcttgccacacgtactcgtccaccctctgattgttactaccgccgccttttaacttgttcttccaacacaacgagccgtggcaccagtcttgaatctgtgacacaaaagacttctctacttcttctagcacattggtgcaaacctttaagagctctagagccgagttgcatcttgagaacgtggtgaatgctcttatggcgagcggtagagctgttcttttgatgtataaaaccatgtcaatcgccttgagttggactaatggaggctctgatttgaatccaaacacaagaaatgctgaaccccatagatgatcagagttcagtaaaggatttccactctttcttataccgtctactgtggcctttgcagcctgcaacccttggtttcttttcccatatacttgagttatgggatggaattggatccaacatccaccctgcttgttagctcgacgagccaatcctagtttgacaagaagaagagccgaatcttcttggctcttccagttttgcgctgacagacaactcgagcagcacacaaacgacatacttaggcaacttgtccatttcctgaaccggttccctgcagcaggcatgttctcagctgctgtaccgagcaaactcgtggagattggagacggggcaaaccaagcaccaactagcagcattcttgcagcgagtcggtttgctcttccactagtttgttgtaagatggcaaagcaaaaagttaggactttgatcaagaaagggttgttcttgcagtactgctcttcgtctatgctgatgaacgagcaaggagagctctcgtccagttgtaaattgttgatagcatcaaacaatgcagatggggtgattgcaagttcggagagtaagcaaccaacaagccacaaaccaaagctcaaccttgctagtttctcatcaaatctcataagaaactccaactcttcagcagggtaatctttcttccttcttcccctaatcaaattcatagcatctgagattggcaaaggtggaaggtgcagcattgtgtcgaaattcatcaccttggacaacctagtagtgattataacatgtgaaccacctgtgtttcttgggatcaaatcatttaaatctttcccttcccaccactccctctcagtctcaagattatcaatgatcaacaaataaggcatgtccctaaacaactccctcttaactctcttaaacgcttcgaattcttgttcctcaaagcttctaatccttcccctctctttctctgcatcagaactcacatccaacccaagattaagtgaaagattaagaatgttttgcctaaagtaccttgcttcaccaccaacccacaacaccatcttatacctttgagaatatctataagcatactcaagaacaagctcagtctttccaataccaggagccccatttatgcaaataacactactaccatttttagacttcttacactttgaaaaagaccttcttgttgagtttctaacaggttgttcaatccaagcctctaactttggctctttacacttaccaagctcaagattaatgaatcttcctcctcctcctcttgttcccacatcactttcctcatcagctaacccttcagactggccactagcttcacctttagtaaaaggcaaagaacattcttgctcaaaacaatctccataaccaaacaaagtagcttcaatttccgaaatctctttatcccttccaacaaaaaacttgtttctcgaaaagggtagttcctcaaaaccgccttcgatatcagctacagccacactcttcctcccaagctttcctctaagaatcccagcaactctagctatacaactcctccagttactcccattggcttcaagcttaaactcattacaacatttcataagcccatcaatggcttccctacactctttatcaccaccttgttgcagactcataatctcagcaggcacagtctcaaaaaagagaggaattaagttctttttctgagcaaagaacctaatctcctccaaactaagatggttaagaaaactcaaaccagtaacaaccacaaccccataagtaacagaacaaataactctgtcagcaatctcatggctctgagtatcagaatacttagctctatcagcagcaaaacaagcaatcccttgaagctcaagctcagacttaacccacttgcagaacctaatcaagttaggattttgaccatggaaaccaacataaacatcacaactccttaacttaacattagaagaaggagaaagagaccccccttttgcaaatgaaatcctaggaactgggaaagagaatgagatacgtgggggtgcagatgagtcagaaacaggtaagcaagttacaaacttttggtccccaccaacaccaacaacaccattacagccccaaccatcttcagaaaactcatactgatctgaaggtggagtgtatgagctacttggaatgtcatctgactgagaaccccctctgaaggaaagtgggggagaagggtaatttgttggggttattatggctcttggtgatatgtaaggagattgaagagctgagacaaatgctgaagagggtggtgaaattagggaaggtgagttgtaaacagaagaagcttcaattgatgattgagataaagagagttgctcattggatttagttcctgatattttgatagttaaaccacttgaaatagaggtttcttctggtaatggggtttcctccatggctatggctatggctgttgcagatctcagttacattcacatgatgatattattattatctactgattatttttcctggtttgaaaggaaaatacacaacaaaaagagtgtcagaacaagaagaaggagatgaatgcaacagttaataataggaaagaaaatatgagattatgtgattgtgatgtgatatgatatgagtgggccattatatata

SEQ ID NO: 184632 - DNA, 3083 bp, Cannabis indica
gtaatgacactaaattagtgatatatatatatgtatggattgagctaataaatatgaattaatgtgctgaaattttcatttaaattttgatatataaaatttaatttttcaaccacatctaatatatgtgttaaagatgtggtgtttctggcgtgaggtgagggttttggattccgatcaggtgtggatggccagaaaaaatctgacattgtagtggttaccaatttaaccaagatttcaatttgatttttgtttttttttcctaaaggactaaattgctaaatagtgtaaaattcaaggcatttatgctaacatccccaataaaacgtaacagtgataacactttattatactaaaaaaaaaaaaacaacatgggcaaattcattaacattttttcacaaataattctagatttatttattttacatttatttaaatagcaaacatttatctcacaatttgaaaaaaagtcttctagctctaataacggatcagataaaaattacacaatacacttattgatcactgtcgattatttgaactttttctgtatatgctcatgaatttggccacaaattctgcaagtaaataaaaaagctattgtcataattaactaagctaagattgttgctaaaatgacaaattacttcattcatattattgaaactatatattattattacatcttaccttcaagttttagcaaagcacttggtccagttggtaatttcttatcctgtcacaataataagagttatgtttcacaatttgagtaacttaataatatgaaataagagaaaattacaaaattttgggttttattaattttgtgtaaaaatttgatttattttttttttttaaaaaaaaaattatgaaaaaagttcaagaaaaaattaaaaatatagaaaaacaagtatccttagggtaaggggataaacccttaagagtatcttcaatgcaactaatgtttaaagttgtcataaaattctatattttaaaatataatattttattttgtctttcgtccacatcattattgaccacttcttactaaaatacgctctaatgctaagcaactctataaattgtctcatacaagttgaaaataagatgagaagatgagaaaataagcttgtattgaacagagtctcttgataatgatatatatacacaaagagagtacaaagaagagtaacaaaaatctattacaaaaggtacaactgtgaaggagtaacaactccccctaaacacacaacaactaacagaaaataattgtatttaactaacttcactaatacccccctcaagctatagttggtgttaaccaaatgaagcttgttacataaaaattgaaaccttagagaggataaaggtttagtaaatagatcagcagtttgatcttgagtaggaatgtagcgaatttcaatcttattctctgcaatttgttctcgaatacaatgcacatccaactcgatgtgtgtttgttcttgtgtgaaagattggatttaaggctaaggcttgggcactttgattgtcacaccacaaaacaggtggtgtcttttgaagagttatgccaagttcaccaagaagagaacttatctagaccaattcagttgctgcagaagcaagagcacaatatttagactctgtgcttgaccgttcaactgccttttattttcttgagctccaattgattagatttcctccaaggaacaggcaaaaaccacttgttgactttctatcatcaagactagatgcccaatcgacatccgagtaagcttttagatttagtaatgtggatggtctaaaatgaaggccgagatgaatagttcctttaatgtatcgcaacactttcttacaagcattccaataattgatagtaggtgtcttcaagtactggcttaacttgttaacagaataggcaagatctagtcttgtcatcgtaagatattgaagggcttctattgtgctgcgatatagttctagtttgtcaaaaacgggattatcatcaagtattagtttattggccaaaatcataggtgtcacattccttagcatcttcaaactgagttttggctaagagatcagctgcatattttgattgagtgagatacaaccctaaattatttttgtaagcttcaaaccccaagaaatatctaacataacccaaagatttaagagcaaacttttgattaagagctgttatcaaagtagaaattgcaacattattggcaactcttattaacaaatcattcacatatactaacacaagtagtagagaaccttgagtattgttataaaacaatgatgaattagatatggaagttgagaaaccctaagtagagtacttttgagtgtgtcaaaccacactcttggagcttcttttaggccaaagagagatttgtttaattgacacacataattgggtttggaagggtcttcataaccttgtggttgttacataaagactttttcttttaattttccatttaagaaggtattattgacatcaatttgttgggtgtcccaagcataagtcacagttagaatattacccttattgtagaagcttaagtgatatggctgaatgtatttttgaaatccaaactaggagcttgctcaaatcctcttactactaatctagctttaaacttgtcaaggctgccatctttattgtatttagtcctggatattcacttattggttagaacattcatgtttggacttctaggaaccataacccaagttttcttcttaactagagcaagtttttcctagtccatagtctttttttttttttaattgtggttacacttaagggctttgctgaacagtttttggttcctcatacaattgttgttgggaagctttgacaagaaacacttatggttttgagatgccagatttcaatctggtttgcatgggatgacctataggtaatggtagaggagatggggatatatgaacaacaggtatacaacttcttcaatactgtcagtaccagaagtggagtcggtattagaattagggatagtgtaggagtggtgaagtagattgagtagcaagatgagtcacttggttga

SEQ ID NO: 184633 - DNA, 3759 bp, Cannabis indica
gagggaggaccaaaatgaacaggaaatgttggtccagggagaattgatgaatgcggaagaggaataatagacacaacaatatcgtagtcacgaagaaacaaccgttctaaagttgcaggtgcaagagatgccaagctttcacagcgaagtatatctacacgatatttctttatcttccttgacatttcttttccaacatctgattcttcaactggaatcactctctcatcatccagaagatttatggattcagtgacttcaattaagctattatctgttactgattcagtaacagattcagtaaagtcagactccacctgtgacatctccttattaatggagccatcaccattaaacccatcttcacccacaccagtaggttctgatctgtcatttatggtaatatcagcaaccagagaagtagcctcctcattgcttaaagccattttatccatattgttgaaaatctcatctgctttcacataagttgcaagtccaccagactgcaggcattctaaaacacaacgaaggctagatgcatgatttgcgaattcctggagttctccctcaaatttagctccctctaatgtgctcagatcattacaaagatccgcaatgctagcatgaccaagttttcccgcttcatacagtgtcacagcatgagattttaagcctgaaagacaaattctttagtaacattcataacaagcaactgaaatttcaaaatagaaaaccatgaaattatattacctaacactggactctaaagggttgaaagagctaccaataaaaataaatatgatgcaaagatgtcacagactgaaaagataaagaatattcataaatgcaatcagtaacccatgtttctctgttttaaaaagatggagaggctactcacgatgtccacacatcataatttattcaaaagtatattcaactgcacagtgttcggcagtaatagaaatgagacaatgcagaaagaaagttttaagaatctgttacaccatatccccaaaaaaggaaagaaaaaaaaaacacgtgtcaactgaatcatcaacaaacagaatgcctcatttgtctgttaaattttagaagttaaagaggaaaacacaaacatttattctccacacataatgtttgaagatatagcttactaagctgcaaagagttccatgaattagtgtgcattcttttatataacaagccaaaggtatccatcaatgtatccaaatttaaggtgttcctccatcgttcacaacaaattcaactacaatcacgtgatcataatgtttaagggagaaggttctaagttctgaccacttagcagtattttaattcatccttgataacagtaatttatcttagaagtcagtaaaaaaataataataaactgaaagacaaacctggtgaaacagatcccatcataagatatgatgttatgttagcatcaacaatgaaagcaacacgagcatacattgaacctggcccaaacttttcagctcctgaagcatccccttccaaagtattatcaccatctatgaagatatttgatgagcctacactagcatgagaagcctcttcatcactaagaatggtcctgggagaaccaggtatacttgtttcttgaagaatagatgctggatcaatgactttcactgcccatcccaatcgacatgcaaaagatgcagccgcctgcagctgtgaaaggtcggcctgtaatgttgctgccagctccgcaacagttgcattctcacttgaaacaacaaaaactgcatacagtaacctttaagaaaacattgaaatatcatgactcagtttccttgccagtcaaatatataaagatggtatcaaacacatggatatgttgaaatactgccttactcctctataggatcttcataggattgctctctgttggaaacaaacccttcaagcctggaaactggaccaccctaaccgttagtaaatcaagcagaaaagtctactatgataactgatgaaaacagaatcaagtagaatgttttccggtttgcagcacataataggaaagcatagaagagtatttgttatcttgaattaattaaattatagaattatatctgcaataaaataaaagataaaacatccactggggcgtttgaggtatgaaaaagttaactgctactagttaactttaataaattcaagcaaaagttgcaactcaaaacaatagaagttcacacattttaactcataactgtcatttatagttttcaggaaaaagctccatgtgttttaacccaaaaaggtgacaagtatagagaacagatatagggtgccctaataaaaataatctggaatgtcaagagttcccctgaactcctagttggatgatgtggcagttcagcataaggacaaacaaaaatgtgcaagagcaactatattatatttcacctaaataatatagattgaaagaaagaccgaagacatacacatagcaaaaattaaagaaaaagttcaatatatgtgattggctgttagattccaaagccaacattggattaagtaataaataattggcatgattttgttattacatatgacttgcctttaaagcgatcatcggagtaaactggaacatcaaaatatattaatcccctccgaaaaaagagctttgatgatgtcaggatcaaacagtataaatgaattggcttcttctttgcagactttatctatggtagccatttcttcttctgatagtttctacaggggcaggtaattatggtaatcgacatcaatcacacaaatcataacttggaagcatgtgggcacaaacacacaaaattgtgtaattggggaaaatgatgttatttcccttgagcactagaattcttaccttaaattcctaatgtaaagttcacgagacaaactccccaccatggttcaattgcaaaatccacaggttgggtaggtaaaagttcttttgcaattgacttgttaagcttccacataattttctgcatagctccaaaacagatgttagaaaaaggaaaaaaccctcccccaggttgttgatgctgaactccctctccctctccctccccctctccctctctctctcaaagacatacaagatacagacttattaaaatgaaaatcagtaccttagatctgcacttattcattatatcaataaattcatttctccctatgcctgtaagccgcaatgcatctgcagcactaaaatttgggatgctatcataaggttgctctgcaaataacagaaaatacgtgatcatgataacctactttaagtaacaagcaactcttacatgcaaatttgagcaataaacgacatagtttaagcaacaatgtgcaatttagctaagttttaaaccttataaaacaaaaaattcagccttgtagagacttctgtacaagttccactaatttattattgtttctctcatccctttacatttaaccagaatacattcacctattgcagatacatctgagattcttaggtaatgttctatcatcccgtcatcttgcttgcaagcattaatagcaataaacactttccttcttttctgttttttctatttgaaccagaatacattgacatcttgctgatacatttcagatagctagttatatgattcaactatctgagattcttaaataatgttttatcatcccgtcgtcttgcaagagcacaagtcaatagcatcgcgtcatcttgcttgcaagcatcaatagcaataaacactttccttc

SEQ ID NO: 184634 - DNA, 2299 bp, Cannabis indica
cgtcgtcatactgggagtggggtcggggtctgctgggtctgggagctgtatgaattggactgtctctctcttcttttatctatcatcatgggccaaagcccaatcttcaccagccatgccatgttctcttggtgagtactccatgccttctatcttgatgcatacctgctgctgcgatcgctctgtctgaaacgaatactcccgtccgcttgcgctgcgctttcgtctcggggtgtgaagttgaagtggcgcgactgactgcttcgcctaactcagattcgaattgatactagtctttcttcattctcaggtctgtcattgcctgccaagagtggatggattggctgccgtgggcccactaaaccctcgccccttggggcctggggaggcaaccttaacggcgtaagcacctttctatcaactcaaggcaggaaatgcgcatagccaagatggaattgactctagtagaccactactcgatggtggaacacgggacttgtagtagatgactagtctgtcttcaaccaattatcatatatatagagagtcgtgtcattgcgtagggccactaagagaatgatctctttgacatagcttttcaatcaacaaagcggcgggaccaatgagcctacatagcacccactggcatttatgtcgggtcgtagtccggtatccttcgggcgctgtaagaaagaagatgctatgtctctgttctcattccccatgggggccatgaactacgtgatagaaccagtctttcttctatagttatagtcttcctctacgaaaaggtggaacaccgtctttgtagctgtttactacgcctacttcatgtatactagcgcgcccttttctcgcgcacaccgcccgcggcggaggtaggtacggccgatacctaaatacgggtgtcttatccataggatcttttctaaagggataagaaacaaatagaagaacataacatagttggctatttctatttgacccactacggtcgtgacaggttgaccattgtcgtcaactagggagacttcagtcagctccccgccaatgaaagcaggtgactgttccaactgaactggatcaggtgcacccattggacgctagagccaatgttctacacacagaaggactgcacttaaaaaaaaaaagaaaagaaaggaagctgatgaccaacatgatttattagtacatattccaattctttgataagttgtacacctccagccccaggaaagcccatccggaactcctggttttatcaaagcctccagtggtatccgaggatgacaatgctttcctaactgctatgccagatgaggacgagataaaaagcacggtcttcgagaaggatgtcccctgggcccgatggcttcccagaaagcttctttcgaacctgttggcatatcataggcagcgacgtttgcaaggcgatccaatcctcttcttcccgtgaaggctcaatgaattgctgttttattactgtaattccgcaatgctatctccattgatcagtttagagcgatattttatgttttgccaacttaatcctcttcattataaaaaaattcttggcgataaggttgccttctatctaaacttgtatctgagtatcagggtgcctttattaagttaagggctttagcgccagacaaaataatattggattggcatcggagcttgttaattcgttgcagctgaaagctagagggttgaaattggacattcggaaggcgtatgacaccaataaatggcactttttttcataagttctcgcttgagcaaaaatggttggattatcttccttccctaacttttattgggataaggcctgtaagcttcttctttgatagctagatgtgactccggtagtttctgtactgaaatccctgagtcaggttgttcctgtcgggttatacaagataggacagaagagattagatcgatcaagtgataaccgaagatagggtccatccacttaagttcctttctatggccatagttcaagcagagaaaaggcaggataatggtaaccccaccattacttcatttatgaatttcatagtaatagaaatacatgtcctaccgagacagaatttgtaacttgctatcctcttgcctagcgggccaagattcacctccgtggaaaggaggattcattcggatcgacatgagagtccaactccattgcattgccagaatccatgttgtatatttgaaagaggttgacccccttgcttctctcatgttacaatcctcttcccgcggagccccctttctcctcggtccacagagacaa

SEQ ID NO: 184635 - DNA, 3024 bp, Cannabis indica
tgctacttatgacatgtaatgtaaggaacgtatcattgttggaataacatataaagatggcatagtttctttcctacaaaaacaattgatgtgaatgtacatatgtatcttgaaagtaatcttatatgtatatatgaacaacaatgtttagttcctttttttgtgtgtgtgtaataacagattattggaactgttttggctgtaaagaaggctttcattgctgtttctagttgtattcaagatcaatctaccctagaaagtgaggtcgcctttttgaacagatctacagagtgttcttcccgtgggatgtttcatgattctgagactaatgctgagattttcccaaatcttagttcgttgttaccacaaacttctgttaatataaacactgcttcagttgactattccaaggcagactccgatggagtctccaacaagtatggcacaaagaatacgcaacaagaagttatgtttcgacttatttgctcaaatgatacagctgggagcgtgattggtagaaaagggtccatagtcaaagctctagagaatgagactggtgctggtataagatttgcaaatcctaagaatagctctggtgagcgtgttattactatttctgcatttgaggttagccatactacagctttgaattcgttaaaaatgattgtttatctttgaattctcattgattcccacatacaatgtctttcgattgttggtcatagtttgctctattttgtttatttctttttgcaggacatggagtcagagtactctccagcacaaaatgctgttattcttgtgtttgctagaattgttgaaggggacattgagaaagggtttttattagatttcagtaatggtacaactgtaacagcaaagcttctagttgcgacagatctagttgcttgcttgagtgaaaatgaaagtaaggtcattaaagaaatcgaagaagcatctggtgctgacatacgaatacaggatggaactctacaaaatcaagtggtacaggtacaggtacagaatcagtatgtccttttccttcttatagtaatgtaccatgaatgaccaaaaaagtgttgttttggctggacatgctcacaataaattaatggtacttgagtttgtaaacaagtactacttctagcaataaaggtaaaggtagaatgtgtttctttaatgcagatcactggtgagtatataactgtacaaagtgctctatttcaagtcactagtactcttaggaatcaccttatgcatcgcgaggtccttaatggcatgggcgcaaggagttccttcgctactgatgaagctctgttaacaagtttgagaaaccgagttgtactctctcgtagtccaggtgcttttcaaccaaagctacctcaggttattattttattcattcacctattttgaagttatcaatggaggcagaattaacacatagaggtcgatattgtacaatatatatgtatacatattaatattagttgagtcaacataaattcacacacattgatgttattcttttcaaaaatacatgtactaaattgtagagaaaaaagttaaaacatgaccacccctaatcctcctagatcacgactttctcattactaaggcacctaaacgagtcaaaggatatccatcgttggaattggtcttattgcagaatatgaaaacggagtatggcaactacaacactgatgctagggatgctttcaaaagatatgaggtgaatcttgaagttggaaggttagtactacataaaacagcatgaatttgtacatctattttcatgcattattctttgtaaattccgcaggttcaaaaggttcaagaatttgtcattctctaaattaaacatgcacctcccaagtgctatgtaacataacaacgatgtaacttttctatttagcagtaaccaacacaatgtagcctaatggaaaatgaactaaaactattttacagtctttggaggcacatgttctgtcaaaaatatcatctttgaatttttgtgcagtgggaacaaacttgctgtagtgactaatacaattctggagatagtagtttcaaggcacgcttttaactcaatctacggcaaagatggtggcaatttaaatcgtcttaaagaggtactatggcacatgtttgattcggatgttaatttaattttagagtaatatttggccaggctaacaaagtagagtagaatagggtagacaatgatatcttaaaacttttgctcaactatgaattttaatcagatttcaggagccaaagttgaagtgcacgatcctcgtccaggggaaagtgaagggaaggttgttatatccgggacacctgatcaaaccttgagagcacagagtctactccaagctttcatctaaactacgaagaaatcatgaaaccagaataaatttaatttgatctaaaagactgatttttgaccattttatttcatacagttgagcagaggaggtatattcgaagtgttttcattgttttgtgtacattctactaaaaggtagccaccaaccaagaatagaatcacagtacagtatagataatctcattcatgaatagtattattacctattaccttaggacattttcgtatgggagaaatagaacatatatcttttatcctttgttgcgtagatacatccaaggttcttgatcgactagcatgtgacagtgaaattgtgttagtttttttttttttttgtgagtaactagataagtacacccgttgattcaacatagaaatgcattatgtgtgtttttttttcacaatgagttattttatttgcttttgcttgattataattgttccttagagcatggggttgtccattgaagttgtcttgccacatatgtaatgcggtttaatttttcaagatcaattttatgtgaagtgttgctcaatatagacaaggctaattagtaattttttcctctgaactttgacatgtactaaatcgtgccccttaatttttttgaccgttaaaaattctctccgaacta

SEQ ID NO: 184636 - DNA, 3166 bp, Cannabis indica
aaaagtatacttagcatgaaacctactcctccaacccaagaagccatttcggaggtaaggagaggagaaagcatgcttcatactttatagagtttatatttgtagttttaagcaaatgagaatagaaagttagaatccttacattaatggaaggattctaacggtggatttgagagaatttacaatcctacaacctctcccctctttcccataatatctcttgccaaacaaaaggatataacctctccctcctcccctctcctctcctctccatccaaccatttctccctcctaccaaacataacctaaaagtgttgtactcctgaccttggaagaaagaaacttgcacctgaaatttcatcactcaccaagagcatagcaaatactgtagccaagcttaattcactctgtgttcaactatccttaggagctacatgtcaggaatgcattcctcgagggtaaactagaaagatgaaatatttacagaaattccacaaggcttcgagacaaagactaagttgaatttatgcaagctccgaaagtccttgtaagaacttacacaatctcctcagatgtggtttgataggtccaccaaaataactttactctcagaggaaatcatacccccctcaaaattggaatagatatttcatacaaatttggatgttaattcctcaaaatttactcccagagtggcagttgtgtgataatatcatctacttgaagatgtacagctaatcaggccatatttcctcaaatacttagagcttaagatttgtactcttcctcggcattacttatattcctattttttaaggattatctcgtattcaaacaatgcagcagggtcatatgatgcagttaaataccctagggtattagtgataaaaaacaaaaaaaaaatcaaataataacagagttctctcggttcattctattctctttattcgtgtagatataagcactttcatagcaatagtagatataagcacctgcaaattatgatgcatggaaagggtgcggtatctcatagtgcttgatgtatcttctatctcatagtatatggttatatataaggaaatatttccaggaacagcagcccgaaaccaaagaggccacaaaaatggtctttcccctttgataattgtgtcctgaaacaagaggaaaaaaaaagaacataagatcagaagcattgaattcatggtataataaagataaggcagtggacagggagaaataggatactgacctctggaaacataaacacaggttgagacgtgttaccagaattatattgtacagaactttgtccagaattcgtctttgtttccaaacaagcaggaaattccacattcaaactttcctgactcccaacattcagaaatcttggatgactgaccttcatcttcaagttctgccaaagtatcacatcgcattaaaaactgcataagttaacaaaaagactggcatgcacgcaaaatttagctactaggacaaagtataaacaactggcatgcacgcaaaatttagctactaggcgaaactatagacaactgcactatgtgtgctgcgataaagcacactagcttgtcttgtgagtgcaatggagtgacacaaaagcaagcgatgaatgtacatgtaaaaacttccccacagagactagaaaatacaaaagcaattccaaacataaagctcagtgcccaacttcttgaattatcaagaggaatgggtctggccaaatagaagatacttgatagatactaccaacatataaagacaactgaaaataaaagaaaaaggatattgaatttcagtttactttaactgcacattctgattgatttctcaactccagaacaagttgatgtacatctcctgcatatgcacttgtgggtaaaggctgaatgacgccctcaagttttggtagactctgaacattgaaaagaataataaagtgaaaagaagtcgagccaaatcatttcagataaaccttttctttttttcctttttgttatttgttatcactattgggggaggtcgtaacagtagagggttgagactgggagaaaaagtatgcaccttgatcaccacaaacttgaggttgtcaccagaagaacggctaccacttcgtcttctaccctttgaacttcttttctttataggatttgactcaaaattatgaaaaccaacaacaacacctgataagttccaccttataccaacaatgtgtaaaatgccttctactgttggagtaaccgttagttgcacctagaaagtaaaatataagctataaatagacagaattgtacaataatacttgtaaaccaaaactgacaatcttatttgagctgaatttccataaatagacatacaatagctatcaaattaattcatcctagaataaacttcgaacatatcatagaaaatagcttaagatagaacatggaccaatagatgcagaggaaacaactactgagaattaatcaaattaaaattaatttgtttcaaatctcaataaagcacttaccatgattgtttcacctccttctaatgaaaagtcagcctttgacaaagaaaaggaggaatccttttgacttgtttccctgaaaatagcaaacaagaattatagcttaagcttcctaataagaaaacattcaaggtaaagaactataaagcttgaaatactgaaatgcatacctgctggttgtctcaacggactcatcattgttctgaacctcctgtgctgagttattggcatctgcatcatcagaaactgtttagctatcctgtttaatgtatttacccattttttttaatctggatccccatctaactccttacaatatttttatttaccaatttttactaatgaaagaaactaaatgaataaatcaaagtagtgaacacacaagaagaaatcaggaaaacatagggtccacttaccagattttgtctcatccgaacttgtggaaagctcacacatcagggatacactagaaacagatatcggaatttgcaaagggtttttaaactcaatatcaaccctcaccgcttctgcaaaaggatgaggatgcattacaagcatccattggatagactaaaaaatctgtaacaataactcttttgaagccatcaaaaaactcaagagaaaaaaaaagaaaaaaaa

SEQ ID NO: 184637 - DNA, 6165 bp, Cannabis indica
  modified_base (6121)..(6121): a, c, t, g, unknown or other
tcagccattgcatattaattattgcttatgagccatcatgaaccatttaatgaagtaacatagtggccaattcccattaactttcgtgattttgtagaagatattgttttgatactactaagttatttgtatttgtgaaataaagtaagtcttaaagaaaatgtaaccccgagttagagtggtttattttagttccacaagtttaattcagtaaatactatagtctataaaatattccttcaattttgcagaatgaaaaactaccaatacaacgtggaataacaaaaattttaattttatccattaatataaatgaccaaagctttaacaaatctcctatgaattaagcatcaacacactgattagtttggtagaaagcaaaatgctttaagggttacagtagctttacaagcttcaataaccccaccaagagatagtaacaactgactcaaataaactcaaaaggttggaaatctatcgtgacatctagtgataatattgatagccggtaatggtatgacattttcatgatcttcaacacactagcagcattcctttcttctttaaagtataatcgtcttcattggatagctatcactgcctaagaacatgtacctcaaaaatgacagtatacagatgataaaatgtatgagattctatctaaaaatgaataagaataaaaaaataactcatattttttatatatgaaattaacttttcacacattataaatgtggtacttaaatttatatatatacttgttattgctctcaaatcttcataaatttatccaacaacttcatattggtattaaaaatggtatggaggcaaattattttctccatttgcttaatatagtactaagcgaagtttaaatacaatgtagatcaaatcaatctagaattgtataattcaactgtaaaatattacatattttgtgtcgttttattatattaattgaaatgaaagaagatccatttgttttcaatgaatgtcgttttcatttatagtacctaagctaagtaattgacttttggttttcaatgggtgtcgttttcatttttagtgcctaagcattattgattgcttcataataattatctccgtgtcttttgcatacttgtaaaaatacacaaaaaggttccattttcctaaacaccaagtttaaattttatagtctccattgtattattatggttgctcctccctccctgagtaatcttgtggtcatctaaagattttaaattagagaaatgctaaaaaaaacattagtggtgactacattcaagtatcggtcgtaagctctagcttctataaaatttaaaatatattatctttatatagtaaatataagaattagttgtgatgacataacattaataataatgttaataataataattgcctgaacttgtctcatgccatgtccttgtattgtaactgtcctgcaaaagaagcttaactttaattgggtatttcaattaaaagagtcgcacattctaatgattcccataaccaatttcgccattccttcaaaagaaaaacttgacatattatgaatcgtgaagtgcaaattttccattctttcaacaggacatcaattacaaatgcacgcatacagtgaaagaccatgtgaatttacaaaaatgtaaaacatcaaaaaccattttgtctaatactaatcaattgcctaatgtttcgttgggtggtgttgttccattgagcaaatgaatagaatcccaacaaacacaaactcggaccttttgtctggcatagagagattaagcctgttcacgtaatttaccatttccccactaaacaatgagactcacatttcatctactcaccacaacttgatagtttcattgggaaaaataacattggggttccgtatgtgtggatttagagcagccaattccttccatttcgatcctgtcccatgaatgcgagaagagatgctccacaaggtctcaccaggctgaacttttgtagttgcttctggagccttggattttgaaacattcaaaccattcgattttgaagtaggcttcgacttcaagaatggattcttattgctttttcccattccatttgcaaccaaccagcgtgatccggactgttgctgagtcgaattaccccagagtttcttcttgccaggctcagctttcaaacctgcaacatgaacctcggtgattctatactgaggattaccttcctcttcaggacctttctccagttttggctcctctataatttcttcctttactgcaattgctgatgtagcctcatcatcatcctcttcggtatatttccttagctcagaaaccgtgctgtatattttaggctttggtggaatgaagaccctttctacttgaataagcgaaagcattggcgttcctactggttcatagtttctcattggatcgcgaagttgcaccattaaagctactgtaaaattgttccctaatagaccacactttctaccagatcctttgccttttcttctctccccttttgtccttccacgaatgtagtccagagagtgagcatgatgagctgcaagaattttagaagtacgctcactgatttgattttcatcatcatcaagctcccctgaatccaatcgcatccattcatcaagagtcagtgatagccccattagtccatcaacatcatcgctgctttctttagtgtccaacaattgcaacccaccagttccgtccaagccaagggatccactagggttaatccccttgccctgtagagctgaaatttccctaatggactgcgcgctgatatttgaaggtgcttcctcatcagacataccggactgtattctcaagccctcaattgaaagcgcttctatcttatccatagccagtggagcaagatcttctaaagacacatattccgatgctgtctcacgacctactgagctgggagtattctttctagactttagccgtgacgatctttcattactcacttggccagcaaagctatcaagcccgaccattggttcatgctgcaacaaacattcactggaccaataagaaagtacagttaatagatgtgttagcccaaataaaaatgctatgtgaaaggaaatttcggctgctaatgcttaaaatagaccaacaaacctttgaggtccctccaaactgggatcagcttcccatgccatttgttgcattgtcttgccagtgatatcttccaaaggcattaacttatttgcctgcattgaaagcttttcaattccaatagatgccaattgctgtaagatctccattataccagaacccatatctgctggaaccacaacagggctagaaacctgcataaccaagttcccactgtttttagcatttgtaaaaagggacggagtcatagaccgcaagaaccctccatcttttgtctgaagaaaagggcctaaaccttctcccaaaggaggcaattcaggtggtcctctggaggtaaatcaattggactaccaaaaccagcagagctttctggtggagaatgttggaaagctctctcattcaagccccactctcgcatcagagcttctgtctctaagtcttccaaaatctttgctttgtttttgctcatttccacctgacttgccaagagatgctcctcttctgcagcttgaataagtgacgaaaattcaagatccttagccgagttactccaccctgtttcaacagtatcactgtagctgggctgcgcttgttcctcactttctaagtcaaaaccaaataaaggacaacccccagcaagagcctccttttcaaattgtcttaataggcgctctcttggggattcaggctcacttcctgaactcaagccagatggactaccctctattcctagcatgtcaaaaaattcatttgcaacggattctgtcaagtcatccaagctaagtgatttccctttcatatcaccttcaaagtccaatttaatatcctcgtagttctcttcctctccaggagagtctagagctgcagcctccaaatctgagacaccattcaaagccgactccaactctttcatgagtgattctttcgtatatacctcatcctgctcggaaacacagtcctgaacctcaagctcatctttattactgctatcttcctcaacccgagaacaaattttggtgtccgcttctgtatctacctgaacatcagtctcaacttcaacaacatcacgacttactactggagactcattagcagtttctacaataacttgctctgaattccctggttcagctaatgataattctactccttgttcagtaacagaaaaatcgctctcatcacagccattgtctacatcttctctaccagaatcaaaaggtgaatatgaatctggttttacgggttcaaggggcttggtcaactcaccaaactcaggtttttgaacaaatggtttatccaaagtctcttcttccaatttcctgtacaaaacatctactgaacttgcaagttccgaccttgacacaggcaaaacttcatgaagatcctttatatcctctacagatcgagacagggtatgaagctggtcttgggaaatattgggaagactatctgaacgcctcacctttccccttccatcaacttgacgaaatttattccctgatttcaccatagtcagattgttctgtctcatattcaacatgtcaggagcagtagatctatttcctggtgcacctaaattatccccaagaacagtatacccaaaactaacattcatagtagcacctttagcctttccagataatttataactagttgtccattttccagagctactctcctcttctaactcctctaaagtcaaaggaagcagctttgttagatcaattcgatgcttacccagatcaatttcttgggctccatacacagaagcataaagcaagaaatgctttgcctcatactttgccgaatgatggggtccgctcctactcccatagacagagcaagtaatagtcaacctctcttcaaactccaccaagccttgagaaaccttcacaggtcgagtaaccaaatccccatccctcctcttccagtgcacgcaaagactaacttcgtcaaaattcgaaggcaacccttctattgaatgaacttgaagagaaaaacaacagttgaatctgcggtttcggatatgagaaaatgccttcaatgccttccaattccatatggacttcttctccttgcgagatggctcttcagtggcatgtttcacgttcgaattcgtatcgggcaggtgggttttccccccgtacttgattccataattcggccgaggaatcaaactccttgaggtgtgtttgtcaatgtaaagagctttacttatagcctcaatctcattcaacaacttaccgctgcttgaatcttcaccaatttttttcccagcttcaattttcgacaacattatcttcacaaaactaaatttcaaaatcaaaattagaaaaaaacccaattgcaaaatgaaacaatatacatgtaaagttgtaaactgttacattgattcataatcagcacgccattaacggcttaaaaattctatttaataaatatataaatagatagaaacctagtaattaccggaagaagatattgctctacccagaatatttggtctgtagaagaacccaaaaaaaaaaattaccctaaaatagaaaaggtaatcgatgtggaaaagttgagagagagagatgtaatgaagaagaagggtaaagaagatggttgagttgagttggtatgagtctgagtctgaggtgcaattcgtgtgcctaaagctctgtcattgttccaaatgtctgccctctttgaattgccgctgccttattcaaacgcaatacttattttttttttaaataataaataaataaaataataatcgaagttaaaagtttaaatattattatttctacactctattttccatatttattctttgccttaacatttctccatacctttataattagcccccgtctcacattatgaaatatgcatctatcaaaatattgtttgaatatttcatatacttttttttttaattttttttaaattttacggttttgaattgttctgttattttatgtggattgttntgtgaattttgatttacatttaagttatttcaattcggtactac

SEQ ID NO: 184638 - DNA, 3930 bp, Cannabis indica
atcacaattatgtaaatataaaaaaacatataactccgaactaacatttttttatgtcataaattataaaaatgagatataatattttctaattaaataggaaaatttagcataaaaagaacccatattaatatatcttaatctcatccctctaaaactctctccataagttcctttttgtatgatgaagatttcaatgtataaattattaacgaataataagtaaatatactcttctctctatgttgttattaacactcagaagaaaaacagtatagaagagttatttattcatctttcttgaccccaaattgatgtggaaggagaaaaaaacttggtttggttgtggaaagtcttggcaactcatttccgaaaaatcgcaagaataaagaagcaactgatttctctataaagatctacatgtgaatgggtttgtcataggtagccatggcagcctccttcaatgcctcactcatcgttggatgagcatgacaaacccgagcaatgtcttcgctagatgcatcgtacgccaatgctattgctgcttcgtgaatgagttctccagcatttggggccattatgtgaactcccaaaatcttatcggtttccttatcggccaaaaccttgacaagtccttcagcatcatcgattgctttggccctgctgttagctaggaatgggaattttccaacacggtattcaacaccgagtgccttcacttgctcctcggtttttcccactgatgcaacctcagggtgagtgtaaacgacaccagggaccttgtcgtagtccacatgaccaactttaccagcaatgaactctacacaagcaactccatcctcctcggccttgtgagctaacattggcccgggaatgacatcaccaatagcgaaaacaccacttacgtttgttgcaaatcgctcgttaactagaattctccctcctttgtcggtttcaactcctatcttgtccagaccgagtccagatgtgaatggggttctaccggcagatacaagaacaacatcggcatcaagagtcgtctgctcacccccagctgccggttcgagtgtcaacttcacaccaccgctagaagtgtcaaccccaacaacctttgtgttaagcttaaatttcatcccttgcttctcaagggaacgttgaaattgtttccgaatttctccatccatggaggggacaatctctgaggcaaactcaacaacagttatctcggagccaagtcggccccatacagaacccatctcgagaccaatgtatccagctccaatgacaacgagtttcttagggatttctttcaaagccaaagctccagttgacgagacaattctctcctcgtcaattgtaatgccaggtaaagattttacatccgaaccagtagcgacaataatgttctttcctttgacaatggtattcccaccatcaatggtgtctacagaaacttccgaaggggagatgaatttaccatacccttttacgtaggtaaccttattcttcttgaataagccttcgatacctcgggtgaggttagaaacagctttatccttctgacccatcatagctggtaaatcaacttcaacagaagcaaacttcactccatggttagaaaaagaatgcttagcttcatggtacatatgggaggaatgaagaagtgcctaaaatacaaaaagaaacaacaaattggaaagattaattttctttcaatcactactaaaacaaaatacatctatttatgaactataagctcaaattttttattttgttttaccccttttttcaactccatttcattccattcagcattaagattttcaagtgaacatgttccgtgtcaaaaaaatagcaataataataataactattcatgcagttataccactaatcagaaatcaccatccatattgcatacacaaaaattcaaccaacagcacaatcaaaattattttcgattttgtttttttctttcaaaagcttcacaatttccctttaatactagattaattcgaaaactaaactatcataaaacataatgaaataaaattttcacaaatagatctgagaaaaagttgcaaaaccaatcaaacaataacgaattagaaaaataactaagaaaaaacaaataccttagagggtatgcagccgacattaaggcaggtacctccgagagtcccacgcttctcgatgcaggtggtcttgagtccaagctgagcggccttgattgcggccacatagccgccggggccaccgccaatgaccactacatcactctcatcggatcccgaagaggcaaaacccctggcaaaggaggtaagagaaatcgagcaccgaaaaacttcagaggtctggttggaaaatgttctagaaagaaggtgaccctttcttctagccaagcttgccaaagccatttttcttgaagattgttaaatttcaagaccacgcaccaccagtctgaactatatataagatagacaagttaattcaatttttgtatatatataatacttgtaaattagtatatatacatcaatcgaaattccaagtctcatagagtaaacatagcattactattaggcagctagtcctagtacacaatctgaacacttattaacttgaaagaatatataaagatatactcatagagccataaattatagatatagataatacatatatccaacatcactcattttgcaataaacatattaaactatttattctccagcctatgaaaaaacaaaacaaaagtaaagggagactgttgcagaagcaaactaagtaaattagtcataagttggagctacatgccattaacaagttgagacaaatcacaaatgtttgaagctaaagattcttgcaatcacttctaatggtaagacctaaatttttatgcaaatatctatcaaatgataactgaaataggtggaacaatgtgaacattattacagggaaaagagtgaacaaaagattcaattatttatccatttaggtttattaaccaaaccaacttattaagttagctagagtgagttgtgatactaaaaattcctccaatatggattaaaaaactgaaaactacagatcattactattagagagctagtcctagttacaatctgaacttttattaacttgagagactatatagaacgataaaatcacaacaaaagatataaaactcaaaagagccatacaacataaatatatataataaacatatcaaacaatttattctctagcctaggaagaaaggaaaaaaacacagattaagggagattgttgcagaagcaaactaataagtcataagttagagcctaaatcccataaacaagttgagactcaaatcacaaatgattgaaactctagtgtccaaaagattcttgcaatcacttctaaaggtaagacccaaatttttattccaatataactgaaatagagtgaccaaaagattcaaatatctatgcatttaggctttggctttactttttcaagttaacttggaaattttaataatttaccaatttatgaagttgcttagattgagtggtactcaaaattcctccaatacagtcaatctacaaattaaaaactgaaaactgcaaatctttttaccagagaaaatgagtactaaatcaataatatttatgagcttaataacaatacaaaaatgtttataaataaactaaaactattgtctcttctttcttcccttaaatctacaataatattcagctaaacatgattggagtctagattctgagacaaaatagttatactaattaattattttaggagaattatgcacaaaatcaaatcatctaatctattccatacagaccagataatccaaacatattgaagagcttgttgttttctttaagaaagaaagagaaactacctttacttgcgccggccgagaga

SEQ ID NO: 184639 - DNA, 5048 bp, Cannabis indica
caacgcattttggtgggacagccaatctctgagctctgtgttaaggtatgttatgtacctgaagaatgttatttggtgtactttcagtttaaattacattgcaagctcatgtttttaaatgaaatatgtgctattttattgggagaaaaataggattagacaccatcaaagattaaagacagaagaaaattatgtaagcataggaaaggccatctttaaccaaaacttcatataataatatattaaacatggaaacatcaaactacctttcaactctaaaagcatcaataggcttgccgtcagaacttttagctggtgattatggagaggctcagaaggtgattatggagaggctcagaaggtgattatggagaggctcagaagcctactttcacgtgcatcaaaaactggtcttttgcatatacagaaaatctgtctgccagaatagtaattttatttatttttgttctttagcaatccttaagttatatcctttataatgtaagactgaagtttcgatagctttcttcgatgctatcttaaagttgattgaacgatatacatggcaattgtgacagtattacaatattccctatgcaattatttatttaaaggagaccaccattgtttttcttgattggttagaagtagccagatataaaaaacaattatgcacacgtattaggatttgaacttgtccccttccacacacattcacatgctcatgggagaattttacacttgttacttttcttataaatttatagttagtgagtgctcaagtgatgacatttttgcatctgtgtatgatacttccatgttagcttgcatctgtgtacaatactttcaaaatatataattttttcttagaattgttagcttaaatataattaagataactagttagtttttttgacgcctccctgagaaatataatttttgctggacattgattaatttgctcgtgatatatttgtgtgtcatttataattttttttctttcaaattttggttcaattatgtaatctactctttattaggctggaagtcatgtgctactggctgtcagggcatcttatcgactcctcttaatgaacttcgatgatttttctaaactttgggattggtcctgttttttggaccttgttaaacaattaacaaatcctgaaatgagcagctgtgctgaaagtgtagagattctctcggatatgtgcagctgtaatgaaaacgtggaagtggtctgcgatctttgcagatgcactgaacgagtggagattgttacagatataaaatggtgtgcaataaagatactgtcatttgttctcaaattaagtgatagagcgacagaaaagctaggaattggaaaagaagaatcttttttttgttacttgaggtttgtcttcaatatctaaatttagaagtgtactttcaaactgtgaccaattattatttgttttcaatattcaattttagaagtgtacttttcaacctgtgaaaaattatatgctgcaattctgtgatgttatatcttgtttatgccatatttagatgggagaaattctgccaggatgtctccttggagaaggctggctggtacattagtggatcatctagatcaaatacgttggagaggtctgatttttctctgaaaagcagtgtgaaggtttttggattggatcctgagcctatttgttcctcacaagtttcgtttaaagagccaccaattaggattcaacggctagcttggtaggttgtactatatagtaaattaaatccttttcatttgtctggacactccttttatacatctgcagttagactatgtatttggtttctacttaattgggaatgagagtgaggtcaactcttgactgtaccccctccattttttaatgtgtctatgtgctttgtctattgttttgtcattcaactcaccatttcaatatctgatttcttctgtttgtatttatatatattttaagggatcatgcatcatcttctggaaacccatttgttttaacatcagcggtgcagaaaacttttgaaacagtatcattggcagtaagtcaaaagtggccagtgctcttgtatggtcctagtggtagcggaaaaacctctcttattagcaagttggcccacctgaacagtgaaagacaaggtaattcttgttgcttaactgtatattgactacatcttcgtcttctatctctcagaaatttattgttttacaacggaaaatgtgatatcttttatgagaataatgcaacaccaacacacacagacacatatatttcattacagaagaaacatgctattatatatttactggtatgagaaaacaatacaaaagaagacaaatcacgatattaagtttcatttagcacttgtaaatattacaggcagttcctacttccatgctttaaactgtcgtgtttagctaccagatcattacattatataatttgcatagacactcatatgcttttgatgccatgtatatcattagattatataatttgtatagacacacatttgcttttgatgccatgtatatctattgttagatttgcaactgtgagtagtattgatttattcatttgtgcagttgtatctatacctatggatgatcagattgatggaaaaacattacttggaagttacgtttgcacagaacgacctggtgaatttagatggcaaccagggactcttagccaggtttgtttcctgttgcccttatattctgatgcactctgagtatgttttattgatttatttttctcttcacaggccattgtaaatggatactgggttgtttttgaggatattgacaaagcaccctctgatgtgcatgctatcttattacctctattggagggcacaaactcatatataactggacatggagaggtaattcaagaactttctgtgcatcttaaatattaattggcacttgggtcttaaattctttaggactttttatgttttccccccttaagttttaacacttagttttatccatttgcttactggtttggtactaaagtgttgggggatgtttgtaggagatacgggttgcagaaaattttcgattattttcgaccatttcaacatcaaaacttgaagtatctagtattattaaaggtacagtcactatccacccaccatctcttttattgagttttgtgcttggggtgttgttggtcttttcctatcatattgtagagtccataattgattactgctacttaatacattcaatgtttcatgatatttgaatgctgttggtgatggttcgtggccaagaggtgcatttccgaatggtggattgaattaatttgtaaaagcgttttagaaaaagttgtttactctataatgatctttctaaaattttatgtccactttgattgagaaagcatgggacaagtagttctttcttaagtttgcataaaatgacaaacatttcgctatccatcttgtacttgaatgtgtctacattgtcattaaatgtgtgagtgtttgggatagggggaaattcgatttctgtattttggaggacagcaatgcttggaccaccaaaagttgaggacctgaaaaaaatagtaaaggaaagttacccaaatctggaacctattgctgagaagcttgtaggtcagttacactatcttacaaaccttttcagattaatacatttgaccaacgcctaacagtatcatttctgccagaaacatttgatagggtgaaatcttctccatatgatcaacttgagggagttcagtacgagaattcggattctgctggatacctaagcaggttttcgttaaggtaagtgaatatttcattgttttaaggtttgcagcagagtttttatgcattttttaaaattcaaatatctggatcttgatgacagggatctacttaaatggtgcaagcgcatagcagggctaggctttagctttgatatgaattgtgcatcactgtcagctcacgagtgtcactgcatctatcaagaggtttaacttagtttgcaggcttttatctttgttgtccattgtgtaaggtgaatgatttctctttgctgtcatagtttttaatcccttgtttgggtgtttcaggctgttgaaatatttgctgcctcgtcaacttcagttgaacatcgcttgactataaggaaggatattgcccggatgtggcaagtgccgccaagtactgttggagataccttgtattctgctgataaacctataattcaggtctccataattaaaatatgtagccattgcaacttccttttcctttttttttttgggtggcaccatccatttctaatattttaaaaaatgttgcaggattcacttactgatataaaaattggccgagtttctcttcaacgcactcaaacttctgttagtggagattttttctttatttcagcatcctgcgatctattacctaatatattttacattttgacacttacacatacttttacagatgcgtgcaaaaagaaaatcttttgttgagatccgaagttctcttactttgcttgagagactagctgcgtcagttaaatttaatgagcctgtcctcatggttggtgaaactggcacgggaaagactacactagtacaggatcttgccctgaggcttggtcagaaactaacagttctggtaatgtttcttatggattccattctctcgctcgcttctttgcaatttatatttttgatgattagatatatacttacaaagcttcctaactttaactaatatatttgtttggttcagaatttgagtcagcaaagtgatgttgctgatttattaggtggatttaaacctatggatgctcagtttatatgctttcccctgtataaggagtttttagacctcttcgtggagaaaaaatctatcaaggtattcgactttcgacgtcactcttgcatatatgtatatatttgttttactgttatgctgataatttgtgtgccatttcaggcaaatcatgcattttttgcccttttgcaaaaaaatctcgccaaaaaaaaatggat

SEQ ID NO: 184640 - DNA, 2149 bp, Cannabis indica
aaaaagaaagggaaaaaagaaaaaaaaaacttggaacttgcaattgcaattgtaattgttgaggaattgcttgcttccatgttactcttgtaactcttttagttcatagtccaaagggtctgaaggcctctttatttttcttttttgttcttagtgggagttttgctattgaccccacaaatgtaaagacttggaaatccattgagcattgtccttcaagatatccattcaatatgtaaaatgaaattagttttaatcattgcactttcctctgtctttatgcttctgcaatactcttttgatctcaatacctttatttataggttggtttttttgtggtgatattgtagtttagtttctttttctattaaattctctatggaattatcccaacactcaattgattgcatcccataacttacttctcaagtctcaactggttatagaacacatttcattttcccttaagtacttgctacttagttggtttatgcaaatctaagtctgatttgggttgttgatatttctcatcaaagtgtagattttacactgttatagcttcattgacacagagataggggaagtgggttgcaggtcctatagatacatattatagatacactgcatgtgcaaacacttttgctaactttggagatgactagacaagtaggtggatgatgtacttccttttttatccttttgtgggaagtgtttgaacaggggacccatcgttacattcactcactcacacactcattcactactcactgcttagctgaattgaaaagaaagacttgaaagctcatagctttcactgaatagttgcttcaatctttccaaaaacatgtatattattatatacatttatattggctccaaattgtgggggcaactgaaaaaaaaaaaaaatactgcttctgcttccccaggaatctattatctttcgttacccatctagtggattttgatataaaatataaaagaaaaagaaaaagatgtagatagggtcatgaaaatgatatttttttggttgtcaacaacaaaatcatacttaagattttctttattagattgtctttggatgcacgtagcgttcaaataaagatgggctcttcttcccatctattctttccaacatattgtttgagttgtgatttttggtggggttttttgagtctccctttgtgttgggggacattcactctcttgtttgcacaatctacttttttttttggctcatacattacacaatacacactacttatttttttttttctctctagtctctatacacaatttttatatatttgaatttgttttgattgaaatagtctcataataattcctttcgttgcattgagaaaaggaaccttagtataaaaggtggcttggtattggcatctttgaacgacaggttgtcccaaattcatgggaaaaagctaattcttatcataaaaaagccaattagagaattcttgtcacttgttttagtattcgaccccctttgaactttattattggtgatgggctttttaaggtctatctttcggttttgttgtgctatattgtggatccatttttatataattatacaatcttttctttcttctttcttccacgagtataatcaatttagtatttagcacacacaaccatgagctcttgtaggcccatgaagttttaaaatgaccaaagtcattttataatgaaacaaattatgtaagtgaggaaaagagtattatttatctggtattttcgtttgtttaagacttgagtaaagtggtaatgatttcaaataatcgatttgatagaatctgggaagtcagatacgctaatacgtttttgcatcaaatcaaatctaattagactggaacatattcttatgacaatagcctaagaatcaaatcttctacggttcaacacgggaaacgtctactaagttttttttcttaaataaacttcagaaaattatataaacttaattcttcaattaattagccacacttatatttctctcaactcttatatttatagaaagttggtacttttattaagttctgtcatattttggcggatataactttgtaaattagtaattttaccctataaatttttacaactataaaattgaaatccatctgaataaaaa

SEQ ID NO: 184641 - DNA, 3946 bp, Cannabis indica
atcaaatattattgccattcctaatattaatttagtatccatttttgaactgagtgtttgtttagttctgttcactgagcagttttgcatttgaaatcttgtagttttgatactgtagtttcggtcatgtatgtatattgatctatggttatgtagttaaggtgtttgattgatttatttggactgtatttgttatttatctcttgatattggccatgtagttaaggtgtttgattaaatgttttgaagaaagaaaaatgatatcattattattgaaggtaagtctccaatgttactactcatgcttcgtcttcccctttaacactttttccttttctttaaacaattgttttgtttttctttttttctttcaacttttgtaatttcttgcagtgacagtgccagtgatgaaggtgaaggtagtatgtcgaaagttatatgattatgttcgctatgatcttaaagagatagcttttccatcctcattgccagaccctcctcatataaaaaaacgtagaaagctcacctgggctgagcgttttcaagtatgttatccaattcttcttttctataagtaaattcatattagattgttatggttgatttgaagttgtgggtactagttatttggtattacttcttttgagtgaggttaggttttggatgataagcttagcttgaaatttctgcattctgcatacaagtttcttcaagttttaggaggtttttgagctaccttatgggttatagctttaactgaataggtttttttcttggtaaattgaggttattatttgtatccttagtaatgcgtatagggtatgtgaactcttacaaatgaaaaggcttgtaaagggaaagggtttgaagggttcctcaaaatatgtgtcccaaatgtgtaagtgaactcattaatgaatgagaaagatcatcactttttttttttcacattccctttgcgttccatggcacattggtcaacatgaccataatatttcgacttgaagtggataggttttttgaaataagcccttttttgaaactaaaatccttgtgcttgttgagatggttctttgtccttttcagttagatttggtaatttttgtgcttagtcttctctgttttagaactatgatttgatggactaaatcttgcatcttggtactcattcaatgatttgtgagaatggttcacgattcttactgtgttttttttaggtgttgaaagaggcttctaggctttatggtgctagctgggtgaggaatataggtcctgaattacggccaaatgactataagaagactgaagaggatgaagataagccgaatgaagctagtggtttgaaaaaggagaaagagccctctacattggaagatcttggtaaagacagtttttttcctttcatggcaatgtcaatttcatttgatttgagactaaatgcattttatgaattgaacagatgcattttgttatttctctttcttttaaagcatgttttcatattatattatgtttgggctttttgatgggaagaattctggaacatatcaatttcccgctcatgttgaatcagtttgtattcactcaaactttgtctatagaagctcgcctaactccttccacttattctcctcctaaaattattttttaattcctgtgaaaccttattgttcacattagtttttctaatttttgtataccttctgatatttttgttttgaaataaattaacagctgtggcagctagaggaggcatggagactttaaagcctgttttgcagcgggtttacatgacaagggcttctgcgtataaagatgctttgaaaagtttcatagaagggtatcaagagggcattcaccagattatggaaaaaaagttatcccagtctcaaaaggaaagcgataaaagcaataattctacttaaaattatttggcaagagggaatagatgttaccgctataagctcaagcacatacttttgtctagagtttcgcaacaaaatgctctttttgtaagaatgacaatatcattcctgtcaaatgtgaatatcttagacatcatatatattttgttttgtagaataatcctctgtcatactgaactttactttttcatttctgcgttttaacatggctttagaatttgttgctctcttattttgtctaataagatcaggagattttcagatgtttcttcagtttatcctgggtgattataaatggtttctgatgaaaatattaggagtgaaaagcaagaaatgcaattttttgctgcaaggttggttcagtagctgtaataagcattctgtaaagttaccctagcatgttagttgatgagtagtctttattcaatttcaaatctttctggaacatgtaatttagagtaagatattatgtgacattaagcttgcagtagcattatttctctttctttgagtccctgtgaatctagctgtctggattttcagtgatataattttcttttactgtaatttcttctgaattagaccaccatctgtatgagattgaagcagacaaatgtcttttgcttttgaaaaagatgcacgtggatttggtcgaccacttgtgacataaaatgcaaggtaaaacttcatgttaaactgagcacgacttgcatacgtggaaggtaaacaggacctaataatttctccttttgctttttttgggttgataaaggtcttttctcttgactgcagaaaattacttcttaaggaatgcttgcactgttgcctggggaaaatgatcatcaggtaccatcaagcttactatttttgagaatatatttttttattttatgtggctattatcagggctttcttttgtgatagctattggaaccaatggccacaattcacaacaacgatccatatcttttcaagtacagggttctggctttatgtctcccaaggagacatggtaagattgaggatccaagattatgaccactaatactatcaccttacctttattaaatcaattgatggccttgatagcctttgagctcaaggaaaccaaagtgtctttctgtttctgtcacgtgtatatttccaaacattgaactgaccttcgttttcaaagaagaggcaagacattttagtgtaataaatagttcattggtttgtttctttacatgtttcaatcttaaggcgtagatataagtctctcttgttattagaggtcgctagtagtacccgagctgttaggtactttaatttcttcatatgtattaaaactcaatgacccttttctcgttttgtccttaccattatatcttgatagtgcaatgctgatattaatatcactgtttgtctttatatcccttagatttgagtaataaagggtcctacctttttaatttcttgtttcatttttttcctatggttggtacacaatgaggttgaccccagagctctaaagcaataaaggttgctgctaacgggaaaagctaagtgggatgaagaaaatacccacatgatgtttctattattgtactgtagttagtcatgcatgattgaattattctccaaggacaaacctaatatacaggaagagtccgttcacttgtttgattggccaccatcttgaggccaatgatagcaacatatatctgggactagggtccctcccacttgcagtgctggtgagccactcaacattggacgccattttcagaagaggtcaaataggtatttgctcttgtctgaatcttttatgggccctgataatcacatgtcacagtaacctgatcaatcataaataactatcctgcatttcttttttctcccttgatttatacgcacatgtttgcaacttgtatggaatgtgatacatggagaaaagcttgaagcagtagtagtattaaacagattgatcttgtcctattagtgcttgggcacttagatagaccccatttctctctctctct

SEQ ID NO: 184642 - DNA, 2532 bp, Cannabis indica
gaaatttatgcatgtaatttggcaatgagtacagcctacctatgcttgcctttatgtctattgtttgacaaggcttttgtcaatgacagggcagcacaaacttagagtccattcaaatcataaagaagcctggtggatcattgaaggattcctttttagatgaagggtatgtcatgttgattttgtttcgtttgttgcagttggtctacttatcacattgaaatgtttatacctggctttttttttgtttacgttttgattggagcattgcaagtgtttccatgctttttgtacacatttgttctcttgaagtatttgaatatttttgaggcttttaatgttttatccaaaattcattaactgttcacttactgcagtatctttttctaatgtactttcttatgcttgctcagatttattcttgacaagaaaataggtatcgggcagccaaaacgcatagaaaatgcaaagattttggttgcaaatactgctatggacacagacaaagtcaagatttatggggcacgtgttcgtgttgattcaatgtctagggttgctgaaattgaaggagctgagaaagataagatgagagaaaaggttcaaaagattatagctcatggcataaactgttttgtcaacagacagttgatatacaatttcccggaggagctctttgcagatgctggaatacttgcaattgagcatgctgattttgatggcattgaacggctagcgttagtgactggtggtgaaattgcatcaacctttgacaatccagaatcagttaagcttggacactgcaagctcattgaggaaatcatgattggtgaagacaaattgatccatttctctggtgttgatctgggtcaggcatgtacaatagtgttgagaggtgcaaggtatttacagaacatttcctgtatttttcctactctgctgatttgtttttcgacctctgcattaagtgtagtgtgatactttttttgttgagtcactggctataatagcacctataacttattcttggttaattgattgatttttgttatgtcctttatagtttttgcatcaaggttattaatcaaagttttttcctcgtatttttgtgaattaatttatatttcattgtctaattttaccacgactcttttcttcaatattgtttttgcttcatttttgtttagatgttacaaattgacatgtttgtgtgcttttggcagccatcacgtgctcgatgaggccgaaaggtctctgcatgatgccttgtgtgtgctgtcccagactgtcattgacagcagagttttgctaggaggtggatggcctgagatgattatggcaaaggaagtagatgagcttgccaagaagactcccggaaagaagtctcacgcaattgaagctttctcacgggcactcttgaccatcccaactatcattgctgacaatgctggtttggatagtgccgagttggttgctcaacttcgtgcagagcaccacaaagaaggatgcaatgctggaatcgacgtcatcactggaactgtaagtgaattctctcttatttattttagaagaggtgattgtaatcgaaatatgatttaatggcaataaactgattatgaaaatcacaggttgggaacatggctgaactaggaatttcagaagcattcaaagttaagcaggcggtattgctttctgcgacagaggctgcagagatgattcttagagtcgatgaaatcataacgtgtgcaccgcggagaagagaagacagaatgtagagtgtcaattatttgctgggaaagaacttttgtttttttaatgttctgtctttctcttggcatgtgcttttaggacttggtgtgttatatcaaaactctagatcaggaagaaagttttgttggcttgttttgtttccccttttcagacggtttatgttaatgcatggttttgtctattttatgtttttgtttttttgagttcacttcttttttatgtttgttgaatgagggcttaagatgaacctgttgagaatcaagagaatggggtgaagagtagagtagtcaatgattttatctataatttaatatttttatttttgatttatgtgagataatgttatctaatttttttttttttaagatagtggttattttttgttcactaattgtgaatcaacttattcagtgttattttgttcgcggctgagagtcatttgcttgcttatttttgtttgcagttgggagtattatttgttcgtttgcggctggttaactatttgataggtgtggatcgaaagttgttagggatatggttttgatactatgttgagaattataaattttatttttaaatcaattggtgatgagtagagtggtttatgtttttatgactcaatatttatacatttaatttagttttgggatattttcataaatacctaaacttgatgaaaaattataaaaatgaattttatttatttattttttgttgaaaggagtggttgtttttatgttgcaaatatttttttatctttaaaaa

SEQ ID NO: 184643 - DNA, 3819 bp, Cannabis indica
aattcttaatattaaattattttgaattgctcaaaagagaggtatgcaaagtagttaataatatgggttttctggcattggcttattactggagttttgcatgcaagggaagtatgcgcgagtcattttattagttctcttattacttattgcttatcttggatattctcttgatgcaggttacagaagatcaaaatcttttgaaggaaaaagtgcaacacctaagtggagatgctgggattcagcgcatggaatgtgctttatctgaaacaagatccagctactttttagcgaaggaaaatggaaacagttctgggccactgattactccttttatttctccaagcctacctaattccacacctggttcgtctgttgctagcacagatatgaaaagtcatatgggtgaggattctacaaaaccgagccgagtagttcgttccttgttcagggaagataataatcctgaaggatcaaattcttcagcaccaagaaccatttcggatggacagctaggatcttctgttgagaagttggtcatggagaatgaatttattgtaaatgaatttcttcacaagcagcaagatgcttttagtgatatctttaatttgtccaatgaagatcaaaatggcatgaaggtcagtgctctgtcatattgtcactagggtatagtgtatgctgaattagtaaacataagaatatatagacaactaaatgtctatttatgagaacgtgtttcctagaattcttaggctatatctggatataatagtttaaaagaaattcatgaaattttctattttcttttgcattctttcttctttttcaattaaatattgtagcaaagaacatagtcaagttgcttcacatcctgctgagaacaagagaaacagcttgcatatttgtttgcttatcgaacctaatttcatcatgttttgcaggcaaaggtaagagaggcaatggagaatgctttctgggatagcatcatggaatccatgaaaagtggagaccctaactatgatcgagttgtagaactaatgagggagatgagggatgaactttgccagatggctcctgagagctggagacaaaggattgttgaagctattgatttagacattttttctcaggtagagaagcctcttaattcatattttattgtttctgcaaacagcagtaacatgggtgtacaaatttcaaggtcttcactttgtttttgttttgtcaaggtgcttaaatcaggtaatttggacattcactatctgggaaatattctggaattttcattggacacattgcaaaaactgtcctcacctgcgaatgatgatgaaatgaagactgctcaccaggggttaatgaaagaattagcttgtgtatgtgaagccagagatggctcaaaccattcaagtgtaattgctatgatcaaaggtctgcgctttgtcctagaacagattcaggtaagaacatttacaaaactttatataaacatatacgaggatgttcttatatatcagggctatatagctttctcactattcatttgctgggaataaagatatattttataaattaattttattaatgtctctctttaaaagctgcatttttaatttcagggttctcttttctttttctcctttccctactatattgtttcatcactttgccacagtagttgcatctgttatgatgtacttatttgtatggaataacaaatttattatatggacttatcttgtaggtgcttaagcgagaaataagcaaagcacgcataagactcctggaaccattgttaaaggggcctgctggtctggattacctgaaaaatgcttttgccaatcgccatggatctccgtctaatgccaattcctccctaccaaaaacatctcaatggctgtcatctgtgtggaatttcaaagatcaggagtgggaagaacatgtgaattccatctctactttggaccgtgaaagttcatctcatggatcaattccacccactaccctccgaagtggtggaacttttgtgctcaaacccaactcagcttctcttacacctgatgctaacaccaccacaggttcggatgccaactccttgttaaaattaataaagaaataggttgaactaatgtttcttttccttatcaatttttctgttctgctcaggtaatcaacaactggaatgcaagggagaaaaagttgatctgatggttaggctaggcttgttgaagcttgtaagcaatgtatctggtttgactcaagaggttctgcctgaaactttcacactgaatttttctaggctgagggctgttcaggctcaacttcagaaaattattgtaactgctatcaggtaattggaaataaatcgataattctcctggtgatgagtgactactagttttgaaatagactagtgactgactgagatatgtttatgctatctgcagcattctcatttgccgacaaactcttctaagcgagagaatcatagacagccctgcagcattggagggcatactatcagaatgcagtgagagcctagtggatctcctggatcgtgtcgaggatgcaggaattgaagaaattgttgaatcgattagtaagttcttcacagacggtagcaaagacaaccaaaagcttgaatcacggaaggcggtcatggcaaggatgttaaccaagagcctgcaagctggagatcctgtgtttgaaagggtatccagtgctgtccacttgtctgcaaggggagttgtgcttgggggaagcaggcctgatggaagaaaactagctgagatggcactccggcaagtcggagctgctgtactgactaggaaattggtggaagctgctgaagttttagtggtggctgctactgtgtcagttagtgttcatggagcttggtacagacaacttattgataacatgtgaaagtttgcatatacaaagacgtacagaataagatattgtacatatggtacctgtaacagcttgtgtcatgtgtataaagctgtgtttaattatttaactggagttgtagatggtagtggcttcttcttttttatatgcaaaattcttgggaacacaacaggaatgtaaatatgtttggatgtaataaaaggtcttgttttctctcgaattagcactttcattttcacaaatgaaaaatgatcaaatatttcaatggcttggtttggccgattaaggatgtttgagtgaagccatcatatcagtcaaaaggttattattttattatttttgcctaatctgtcaagagaaattataacccatttaaaatatattcgagggttggattggcttttattacaatatttgttgaggaagagtgttcatattatgggtgttcacggattggaatggtttgaatttttatattttttgaaccaaattaatataacggttttttgaatattaaaaatcaaaccagaccaataaatttctcaaatcaaatcattaagaatggtttagtttggtttgaaaccaaggtttaagtagaatatttttttaggataaatagcggcataagtacccaatagtttgtaaaactagtaattatgccacttacagttttactaacattgggtacgttatgccgctaaaaataaaacaattgggattatgccacttacaagcttaaaacttttaggttacttatgtcgctatttacccttactaattatttattatttttctaagtagctgtactattttacctaaattttaattttatttttctaaagtatatatttacctatgatatgtaacagatctgtaacatattgaaaaatacgtgttgttgcaaatgct

SEQ ID NO: 184644 - DNA, 10498 bp, Cannabis indica
tattattatcattttgattaataaataaatatttattattattattaaattattggacattttaatatattatgctttcgagctaattcattatgtattgtattgtatttaagtttatattttttttttcacttgtcgtgcctaagttatactttttttttatatttcatgcttatgcttctcgagttcatgtcaattttatgtggtatcaaaaaacttaacctatatttagactactaatcaggccgaatcatagcaatagtacatatattttttttttaattgaatgggattataatatatataaatttgagtaaataaataattgtatgtatttatttattatttgccaactcaacactatttatttcagatttagatccatcccttaacaagacaaacaacaccgttggccatagaaacacttcctaataataattaacaataaattttataaatttgaatttatctatatggagaattatgatttaattatagttggaaatacatacacattattattattatagtacaatcctattcttacatcttctacttctctatagatatactgtatatttatttatttaatttttaattatatttattagaaaccaaacaaaataaagacttttattaagttagtatttcaatactatcttattttatttaacatttataaatcgattctttgctctctttatttattcttaaatttcaaaaaaaaaaaaaaaaagaacacaatggaggtgttggtgggtgggtagtgcgaaatcgagggctgtcttctttcatgggctacgacacactctctctcctccttcttcatctctctctacctctgcatctccgatccttgatctctaaggtaattttgcttcaattgtttctgaattttgattttaatcaaataatgctttcgaaatcgaccccaacaatttccacttgtttttttttttgcttcaacagccctagatcttcaccattgtcgcgcttaatctctttgatttaagtttaggaccttgccttgctgctttgctgtaccgattttggtggatttttacctggatcttgacattttttttatttcttcaccaagcttcgttttttgccgcgtcggaagtagtttgctttggggttttgaattctgtgagatcggaaaagggaaaaaggatcgtagggtgattttagttagttaggtcgatggcttctaatcctcctccattcgaggtggaggatcagacggatgaggatttcttcgataaattggtggacgatgattttggtccctcggaatcatctgccccaaaattcaccgagggtaatgattccgacgatgctaaggcgtttgctaatcttagcattgcggatgaatctcctgcattggaggattttagcggtgaaggtatggtggatgaactgaaaactgaagacggtgctgcccaagtagatgctgcagatgggtctgggataatttgcgaaaagagtgttgttgaagttaatgcgaaagatgggatttctggtgtatcggcgaactcagctttagatgcggttcccgagcctaaaaatgatgggacaggatctgaattgaggttagaatccatgagcaatgagtccggcagtggagggtttaaggtggtggggtggagttcgttccatgctgattctgctcagaatggtggtcatgggtttggatcctactccgacttttttagtgaattggatgcaggtgtttctggggaagttcctggaaaagctggtgaagatttgaccactcaagcaaatatgttcccttcccatgaagagcatagggatgaaagcttgaacaatatggttaattacacacaacatcaggaaagtcaaaattttgttgctccagtagagcagcaaaatacaaatgtgcaggatgtaaataccagtcaatactgggaaaatctttatccggggtggaagtacgactcaaatactgggcaatggtaccaagtggatgttgttgatcctacagctcaagctcaaggtagctttggaacgaattctgctgtcagtgactggactgctgtttctgaagttaaaactgagatttcatatttgcagcaaacgcctcactctcctatgggaactgttgctaaaaccaatactcatatgcagctacagtctaattcttttatgggagtttctgctgaaacaaatgcctatatgcagcagcaaacatctaattctgctgtgggaactgctgctgaaaccaattcttatgtgcagcaaacatccaactctgttgtgggacctgctactgaaaccagtacaagtcacagtgtgtccgactggaatcaaccgtcccaagcaagcaatgggtatcctgaacatatgatttttgatccccagtatcctggttggtattacgacacaatcgcccaagagtggcgaactctggattcttacacttcgactgttcaaccagcagttcaggatcaaaatggggttgtttcaagtaatatatattctcagaacaaaagtagttcctttgaagagtacaggcaggatgacaatcatgggtcaagaggccttggtggccaaggtcaagaaggtggatggggtggatcttataataatagtaatcaaaacaatctgaacttgtggcaagctgaagtacctaagagtgcagcctcaacagcatttggtggaaatcagcaactggatagtaaatatgatggttcacaattttatacaaatgaaaatccgcaggcatctttgagttcttttggagcagttcaatcgtacaatagagctaatcaagggcacaatgagaccaacgggactctgggattccaaggctttaaccctgttacccagccgtttaatcaagtaaatctcaacgaccaaaatcatatctcaaatgattactatagcagtcagaagcctgtatctcaacaatcatttcctggtggcaatcagttaccttataatcctagtgttggaaggtcaccggatggacgtcctccacatgctctagtaacttttgggtttggaggaaaactcatagtattgaaggatcatagtaacgttgggaactcatcttatggaagccaggtaagacaatgtagcttttttccttgcttatttaattttatttgctcagtgtgcttggaaaattagtttttttttgcagataagggatttcagagaaatgtattatttatccatttgactgcattaggttttcattcaggaaatattcttctttggatcttatgatgttactttgatggacttaagccttaaatagcatacatttatgtcacaaggggcttatcaatcatgttttctgtttgttacatgtgttaagggtcctgttggaggcatagtttctgttctaaatatgcaagaagttgtgacagagaacaccaatgtttcaaccggcagtagctgtaattaccttcgtgcgttgtgtcaacagtcctttcctggtccattggttggcggcaatgtaggaagcaaggagttgaataaatggatagacgagagaatcacgaattgtgagtcatctgacatagatttcaagaaaggtcaaatattgaagttgctactctccttgcttaagatagcttgccaacattatggaaaacttcgttctccctttggttctgaagttgcattgaaagtaagtcacatacttgcttcctgaacttgctgctcatttagttagctatcattaacttttttctttgatggaatattctcatagtgcactttatttatatcaccagtacttggtctattgctttagagtgtgattagaatgtatcattatgccatagaaacacttcgttaatggttagatccaaacttcagcataactcttcttatttgaatttaagtttagtcatcttatcaaccgtagaagggtgctccctgcttcattctagaaacgtttatgaattatacatctgataagcctttaaatttgaattctccgtaggataatgataccccagaagcagcagttgctaaactttttgcttcagcaaaggcgagtggagcacaattcactgagtatggcgctcttaactactgtttgcagaaactgccttctgaagcggaactacaggtaaaatttgctttctcctttcccatttcccctttatatccggcactaagatgagtccatgtttcaggcaactgcttctgaagtgcaaaatcttctagtttctggtagaaagagagaggctttacagtatgcacaagaaggtcaattgtggggtcctgcacttgttcttgcttcacaactcggtgatcaggtttgttatcctttttatttatccatttcaaacattattcaggtgattgcatgtgctgtgtgttatgctgttatttttttttaaactactttaattaattttggtgggaacaccttgttatgaccactccagttctatgttgatactatcaaacaaatggctttccgacaattggctgcgggatctcctctgcggactctatgcctgcttattgcagggcaaccagctgaagtgttttctgtaaatgctgttgctgatggcagtgttccgggttctgttacaatgtttcaacagcctgcacaggtgagattttgaatttagaaagagctcttttggctggtttgggctaaaacatcatgtgagatacttttgcctacagtttttctttgatcctcttgtttttttttcttcgctctactaataattataataataaaacatcgtgtacttagctgattttgaattagttaatgaattaattgtctggattaaagattgctaaagctggtgagacaacaataaccaagatttgcgaatttaatgtggattgggatttttgaaatcaatagcgttcacggaagtcaatgcaaatttggaaacttttactatttttctgggtttgacaatagtatgatttttccaacagtttggcaccagtggtatgcttgatgactgggaggagaatctagcagtaattactgcaaacagaacaaaagatgatgagttggtaatcatccatcttggagactgcctgtggaaagaaaagagtgaggtatgatatgtatcgagtaccttatcttctttaaagctttgtggaagattgtgcttttcatgatctaacacaagggatgtttcagattactggagcacatatctgctatatagttgcggaagcaaattttgagtcatactcagacagtgcaagactctgtctgattggagcagatcactggaaatttcctaggacctatgctagtccagaggctattcaggttctttattacctagttttcttttccagatatttttgtaaacttctatatgtcatgctttcaacttatcatccaaaccttactagttatgctgaacatgaagttactccctcttaatatcctatttttgctaggttagaagtattatttctctcagtcatttgtactttatgcaggatatcttacatcactcgttttctctatttagtttttctctttttattacctgggcttcgattgtcgttgttgccaatcacatgctatctcgttctcatatgcctaacttttcatttttgatatgtttatgtaattggttctccgtccatgttgtgtttttgctgattgttactgatttgatgtttgggcagaggactgagttatacgaatactcaaaggtgcttgggaattctcagtttattttgctaccatttcaaccatataaattagtctatgctcacatgcttgctgaagtgggaaaggtttcagattctttgaagtaagtacatctctctctctctctctcactatatatatttatataaatatcttaccatgatatgattgttttcagatactgtcaagcaatattgaagtctctgaaaactggtagagcacctgaagtagaaacttggaaacaattagtattatcacttgaagacaggattagaacccatcaacaggtatagtttggttccgataacttttatctttatcgttatttgattgattattagtttgaacgctctttatgaaattcttttttcagggaggatttacttcaaatttggctcctacaaaattagttggaaagttgctgaactttttcgatagtactgcacatcgtgttgttggaggtttgccgccacctgcaccgtctacatcacatggaagtatccacagtaatgaacatttgcaccagcagcagatggctcctagagtatcgggtagtcaatcaacaatggctatgtcatctttaatgccttctgcttcaatggagcccatcagtgagtgggctgctgatggcaataaaatgtcaatgcataatagaagtgtttcagagccagactttggtagaactccaagacaagtgtgtacttattcttcagtttcattcttcaatgctatttgtttcaataaaacctgtattttatgtgtgtgaacatttttttatgtggtttctaataaaaagggatctgatccattatatgatcaggatgactcatcaaaggaaggaacctcagctgattctcgaggaaaaggatcagtctccggggggacatctcgcatgtcacgtttcggttttgggtcagtgttgctgcaaaaaacaatgggcctagttttaaggccccgctctggtcgtcaggtagtctataattattggttttaggcttcctgtgattatgagtattgatatccttaatgcacattttaaaatgttttgtgttgctactgaaggctaaattaggtgaacagaacaagttctactatgatgaaaagctgaagagatgggttgaagaaggtgttgaggcccctgctgaggaagctgctctgccacctcctccaacaatgtccaccttccagaatggaatgtcagattacagtatgcaatctacgttgaagagtgatgcaacttctcttggaggtagccctgatccaaaaagttcaactccagaatattcttcagggatcccacctattccacccacttcaaatcaattctcagcacgtgggcgggtgggtgttcggtcaaggtaaacaccaattattttccccttataaaatgtgggttgcatgttgtcacaactgaccatttcaaaagatatgtaataagcttttcctgtctatgaaaatcatattgcaaaatatgtttatgaaactcctctccctatcgaaatgccttttcatcttcttcacgattgcaggtacgttgacacttttaaccagggtggcggtaggccagcaaatttatttcattcgccctctgtaccatctgttaagccagctgttgctgccaatgcaaagtttttcattcctacccctgcctcgggagaacagtcaatggaggctatagcagaaagtgtgcaggaagacgtgccaacagtggggacacatgaagaagcttccacatctaccggggaatgcagcattccaggttcccccaccgtcagcatccatgcaaaggttcccaagcatgggtaacattccaggccagcgagttatgacaaatagcaatggctccctttcttcactctcgcgaagaacggcttcatggagtggaagttttaacgattcattcagctctccaaaagagacggaagtaaaacctttaggagcagtgtcgtcgggcatgcctccaactatgttttcgcccactgacccatcatctatgatgcgtgcacagatgaatggtggcaattttgctgatgaactccaggaagtggagctttgagagccaagtagtaaagcaaagatgtacatattgagttttgttcctcgtgatcaaatacaaaaatagttgggggatgggtgtttcatgttcctgccattgcatccctcagaaaatcaaagtggtgggtatgatacggtacggtatatggtacgagttagaatttgagattatacaaaaagtaaatggaatgttttcctttgccttatgcctccttaaatctgccatgaattctgaagttgggtgcaattctaagtactactattattattattattattaactaccctgggaatcaccatcatctgaggcttgaggagctggttccatgtgggcaacacacctctgtatagttcatttattcatttgttggaagaagaaaccaaaaaaaaggaaagacccttttgaggtgtagtccaaagggattctccatagatctctcaaggggagatgagatgatagtgtattgaatttagacaaaggaaagaaaaaaaaatgaaaaacacaaacgaataaaattctatgcttgtgcctttccaatccttttcaaatgcagttatgaaattgaatcaattgttaaaactatttatcccattttttttgctttaaaatgttactaatatatttttgtgataatgagaatttccaattcactttgcttttcaatttttgtatttttatgaagacagataaaacatgcaatataattttaaagagtctgcactctgcatgcactcaaatttctcttattgattccaatgaatttgaatttaaagatattacaaacaaaaaatagtaaattctcttggaccatccttaaatggctttatagctatgtgcggcttctgaataaattaatgtgttgtagttgaggctgaaactaaagctgagcttttaacaaaacttgatgagacttaaaactcggccgaaccaggtgtccggggaaaaggaatagcatctcttatattttctacaccagttgcaaattgtacaagcctttcaaaacccaagccaaaaccagcatgaggaactgaaaaaacaaaatacaaaaccatacatcatgtacacaaaaaggcttaactatgaaatcagttatatataacatcttcaatatgaatttcgaatgtaattctttatctttaaaaatgttacaagagaaaaagaattctcacctgaaccatatcgacgcaaatctaaataccaccagtagctgtccttatttaacttcaattgatccaaccgatcttccagatattcaagccgttcttctctctggcttccaccaataagttcaccgacctatacgaacaatgttttgaaagaaacagcattctaatcttctctaatagcttttcactagtgaataaacatgtgcactgcactaaactcagaattgaatatgataaaaattgatattaaaaggcttgaagttacccgaggaaccaatacatccatagctgccacagtcttcccatcatcattttgccgcatatagaatgctttaatctcctgaaatagttataatgtataacttagtagattttccaaataaggaaaaaaaataccaatagcaatacaattttaaacctcaaagtgaaaaagagaaagagcagcatacctttggatagtccctgattattacagggcatccattgaatgcctcttcagttatatagcgttcgtgctcactctgcaagtcacacccccacttcacctaatttaacaaggaaaaaataacaaatcaaactacaaagatgagtacataaaaaaatagtttcaatgcaaagaagaagttcaaatagcatttagtagtaccgggaattcaaatttcttctttgattttagaagaagttcaattgcattagtatacgtcaattgtacaaattctttctgagcaacatcctgttgacaacaagataataaaaagaggggaaaatgagaaacaaaacaaaacataaagcaagatcatttgatcaaatacaaagagaaatgagtaagaaggttaagttacacgagctcatacactcaatcgatcaattatgcccttctcaatccaagtattgaaaaaatccatgtcctccttgcaattttcgagaacatatttcacctttaaacaaagaagcagatatcacaaaatagatacagaatgataaaattgaactcttaagtaggccattccttctgcacaattttgttcacccaaatctagaagatgaaatgtaaaaagttaaggaaggtaacatacgacatactgtagataggcagttgcacaagccatatcatcattcagatcagcaaatgcaagttcaggttcaatcatctttaaccaaagggaaacaaatgaaattttaaggtacatgattcagaatagaaagtgtttaagaaattttgaagaagagatgtacaagaaactacataaacaaacccttacccaaaattcagccaagtgcctagaagtgtttgaattttcagctcggaatgtggggccaaatgtgtacacctgtgagaaaccgttttattacatcttgttttggtacaacgctttatctaagataataattaggacatgactaaaagatgtacatctgaaagagcagtagcataggtttcagcattaagctgaccagacacagtcaagaatgctggtttcccaaagaaatcctgccacatagataaaaagaattgaaataaagattagcatggagctctctcgtcggaatgacacaatgtacacacaaaatgctgcgatctttatgaatagaaaa

SEQ ID NO: 184645 - DNA, 2893 bp, Cannabis indica
attagtgatataaattagaagagagtgataacatttatattatatttaattaacatacaaaataaatgctcttctctcctcatttcataactgtacaaaattaaatcgtgtatatacatatacacatgtaatgtatatcatcatctttatcttccactattttcgcttttaaagcgttttattggatctcaaacttttcaaaacggtttctacactacacaccattattattattattattatttacattacagtgagcagtacatgtatatatatatatatataaacttacagagagagagaagagagccccatattcaatattgtgagagtaacccttttctcagaatcctaaaacagataatgggtcgagcttgttttccaacgattctccttgtttctttcttaattctcctctttttctctcaaggtactattctcttctattttcatttttctctctctctctctatttttttttatatatatttctgacattttttttttgttgttgaaggatttgggaggagtctgaaaaatgaagaattttctgtagaagtagttctaaaggtgggtccaaacccaattctgtattttttcttatatataaattttttctatatcccaatttcccattatataaaaattaagtcctttgattttatgttaaacttgtttggtgtttggttatgtgtttttttttttgttttgtttaggaggaaagtgttggtggtgatgaaagtgttaaagggaggaaaatgattgaaacaatggattatgatgagccagagccaaacaccaacccaagaggtgggtttttctacagcccaccacccaactgatcatccttctcaccaattttcataacaaaattctcataaaattaaataaataataattatgtatttgcttctctctctatatacatatctttattagtgttttgatatattaataagcagatttacagagtttttttttttttttcttgtggaagtgtaaaatatatattttatgaataatgatgatgagtcttatgtgttgttctattttgtttgagcattgatgaggtgatgtttaagtaagactcaatattaaaaatattacacctaataagagtattagttaccataagtgctctttactaacatttctcatttgtttttttttttcccctatcacatacctttagttgaatttaagcttaattcatgtaattatttaatttagagggatatagctaatgaaataaaataaaaaataaataatttttaattaggtagcaatggaatagaatgaaatttaagcttatttgaagtaattatttaatttgtttgatctcaaaatcacaatttgagaccaatacaaacttgaattctattaatcattttctccaccaaacactcacaatcggttttggagattttttttaataatgccaaggtatttaaaaggaagattactcttctaaaaacgatataaatccacaattctatctaaagttaaaagagtacatacactgtaaatttatgttggagaaaagcttgaagccccttaaaattagagttgcaaatttataattctccttacagaataagaagagattatcagcaaagcaaagttgagtaaaatgggtctaagcttttgcaccttggatgaaaatgaaagtcagtctctttggtaactttgatcatgaaatactccattccaataataaaaagaagcagagacattggatcgccttttcttaggccatgttttgacctgagataaccatggatgctagtgccaccattgatgtagaaagaaatttaagacagtgagcatctcatgaagaaactcacaatcaagagtataagtctttttgaaggtctattttaaacatacaagctgactttgcacttcttctatcataatctcaaaccatgcatgtcttggcaattcatgaagttgtgggctatattcactttcttttcacaaagccactctagttttcagaaataattcccaaaaaaatttctctcaatctcttacaaagtattttagttgcaattttatagaccacattgcaacaaacaatgtgtccataataactaacccgagttcaaaaaatacagaatcgcttcagaaacctcagtgatctcccaagtattacttttaaaaaagacattactatatccatttggacgtagcatttttatcggaaattgaataaagagcctcttttacatgagagagggcatattaaagaagccttaattggctatgaatatatatattttggagaaattcatgcatgcatcaaaattaataaaagacttttttctttcctttttttcataacatctctcttctttttatgatacgtatatgtattttattgcagttttttttttttgagaaatgctaaagggcaccactggtgcctagcaccctcttacgtgtcaatatcgctattggtgcaattaagtatcgggtcccatatagtttaatataataatttttatagagtatcgctagccaattgcaagtcgacacatttagaaggtgctaggcaccactggtgcccaatagcaatgctcttttttttgtgcagcattgctagtgcccgacatttgctattggtgaaagccttacgattagttagtaatatttttttaaaattattttttttaagttatatgagatttaatatttaattacactaataacagtataacattgagaagagtactcacgtaatcccttttagtaattctctcttatttttttttactaatttctatttctaacacaaataaactgagctctttctccctttccaaaatttggaagataagctggccttaaattctcccacactatcctaggcgttagtatttatataagtaag

SEQ ID NO: 184646 - DNA, 6583 bp, Cannabis indica
agcccagctgcatctctctctttgatctagatcaatacttccttcaacccaaccgcttctgccatgtgaggatccaccttccccattcaaacctcagccaaagcctccaccagctgaccttgcgagtcctgagccactcaccccagcccaaaccgaggttctgaaccaaataaagcagcgtcacaattaaccttgatgttatttccttcgaacctatcacaatcagagcttttactattccaaacaagctcattcctcgcacaccaaatagaccaacagatcatgtagattttctcaatcaaatctgcagaaatagagaaagagagtgcaccaacctccaaacgagagccacccatccaaggaaaaacccacaacaatctttgttaaccattgtcgagcaaaattcaacaagacaatgagacagtctccctaaccgaatgacaaacaagacaatcctcagttattagtactcttctactagacaaccgagttggagaaccataagattttaatcgttaggtgcataataagaccatggtgagcttatggaccagggcgggcttaagattttgatttttgattaattcttgaaaagtaaaattaataataatgatgattgcatcatttaaaacactgaacttaatggcgacaataaatggaattacaaaattatgtgtatgcgtcattttacacatgtggttttacatcaaaatcgattttgtatagtataagcatgtcaattaagataaagcgatttacactgcctactgtaaagtaacataaattagagaactaaagaaacgacacacaacgtatatgagccacactctcactcaacaccaagcacaattcatcataattcgtgctaatttataaataagcatttcattttccttgtagtactttcttgcgtataataagcgacccttaaggggtagtaacgtggtgataggcaaaaacgctataaacagatgccagaaagaaaagaactacgtatgataatgagactgtcattggacagtagattttggtgcaatagtagaagtggaatcctgatcgatttctttgcgagacgcttcccagagtcggtgctcgatccccaattttctgagctccattaaaccttgctcaactgatcaacaacatccacaattaccaataagcaaaataaataaatacatagagataaaagttggagaaggggggccataattctaagtaccatcaacagcatcatgtgaggttggtgagtgtgcactgcggtttatccaaaattgaagtctttctttggcgatttcctgctcaataccatgaacttgggcccttctccagaaatatgtaagccatgcctgtacaacaatttatttaataatgtagctatcatctcttaatgcggttaaagaaagaaaaaaagaaccaatattgaacaagtagagatgtttagccaaaatccattgttaatcactcgatacttctgacagaggagtatcactgacactgtgatactaattgcttgaggatgcacgtctactctaataaatgtcaagagcaacctccaaaccaaatgacatgctaatggagatacaattaaaggaaatgtcatacctccttgaaaagaacatcctctgactcctccgggctcaactctgcaagaatattgatatcaatatgataccagtgctcatgatgtcaatcattataatgcattgaaccattaacttcaaaggattaaaaatagagaatgtaacctcccctactccctatgtgtagtcagagacagaaagaagaaacagaagtattcaataataacaatatgacttaccaattgcctccataaattttggatcaccaggtgatttgaaatctgaaactaaatgagacaagagtattatgaaaaacatcaaagacctataacttgaagatctggacaaacaaaatggtaaaaagtccagtgtttcctaacagattttgcatacatcaaatagaagaattatcagtaaacaatggtctacataataaacagtataaactatatttctgggtgtagttgatgaaagaataaataaatatttcagacttctttcccaccatttttttttcttttctttttttggccctggcagttcgacctggagaccacccagtggaaccaaggattttgagtctgtggagactcaaaccttggaacaaatgcctaccaacacttttcatcactccttaacactagaccacccaccaatattgacccacaaatgaaagaacaacaaatactagcaatacatcccattttaatatgtaaacaactgtctccacaacgtggtgtacataatttaatagttcagcagctgactgttttggaccattaatttttcactttgagagataaaattgtttcaataatttgacaagaattgaagacagccaattcaagtaaccaagagactccacaaccagtaatgataagtatttgtcaatctctatttgctgtaaacataaagtgtctctaggtgacaaaatcaaacctgaaatggataatcgagcagaatttgggcgacgctgctgggccaatgcaagcacaatagcatcctcaaccttcaagttgcaaacataagatatattacaggaacagaaactataaagcacaacaataaatcagatcaactcatgctcgctacagaagaatgaagcagacgaagcctcaattgaagttgagttcatatcagtcgagtaaaataaacctttaaggaagcaagttccttcagtcccatttcaactgaaagcatactctcaatgtttccttctccagttagatcattcaaatcctgaacaagcttgattctcttctcaggatcattaccacctactcaacaaagaattaaggtcaccataatttcaaagcaaaggcatataaataaataaatttatatatatgaggagctttttagggggagcatcacttttttttactcctaccgtagggcctttcctatttttcgtacttaaagaaattatatgccaattttgtaatacaacgttgtatattaatgttataataggcctcatgtctgttttcgagaaattctgaatattttacggcgtcgaaaataaagttcaaaaaaatttgttgcacgtgtgtataaaataaaagaggcatgtctggaactgaatgtttgaatcttatttttagcaccataaattattcagaatttccccaaaaccgacaggatgcctagtgtaactataatgtacaccataatataaaaaaattagtttataatttctctacataccaaaaacaagaaatgcccctatggtaggagcaaaaagatgctctcaccaaagaattttcctatatacaaaatgattggcacttgcccttttctcgactttcctccttggccttttgtcctgcagaaacaacaacttcaaatggaagaggagctaatgaagaccaatgttcatactttgtcacagctatatctgcacatatccctgcaaatcatagaacaaattatgtctagatggttaatcaaatgccatctgacttccataaataataaacaaaattaaatagacaaaatgtaggaagctgcagcaatttgtaaacataagtcaggatcactttgatatgaacttgaaaagctgtgcaaccactcaagtatgaagatgttttaaacacctcttattggattcaaaataacaaacaagagtaagccctaatgaagacaaatgtcaggaaaataattactaatggttatgttaccataactattcatgaaccatgtactaaataacaaaatgttacgaaaagaaaaataagattcaatcaccaatacaagttatagaaaaacgtatcattagcttaccatattttgaagctaagccccagtagcgagcaagccaacacctcttgagaactacttcttcctgatttttttataaaataaattaagtaatcaatttgtacataaatttaaggctctaagaagttatgttaatacacaccatctctttctgagtcaatatcattctttgtgtcattgatcgaagagcttttacttcagattcagctccactaagctgttgtacaactgcttccttcgcatcttttgcattctgacccataaaagaaatggacgaccagtattagtaaataatgatcgacccatttaaacccatacttttctcaaattatgaaaatcccctttgacaagctgtttaatgagtaactataaaagttaacgtatctgttcacttctagtaagagactattattctcattaaatatattttttttaaacgggttaaaaaagaaaacaatgaatcatgctgcatggcacttataacttattactgcaaccgtgcaatgttcacttataaggttaaatatgtgtgacttatcatcagattggatatacttatgagcatacaatatgcaaactaaatcaagcataatttacaacaataatttgaaattattttttaacatttagtggatgtctatcagttctcatttcagttctgctgcatatataaaagataaatggtagcatactcactccaagttcagaacgcagggaagaaatttccttatctactccaccctttgactgttttgcatccttaagtgcagcctgtggtagccataattttccatattccaaacatcttagtttcaatttaacaagaaatgacataaattcaatacatctacatcaagtttaattgactgcatgtgatactaaactaggtaaataaattacaaggaagccatcatgttcatgacaatctaagttcaaatacctctctttgacgcaatgctgcttccttcctgcaaattaatgatggtggaggtgatcacaggttcaagtagaaggaaaaggggatgcacataggttattttaaatagaaatcttcaacttacctgcttaaaagtttagcttccaaggatacgccttcccccagtgcagcaacctgacgactcgcaaacaagtagcaagattcatatgttggttctgaagcagttatatattgtggtatataaattgtttattaaaacaagatgcccaagacctgtaaaatccaatgactttagagattagaatgtaaaaaataaaaataacttagttacctgtttttcaagttcccgaaccctggcctctgcttcctcacatttatcttcctcagttctaagctgtacaagtgccagatatcattaagcaaaacaacaattttatcaagcaaaaagtgaataaactctctcaccttgtcaagaatattttcattttcttcttgcagcatatcaagctgcatggtcaaggggcaatttcagttagtaacatctttaaaaggaagcaaaataaaaaactcggtagaaaataagaaaaatgcagcccatgtgaaaataaaaagttgagaaagaacacatacttcatcacgaagtacagatgccccacgctgatctccagaatctttcgcgctatagggtcctgaatctgaaaaaagtctgaagttcacacctatgagtcattcactgttttatcttatatcgccaatcatttcatgttaattccaatgagtgaactaagtttggtttacctatgtttactgtttttggcgggaggctccaatggtggcatagaaaccgcagtccttagagatgtttttgggggtaccatgggcgctggagctgtacgaactgattgccttccagttgaggtggatcgtacagatgtagtttcttctacaaagttccgagccaactaattaaataggagaaaattcaattagctttcgacttcaagctccatgttcttcgtataactacatggattcatatatagaaaaagaatcctatctagcttcattgatgacatcacaaatttaccaaatctgcttaatttccatttaccatatgaatgtttacacaaatgtattccagttgttctaataatgaaaaaaaaaaaacattagattctatgaatatccgatctcacatttgccaaaattaaaataagttcaattaaggatctccgcttaaaattctcttcaacaacattgaaaccgatctctccgaatttcgaccaattaactcatggctccacacattgcgagtcttgtagatatattagagctcaaatgttgcctgagttaactaaaaagaaaattctaggaagcttagtatagtaagtttaccgctggagaaggagatcgagttgtcttcgaagtcggaatcgatgatttagcaccattgttgacattcctggagagagcaagcggtggaggagcactgtaacgaaatcctaggtcaccatcgtcgtcatcgtcgtcgtcggccgtctgggaggccatgacctgagcaaggcgctgagcagcagctttggcggcgaagttctgagtgcgcttaatgttggagatccctgaggaagaggaagatcgaacatggcgattacgcgacggtgacattaccggagaggagtttccagtggtggaattggactcgctgctccattgacgagcatagacggggctatcggttcgtctttggtccatagtaggaatggagtgagtgagagagagagag

SEQ ID NO: 184647 - DNA, 10077 bp, Cannabis indica
gccattttccttcaatttctttccttgaatgaataaaataaacaactaactaataatatattaagactaaagaaattgttgatgttgagtggtgctttgtagggtttttttactagtatttttttctctttagagttatttatatatatatatatatatatgataagaaccttatacatttataaattttctatggatagtgggtggtagggagagggatcaaaagtaactttggctttggaatagcatcaaatctattatcttgttctatcacaaatcaccaatggaacctcaacctccttctattcttcatcatttcatctattctctatttctttaactttttcttatagaaaggcaataagaacttgtttggattcaattgatatcaataaagaaagattctatatcttttaatgcaatacattgtttcttcagaactatgcaactgagtatatacatgtgctgatacatttgacatttttttaagcagtcttcaaagaggtataataaaaaaaaatagtcaaattgacttctattacaacttgaaaaacttacaacaatagttttatctactatatcatcacttagtaaaatagacaagctggtaatattaaaattggtagaagtattataatttgtaaaggttcgagagtaggatcaatgtcaatatttatatatttatgtatatatttgtcttcttagtattctggtggcattatttttgtagatttcaaaaaaaaaagaaaagaaaagaaagaaattaatattgggctagatgtgtgcaactgatgggctggtttgccgctaggcggacatgggtaagcccaatctcccgcaactgttaacaaaaaaataaagaaatgagcgcgaaatatattttaaaatttttaaaactctaacgtaacatcctttggctgacctcttaagaaacggactaatcatagaaaagaaaatggagtgattttaagcttcaaactgaaactacttccctcaattttgttatcatttccattctccaacaatcaagctccacaaaaaattgataatcgccattgttgttacgattaactatggagaagcaacttcgttccactcttcaatcctcaccagacgaattcatcgcttcagcttcaaaattcgccctcaaatcttcaaggacagctctcaaaaccctaattcacgctattaagccctcttccgacctctgctcctctttaccgtcctctcttaatgcctacatttctcaagctatccaatcattttgcaaccctactgcacccaaattcgaacaggaatccaaccggagtcccgctaagtcgtcgctctcgcccccaactaaacgtcaccgaagatcatctcggatccccagaacccggatcgaacgagacccggaactcaattcggcgccgaatacagatgaggagaagcataaaatcacccaaagtcttcaagccatcgcttacattgtacgaatgtgcgtttcgcacccgaagaaggtgttttctccgttggatttgttgccgggagttcaaagtttgcatgataatctgattgttttggagtctgattctgcgttgtcatcggagattgtgaacttgtgcgaagagtggtggaaggaggatttggcgggtcgtgaatcgttgatttctcagtcacttccattcttgctgtcgaggtcattgagtttgaataagaagcaggatgtgtatagagtatgtggtcttcgtgaggcctttgttctgttcgattttgtggacgaaagcattgaagacctcaagcttttgttaaatcggtgtgtgattgctccattgtatatgaaaacagaagaagggaggagattcattgctttcgcttttgggttaagtaggcagatgttgaaggagtttctggccatgatacggtctcaaattccgttcggaagtaaatcaatgctggaggcttatggtgatgttttgtttcgagcttggaaagtcgctgagatggacaccaaggaggagattgaaactgggtttttgcagggtttagtagaaggtgccatatatgcaagctctgcgacattggctgcttctgttaggagggttttgggagcttttattaatcagcggaccacaaatggtgtcgagaaactactttttgggcttactgagcctgtaatatttcggtctttacaggtattgttgtaggcgtttttctatgcatgtatgattttacaattgattttgattatgatgttaaagagagagaggtaagagcaaatttaattatcaacacaaaagttcagtttgggtgttgcaattggtcaagcttaatatgattcatttccatcgaatctacgtgttaaattttgttgtttgtcaattgctgtgtctttgtattttcatgtttgtcaaacaagtcaattttctggtgaagaaaatgatgatgattaatcgttaagtacaaaattcagttgagggaggaagagtatgtcataattaatttatgtgttctctatttcaggttgctaacacaaatgttcgtcaaaatgcactacatctgtttctggacttgtttccttttgaagatcctgatgcaacgaaggaggtgaaagatgctttgcttgataagcaattttacttgttggagagaatgctcatggatgacagtcctgacataagagttgttgcagtagaaggttcttgccgcatactgcatttattttgggaaatcatcccttcaccaaccatcacaaagatactaacgaaagtttttaatgacatgtctcgtgacatatgcaacgaagtcaggctttccacattgaatggcattatttatttacttggaaatccacaatctcatgaaattttaaaagtgcttctgcctagaatggggcatttgatagttgataatgtcctttcaacacgactagctgtggtagatcttctccttgtgataagggatattcgaaattttcagtttcataaggtatagtgagttgaagaatttactttgtttatatatatatatatttatatatgtatatgtattgtgagttgattattttgttttctttgtttatttcattctgttcacaggtggtggagttagatttgttattgtctacactagctgatgatcattctcaagtggctcagaaaataacgaaattgcttataccctcatatttcccctctaaagcatccaccgaagaggcttgtaaccgttgtgttacacttataaaaagatctccaatggctggagcaaggttctgtgagtttgctgtatcagagggggcatcgctcaagtctgtcttcgaacttgtgaaagtaatcatgagcttggtcttgtcgcttgataaactgcaagtagatcacgttaatggttttcttcttgctgcttccaatctttgcagtaaccttaccattgagccaaaatacaaggatgctcttagagaattctttgttgatgaaaagttgaagcgattgttcactaaagcagcatctagtaagcatgctcagtcttcaatcttcaacattgcgtccatcatctcagcagatgatgtgattgagattcttaaaggatgcatagatttaataacaaagtgtagtggtttatctggagatgtagaaagacaagctgaagtgaggtccgctcacaagttattactgtcttgtggtcagcttgatagtatgcttgaagttctaacatcacttctacaaaaaacggcttaccgttgccatgtcaaatttaatattgaagtacctaacccaagtgttttctctaagaaaagaaaacagggtaggtcggccagcaaaattgtagatcagtggaaaagtgtcagtaagaaaaagccaggcaattttgaagaggactatgcagtctctgtaggaatagcctggcaaattgaagacttgcttaaatcagaggatagtagaaaagttatattggaatctcagaatctagaaccactagttctagctttaaaggccatttctgaaatcagcattttgcagtgcttaaattgtgaatatatggacgtgtcttctgttttggcatacacaactctttcattgcacatgactcttgaaaatgttagaataagtagttttttagattgtggtaacatggagaatgatagctctgattcttcacaagcaagtctgaaggcaagtggtttctcagttctcataatttatgtgcttactttattattgcttttctctataatggtagctcttacatgtaaaatagcatagtgatatttcttacatttctcattttattttgtcaagccagctgctatgcaactgaagtttgtagtacctcgtactattactaaatattaaaatcatcttttttctgcagacagttattaaacaggcactggggcacttgcttaactgtacagagaagctattccaagaaggtgacatggaaaagttgaggaaaccatattcagagtctaagcaagcaaagagtactcgcaaaaaaaggaacaaggaaccagaagcggatgctactcgtcttagtgataatggtaagtgatgaacatacatatatatatatgtatgtatttatatttgtggataatgctcacatttatgacatatatgcaggatctgtctgtactgaatcaaaaaagatgtcaaataaggtgaaaatgcttacttcagttctcaaattcatggctgatgctactacaatgggttttgtttttcataatcacgagcggtgcttaaaattcacatcagactatttacgacatatagcatcaaccttaaggaatcaatctaataacctgaatcattttgaagaggatgatgtgaaagatataattttgtgtctgaagagctccctcacatatgcagcaaaactactcaatctagctcttaaagacataacagaagcttcaccgcctaggccacaaacttttgttcttgccaatgacatgcttgatctactgacctcaattgaacagcatctgggctctggttatgctgcaaggtttgtggccgcagctaagccttggctgcctgatttgattctggcattaggatatgggcacatgctgaaacagatacatggagaagtggcacaaaggactgtccttgattccttcaggctccattttccatcgtggctcgcggccttggctaagattgagctagctgagctgcagaaaaccgaacttgatgtggaagatgaaagagcttctgaaccagaagaattacctgctttcaagaaacttttggaaatgattctcgttttggtgaaaggaaatcccagcatactcgatgctgctggtgaaattttcttggttggctccttagttgggttagaagggaagaataaggggctggtattaggactagtacactttgtatgtaccaagttattcagacatgatgacaaggagtgggatgatataatgttggcttctctccaacacatatatcctcagattgaaagacacattgaagaagaaagtgatgaagatgaaaaacagaaattagagagtgctagagtgttgcttgaacctgtttggatgtatcatgtttatgaaacaggcagagtttctgagatggaagaataactagactcttttgcaaaagagtttttcatatatgtgaagaaaaaggatataatagctcttactttaatgctattgctttcttggttacaatttccacgtgcatataataatgagaaaatgaagccttgtgaagaaatttaactagaagtcactttacttaccgttttagtatatgaaaacagtttggcctgtttttaaggtgtactttctgagttatttcacatttttattccgagggtcgttgtatttaaatatgactttgctaggagattaataattggaaatgattctatttaaacattcttctactcaattttttttaaaagatttgcctttgtgttcgaaaacatattaatatttaaagttaaggaacagcaaagcgcaaaaaatagtcaacaaacaaagtttaggagaatattacaaatattccagtaccataatagaatattacatgtcacttgcaaagagaaataataggatagcaatgaagagaatctagccttacaaagaaaattttggtgaaatgactaacaaaaaaataataataaataaaataaagaaagagagaaggaatcaaagttaatttacaagactacaaactgtaaaaaaaaatggaacttgggctctgtttggactcaatttatagagaacatcccattccatacaattttctcttcaaatttagttttgggaactttttttagtcatccaaattacgttaagcttatgttatatagtccctctattttgttatttctattttcctcataaaatctgggttccaaacagaggtttaactaaaaatatacctgaaaattgtttttatttaagcttatgtcacgatctgtcttgttctctaacttgatgatatatagaaaccaatctgctgagaatgaatgttaaatcaaagcaagtgtggttcaaacagggatcatcttcaaaccggcagcaacaggcatgcctagaaacccaatgaacaaactcacaaaccactgtgaaagagtgaggggagaggtgtttgcaaatgttccaaggaattcaatgataattatttggaagaccacagtgcatgcaaggacccccacgaacacataattatccaatatgcccttgaaaacatttatctcctccatctctcgtgagcttatctcattgaaaacctataagaataaaaggatgaagggaaaaacaactaagtcacctttgtgaaacaatatgtagaccaaaacactttagatggtaattggtagctttgcttaagatagctgtagaaatgtttacctggcaaaagacaaatgaattgaaaataagcgtgttaaggatcaaatcagaatccgagccacttagaccaaatatctctttccctttaacctggagaaaccatattatcacaaactggtaaatagattgacccaggatattcctccacatgacattgctgatgaagtttccttttcttccaactggtgttcgcttcattaagtcgtcggttggaggctcagttgcaagcgcgagagctccaagggtgtccatgatcatgttcacccacaaaagttgaacagctgtgagaggagcacttcctggagcaggatttttataggaaaaaaagaaagttagaagttgaaaatgatttctttgattatgaaaacttatgataggcttcctaacctgtaagacaagctgaagagaagttcacaattaacgcaaccacattaactgtcaactgaaactgaacgaacttctgaatgtttatgtaaactgaacgtccccatttcgccactgtagcaatcgtggtgaaattgtcatctagaattatgacatctgcactctctttagccacctgaagataagaaacaaatataggttggacttattgcattgttaagatcattgatttacagcttgaaatattattgtcactcattgtgacaatgcaattttaacaaatgaaaattagtatcacactcacctcagttccagcaatacccatggctaatccaatatctgcctcatgaagtgctggggcatcgtttgttccatcaccagttacagcaacaacttcaccaaatgtagtcctcaactgcttcaccagtgtatgcttgtccaaaggtgaagatcgagccatcacctatagaggaagtatgattcaaagtcagtaattagaattaattatcatcactatgcagtaagtaggtaaagagaaataaaggtaggacctgaattttaggtataagttcaagccattcctcttgactcttctccctaaatacaggaccttcaatggcaattccatcatctgtaagtattccacattccctggctatagccttggcagtgtttatattgtcacctgtaaccattcttactgtgatgccagcagcacggcaaactgcaacagactccttgactccaggacggacaggatccttaataccaacaactcctatacaagtatagccagaaattggtataggagtctcaggagagaatccatcttcaagttctatgtaggcaaggcatagagttcgaagtgcctcactagcaaattgattaattgttgcattgagatgttcaatagatgcttcatcaagtggaacaatttcaccatttgcattgatagccttgtcacagttagccaagactatctcagaagcacctttagtatgagctcgcaaacctccttcaggaatctccaacaccacacccatccgtttctttgttgagttaaaaggctcaactttaatgagcttagatgcttgtctctctgcctgaaaatctccacccaaagacaaggcaaattccagcaaagcagtatcagttggtgttcccaatatctcacgtttcccatctttgttaaccacaacttctccaccagtgttagtgaaaattgattgtaggagaagcttgacaacaaaatcaggtaaatcggaaagcaagtcattattttctttgcttacatccttgacattcatacaaatgcatgatttcacaacagtcatgtggttagtggtcagtgtcccagttttgtcactacagatacttgtggctgatcccatagtctcacaagcagcaaggtgtcttacaagtgctttttcattcatcattttcttcatggcaaaggctaggctaagagttacagctaatggcaacccctctggaacagcaacaacaacaattgtaactgcaatagcaaagaattccaacatttccaatgcctcatcaccagaccaggtccagtgactcccctctcgcagcttacgattaactagcccttgaactaaaactgcaaaagtcacaacagcaaagaaaaggcctatctttccaataatggtggccactccattcaactttacttgcaacggggtttcatcatctccaccttcactaagagtggccataagtttaccccattgtgttctcattccaactgtggtaaccatcatcttgcatgatccatcttgaaccttagttccagaaagaagaaaagggttttcagcggttaccattactggctcactctcaccagttaaactcgattcatcaatcaagacagagaatcctgagacaaatagtccatctgcaggaacttgatcaccaatagaaagatgtactatatcaccaggaagtaaatcataaattgacattttctgcctgaatccatttcttgtaacctgaatagatattttctttttctccttgtccaagtccttgaactgcaaagattggcgataatcacttattgctgtgacaaagacaactagcaagatactcgccacgataccaaggccatcatgagcaccctttggccacccttccattacaatgccaactattaaagacacaaaagcacaaacaccaagaatcataagagtcatatcttgcaatgcttcccaaacaaataccaagaagctccttgtttgactctctgtgaacttattgagtccataaacgcctatccttcggtttagtgactcagcatcagtgttgagcccactatcaattgatgtggttagctttcctgcaatgccattaacaccaccatgaactttaagcttctttaaatcgtggccttcaacaatgtaccccaattcatcaccacaaatctcaaaaccagcggctttgacttcctctggtaccgtgtaatcacttggctgcactcctgtaaggacatcagagtatgtcacgagaaagaacttgcgcaaaatcaaactttataaataaatatgataattactatcaagattaaaaacaggaacttttaaattcaccttgaataaattgaaatgcagctttcgaaaccaaaacagcaactcgtagcttctcctgcagtttaggacagaagaccatcaatataatattcacattaataatcttataacatagtgaaattcttctttatcagtaaagtaatagatttagtaatttgtattcattatgaagaatcactaagctcctgtttgggaggtgttcagcaccaaattttttcttttttaaaaaatatc

SEQ ID NO: 184648 - DNA, 8436 bp, Cannabis indica
cgacttaagtctagcacataattttcattaacctaagtgtgtatagtggagatataatctataaaagtgagtatatattaaaaaatatgaaaataaaaataaaaattaaaacaaataaaataagggtaaataccattttgtaccctgtgttttgcaaaagttaccaattggaccttatgttttgttaaatgataaaatagaccttatagtttctaaaataataaaaaataggaatctgagctcaatttttaaaaatttattttttaatataactaattgtaagacaatttctaacacgaacagagacagaaaatgtaatcggttttgtcataatgtctctaaatcaaattattattaagttttattttgacaaaaaattaatttacggtcctattgtacaattttaaaaaatacataatttattttatcatttaacaaaataaaaaattcaattattaatttttacaaaacataagatctaaaatggtatttaccaaaaaaaaaaaaaatactaattatcccaataaaaattacaaactgcatttaaaaacaaaaattaatttttaattgtcacccacagtgatagaaactcaaatttaccaaagaaaaagagctcacaaagagcaacgaggagggggttgcgattcagtgtggccgaacccattttagtgttctgttctctctttctctctctatgcatggaagacgaggtggaagcgaagaagaagaaaccactgaaccttgactggaatgagctcttctccaccaaggacgacgaaccgccacctctagtcatcctcaagtccgaaaccctcaccggcgccaaggctcagaggccttcgccggaaatgagctccgatcgaagacacgaagcaaacgaacagttgaccgatcatgagcttaacgagaggattaggagtactgcgatcaacattaagaatggactcgccagcaagttgcccgacaaaggggaaaggctgaaaaattctcttaaggcactcgaggatgagagggaacgaaggaaacggaaacgggttgagaccattcacttagaggttttgattttgattttgattttgatttctttattttggaatgaggaaaaaaaatgcaaactttttctggaaatgtcaataatttgtctatgaaagaaatgggtttcaaaaaaaaaaagttcagatattaggggtttcaagtaattttgggctcagccaattaataatggtaacaagtttatagctttattaggagtatttgattatgggtttgattgaacttgcttcatatgttctaagaaagcttacaacttgattgcttgagttttgggtttcttttgcaagttgcacttttaggccatagttacactaatccgaaatgaaccttgaagttctgtttggagagtgaattaaattggatatagaataatatttaacatgtgatgatgttggagaaagtagtataacaacttaaatgttctagtatggacttaatcccattgaaatgttgagataattttatcccatcttcatgtatttcatggttaatatatatacttgtaatatatatttttccattgttgatgattatctcaatcattttcatgtgttttttcttttatatatttttttaatcctattcaatctaatcatattttttaaacttggcctgaaagagaatggaaagtagggagtttctctcttttagatatttggttgtcagaacaaatgagaattgttgatatgaaaattttaattgatttatctgcaaactttaatgttacaaggttaactggctactggagttgtgaatgttcaaattgaaaatttgcattgtttttttatggtgaattcttagtatctttaatttccattgaacaggaatctaatgaacttgagaaccctgcacggtctttaagctctagtgttgcgggtgagagtgagacattcggtaacttttcaatctcttgacagttatgatttttgaacaatttccacttcatgatattttgtgttgttttatgactgttatggaactgtttggagaattgtattagatcaccaaccttgatttacctgtttaagtactctagtactttgctcattttgtagggtattagattctatcaattaacattgtgaacatggaggctatgattaggtctgtagtctgttgtgaagcatgtctcatgcattctaatatcttgatttcgtaaatgcgtttttttaggtggttctgaagacttcaaaaaagacagtgcaacatctcaagagaagacatttgcttcacgttttcttcagaagatggacggccatgtatgctgcttaactttcttttccatctaacatgtattttctgtcaaccatgtgttgttaatgctgttgtacatttattaaacagacggattctaggacaggcaatgcatttgaaaatgagatttcattgttgggtccatgcaacagtaggagaatgagaaacaataaagcattctcacagaaacaagagcataatcgatcatcaacaggagtctcgccaagaaatttttatggcaatccttcttctgaaggaggtaatcttggtctttcaaatggtaatcaaacaagcagagattctttcgtccagtctcaagataaaggattgaaagaaaagtaaggcatctgctttcaatgattgaagaatttgtagaattctaagtcatatgatttgtactttaagcaattctgactgcacttttttttaattgtctgaataaccatttgctgttttattctttacaggaatgatggttttccagtctcgaattcttataatacaaggaccagaagggtatatttcttttgaagcccgacatttctctaacttgaaaaatggcttcctgacttctggagttttttttttcttccttttaatccttctgccaaattaatggaaatgtagctgtcttctactccttccacagggtaggagagaagaatcaaatagtgctgatccataataggctctcttttttttgttgattaatctaattaaccttaaccttattcaaccagggacagaccattgttcttgatgaagaggaacctcaacctcaggagacaatgcaggaaatagagaaacttgatgaatcgtaactatttttgtaccttttttttgtctacatgcttcagcctacaatatgcattgatcgtttatgtgagtaacgatttgtcttttttataaactttcagcatgagagaggtgaaggtatactacccatcgaggtatatgaagttggttttttacaattagtagaatgaatcaagtgagattcttgaaatttatcttaattgatgatttatccgtttttttgttctttgtttcttgtcatgtaaatacttttagggatgatccagaatgtgacgtgatttcttattcggactttgactgccttgctcctcaatgctacttggcatcaactatcatgagcttttatatgcggtaaacttttttttttttcatatagttaattttctttattgccttcttttcaagtactcactattttccatttaaatatgatttgttatagtattgtcggtccctggtagttgtgtaggcgaacgtagtaaaaatgtttatagacataatcttcatgggcttgatcactgtttgtttgatgatggttttgaggctttcgtgctagcattatgcatattattagatctcttgttaacattttgcgacgtattttactaagaccatctccaacagttgcaccattttggtgtacatttttttaccaatttggtgcagaatctattacttttggtgcaacaattccaataattcaacaccaaatccaaatatgacaccaaataaaaatattttgcttaaaagacttcatatcttatattatttaagattaataaccaataataactaattcatgatataattatgattatcaacaaataattaatgataatattttaaaacaaattaaaagaactgttggaatgaaaagaaaaagttatgcaccaatttggtgtagattcaaaatccaacaccattaatggtgtgtaatttggtgcacaccattcttggagtaaaatggtttaaaatttccacaccaatttggtggaatggtgcagccttggagatgttctaactgttcgattattggctaggtacctacagcaacatgcttctccaacaaaccgggcaatgcacgattgccatttctttaataccttcttttacaataagctcaaagaagctgtatctaacaaggtttgtttctttatttttcctgcttaccttcaagaggttgctctttatacttaagggcttgtttgacgaacaagatggattggattggataagtctgaattatttgttaagaccgtattgaattggtctggattggatttgattatttgattatatagtactaaatgaagtacaataaaacaattttattattttacaaaaatttaggttgcgtttggttgggaagaataggaatgaaaatggaataaaaatttaaaatgcataaagaaaattcataaaaaaatcattaaatttgttcttatgttacattagaatggtctttccttccatttcaaaatggaagtcattccaccaaaatggtggaaaggacatcctattagaatgacattccaatactttaaaatgcaaccaaataaaagaatggaatgaaaattgtttccattccatttcattacctccaaccaaatgccacctaaatttatgaaacttatgaaatatataaataacatgtgtgtagatatatatttaaatcatacatatgtgcatattttgttgaagaaagttaaatatctttatctatttatgtataaagtgttactatctaatagaaactgttgttttaacgaattcttttattttttcgttaaaatattagttaagtgattattttttgaataaatttattagttattttgctatctaatattttcatgatgttgaactgccatttctacctttttcatgctttgtaattattaattgtaacatgtaggggaatggcaaggacttttttaccaagctcagaagatggtggaagggtgtaaatatatttcagaaggaatacatatttgttcctataaatgaagagtaagtctttgaggcatctagatgcttaagtgcttttttagaaaagggaattttttctactaatctttcaaattacagtgttgttaaatgttgcatctctttgacattttgattaattgagacatgatttatgttcctgttctattctgcctaattataatccatgcacattttctttttctcgttttggtgtattcagtcttcactggagcctggcgataatttgtaatccagacccgaaagaagagtcaggaccaattgtgctgcatttagattcattaggacttcactcaagcaagtcagtttttcaaaacattaaaaggtgagacatgaaaaggctttcccaactttagttatacttttgttcgatcattaccatgtagagtaaacattttcaaccattgactttaataggcactgacttggaaaattagagatacacacactctctctcatacacaaatcaatgagcagagcatattagcaagagttcaaaaagtttccgagtgttctagagacttgacactctccctagagtagctcactaaaattctccggtacaaattatctacctcactagcaaaccagtatatatttctctacacattcccaaagcatagccactttctcaatctttgcaactcacttattaattcattatgaaacagatgaccattaactcgatacgtgttcactacactctcctagtctttttactcgttgtatacctaaaacataaagcattatttctgattgatatggaagaattccttttctgcgaacgaatatcagtttcctgtaagtatgtgtaaatgttcattgtagatttttgagagaagaatggcagtatttggatcaacaagcaacttctagttcagattttcctttgccagaaagcatatggagaaatcttccaaacaaaatcacagataaaatcattacggtaaatttcgtcctcaaatcattatcaaaattctgtaaatactctgtgaattatgtattcacagatgaacattgagatagatagcactggtatctcatatacctgctctctaaattttgttgcttgcattttatttgtttcaactgcgtccacactatttattttgtaacattattaaatcatagttggttttaattatttttttttccttaagaagtgaaatcacaatatgattagaaaataatgcatattggtggagggatttttaacattagcctaatcaagcttattgttttagctgtttttctgtgttttctcgggcttcgaacatattaagcttttgatttctatcctcttgaaagtgtttggtcagattcttaccactttatcttggattcttctaacatttcccaccaggttcctcaacaaagaaacgattatgattgtggtctttttgtacttttcttcatggagcggttcatcgaagatgctcctgaaaggctgaaaaagaaagatctagcaatggtacattaacattttgatttcaacttgtgtgttggtgtattctttcccaccataaattttaatatcatatgatgtttgcacttgtcagttcgggaagaagtggtttaaacccgaagaggcctctggtttgagggagaaaattcgaaagctactcatagaagaattcaaaaaagcaaacgctaattgcacatcagagtcttcgcaaggttcgcctcctagtgttgttttacaagaagaattcaaaaatgcaaaggctaattgcacatcggactcttcgcaaggttcccctcctagtgttgttttagaggaatgaattaaggggcaacagaggtctctcctttttcttcaagtgattgcttcagatgaataatgtggggccaactaaaggttagattggtgcacattgcttctcacactctaaagcctctctttttgtatagttcacatagttgatgatgcatcatgcaaatacattgcttcttctgacacattcatttaagtcgtaaatggccaatcagctgtataaagttctgagatcagttttgtatagatcggcacaattgtgccatactttcaagaatagcaacccgaccagttttgactgggacgcacagtcacaatttctggtgactttgaagaaaagccctctaaagttgaggatggtgatggttctttgagcaaatgttcactaaccatgtaaactgactagttatatatttttttttggactgactacctatagttttaaatttctacattaatattttaatagtaaatttgagattgagaacaataattataactgtatttgcaatctgtactagcatttgaggcaacttatccaataggtagggagcgatttgatcacttccataaaaaattctcgtttcataaaaaaggtgagtactcagagagataggatgtaaaaatttatggtttagaaatatttgtggtgaaagtatgtaggattaattattttaaattaatttttggtctgttttggtatagtttgatgcaatcgtcaaatctgttctatttgtgatgaaagtaaccagaaatatttggtgtacaattgaatagatatttgcaataaaaataattaattaaaaaaatatttcatattactcactaaagtatttgatctcgtgaaatccaaattgaatcttgcgaggtgttttagtacagcacatcaatgatttttgtttagaaattggattaagtttcaatgaagttgtaaaccaaagacaagcactcacatcgaaattacttgggagtgaatacaacaattcacatagattggccatagaacatattttttgctgagcagagtatttggttggggtgtttacaaaattttcagcagtaaaaatgtatctgatctaggcaggcattcaggtagtaaatgtacattttacctcattttcagaaataataagggttacgttacgtgcatatacatttctttatgatgatgtacttttctttgtatgtgaatgtgcgtatatgtatctacgtcttccaacaaaacaaaaaagagagctaaacacttgatcagtgtttaccttcgacgttttttcttctcgggagtttcgtgaacttgctttttcataccgtacgtctttagctgaaaattttcaaatgcagcagagactgcttccacctgtaagatagatatatcatcattaatggtaagtattatataaagctgaggcaagaacaaatccttggactattatagcttaacagaccagttcaggcttctttgagtaaactctaacaatcgtatcctgataaaaagctggcaacaggtgactgatgcgatcatcttcaatgtg

SEQ ID NO: 184649 - DNA, 754 bp, Cannabis indica
aggtgacaaacaaattgcgtgacccctattgcaacagttattacataacaatataataaccgccgatataggtgcttaaaactcctttagcaagaaaggctttagctttcatttttttataattcaactaaaataattgcctctaaagacaaattttgtagtagatatccgtgttaagaatccaaataaagtttcttatgagttatggaagttgtggaaaatgagaaatttatgtatagagtgaataatgtaatggatcctttttgttactaatggatatcactatagaagtgggcaaatcttcgcccccaagttattatcacaaatttttctaggaaaaatgaaaggtattaacaactttctatctacaaaactgagctaactagtttggctgatcgaacacgtccagttcccatgagggattactttctgactgctattatactttaaaatcatatttagctgacatattctaattgatcatacatgtgacacacaataaacaataaacagagaataagcaaaataaattaaaaaaacactaatgatgatatacaccctatatatatgtgtctattacagtgggaataagctgagcgacatacaatttgtttagtggtttcggttgcattatttgaagtgtgaccagactagactcattaaagcagagaaacccactgagtaagtggcaatcataataaacaaaatggagcatgcaccaactgactagacccaaaaaaagaaaaaaaagaaa

SEQ ID NO: 184650 - DNA, 4832 bp, Cannabis indica
ttttttttgaaagaaaaaatattacttgtttattaaatagtttgttaattttaaaataaaatctaaaacaatttaatattccttttccttattttattgctaaacgacatcgtttctcgatgcaaattctcgacgttatctggttactctaagctgtgaagttatcagtcagaggcgaagaaaatggctgtttcatgtccatcttctctctctcatatctcactctgctcaaattcacagtctgctcggctcctgctgacccgacccgataaatcccggttcaaatgcagtgctagccagaccgggttcttcacccggttgggtcgactgataaaggagaaagctaagaatgatgttgagaagattttctccggcttttccaagactcgggacaacctcgccgtcgtagacgagctcctcctatactggaaccttgccgacaccgacaaagtgctggacgaactcgaagaggttttcttttttcaattttccttcttcttatggaatgtaatcatatatttaatttatgcacttatatttaacttattcttgttatgatgggataaaggctctgctggtatctgattttggaccaagaattacgataaaaattgtggaaagcttaagggagaacatactggccgggaagttgaaatcaggaagcgaaattaaggtattgataataacaacttgccgaacttgtccattacggaccaggatttttgttgatttgagaggattataaaaaatatctatgtctattttaaacaaaaattatattattttttaatgggggctaccgccacatcaattgggtccgtccgcttgcccatattttgttttgagctgatcttttgtgaatgttagtggaaaattttgaatgtctttttatgaagtgggaagaccctgttagatagttaatattgggattccagtatttttaattatttacttatttttattgttaactagctccccacctagcccaggacactataaatagtttctatgtaaacctcttgtgggagcaaaccacatgtcttctaagcatctgagcttaaatgatgtatctggttaagagtgtaatgctttcttattccattcagaattgtatatacttgctcattgaaataagaattctagtaaaatcctttgtatatcttttcatatttaacatcagttttttgtttcttttttaaattttgagtaatttgtctttcttcttccgtatggaatgttagaagtggctttgggttaggtggatctgtgatgatattgtgttgttatggttataggatgcattgaagaagtgtgtgctggacttgctgactaagaaggacagcaaaagtgaacttcagcttggattcaggttctgtgttttggattgtgctttatcccaatgtgatgtggttttttatataattgccaatttaattttgtgattgattcattgcatcaggaaaccggcagttgttatggttgttggtgttaatggaggtggcaagacaacatctcttggtaagaataataatttaagataccctaccgaggttaaggggatgttcttcttcttcttattattatttttatcaattaaataaatcagtattctattgaatttttgtgaattctttttggatgtatttatgaaaaaatttatcatgcaatttcccacacattgaatgtaggatcctacacatttattttcttctgtctagatattttcttacccattaaaacattttacttatcaactaactttttacagggaagttggctcatagattgaagaaagaaggggcaaaggtgaatctttttaccttttcttccaattaaaagaatatattttagggagtaaagaaagagtggaaactgatatctgctctaggatctggtatgacataaacttagttacctatgaaatacttttagtgtttaattttttgtaatgttggcaattataaacaatggtataatgaaaaaaattatcatttgaatgttttgacctaatggatcctgtgttacatcacctttatcaattgaactttcgggtttgttcacactatttaaaagttagatgagctggttctactagaaaatttaataaaagcgtgtaaataaggagatgttaagctctttatttgcttcttcacaagctcagtatagtctaatgaccttttactgatcatgaatgttcatatacagaaaataaattttaaaaatttgaatgggtattgttttttgttcaacctcaaatttactagttgcacaatcttattttcactgtttttagttgggagtgttttaattttgggccactactacaatagcgaattggagccctataatttatcacattaaattaagctttgtggttgtggattctaaaagtcatgataaaaatgatgtgttgagacttatgtgggaggctggtgtttttgacctaaaccttgggaaaggatgagggaaactagtgttcagaaacttaagtgggggtttttttactttctaaattatgtcatctatttatatttcttgcagcggcgatggggcttcaacaccattgttgtttttgagtctgtttatgtactaaatcgttattgtttagaaacaattgtatattgttgtgtttttgagtctgatagttgtttttgactctgaatagcctactgatttgagcttgttacaggtactgatggcagcaggggatacatttcgagcagctgctagtgatcagctggagatatgggccgagaggactggctgtgaaatagttgtggctgaaggagaaaaggccaaagcatcatcaggttgccaattcaattaacttgtgtgtttagtgttacatctcttttgaagcattataccgtctttatgatttttcaaatgcctagtacaatgactgatgtttaattttatagtggtttgttaatagttctttctcaggccgtgaagagagggaaactagaggattatgatattgtcttgtgtgacacctctggacgtaagcttacaggacattttttcctggttggttattttcttctgcccccattgttttcaggaactcttgtattgatttttcccaggtcttcacactaattacagtctcatggaagagttgatatcatgtaagaaagctgttggaaaagttctccctggggctcctaatgtgagtttaactctttggccttccctctctcctccttttccatgatcaagttataacatccgctattatgaattgttcaatagaatattcgctgagacattggctcacagaggggcacaatagtttggcatgatagtaaatgtctttctctcattctagttctgtaaattgcttctttcattacattggataggttacaatttaaaattctaatgacttctggcaatttagaatatcagttctgtttcctttatatgaaaatacaagataacaagtatgccagtttatgacagtattgcacttgtggcttgaatagatttttccttatatgcctttgttgtacttattatttttgtgagaaagaaaatttatttttgatgctttgttttgtgatacattgtagtgctaaatatttctgaaatatatacaggagattcttcaagttctggatggaacaactggtttaaacatgcttccacaagcaagagaattcaacgatgtaacatcccagttctcatccttataaattaactggcttgatagtatattactatcttttccatatttttcacatgtttataaggaggcaaacggttccaaaatttatccccaactagcaaacttagtgtactcttttgtaccgtttgctttaggctactaagaaattttgcaatataatgattattccatgctaaaagtttagtataattttttgacaatgctatcatgtgctacgatccattttctttaagatttctaatagagccagtaggttcagaatcgtaaatcactatttatatttaccttttcatattcagactccatgtactttgattcaactacagtgcaaactatagattgtttatacttttatgtcactcgacaggttgttggaatcactggtttgatattaacaaaacttgatggttctgcaagaggtggctgtgtggtaagtgtagtagatgagcttggcataccagtgaagttcgttggtgttggtgaaggtgttgaagacctccaaccatttgatgcagaagcctttgttaatgctatatttccttaggccttaaaagtggttgttagtgcaacttatttgaaggtaatgacaaattcttatgatacgtgatactgattatttcattgcttcttttcctgatggtcgttaacctttgctcattttgaaatttgagacattttggcagggtgtattctctcaacagaatagctaaagaaaacagtggaagctggaagttgaaaattgatatttcatagaagcatgattctacctgcgatattgttatgcttgcttgtaattacgaagcctgggactgttaagcaagtttttgttattgagagccttgtttcgctcattattgctgactaacttgatgttgccgagtgagttgcaagactatctccagatgatcaatgcgtttgctgttctgttataagtacatttcagttgccaagagctgtaccaagttttaaattgcaatcattttttctattgattttgtaatttattgtttgaactaattggagtaatgtcctttgatctagacttctgttttgctttgtaaaagcttgttgctggcatgttggattcacttaaaacaaattattgaaccacacttgtaccaaatgatctacatggattaat

SEQ ID NO: 184651 - DNA, 3014 bp, Cannabis indica
ttttttttttttatttattagtgctaaggttcttgcccaccgatggggtgaatacagataatataatgactttgggctgatttggtgatgccctgtccatgaggcgttgattgtttgataacatggagaccacatcttgataattatcaaaccgtgtcctacttttatggataataaagacactttaattcttgaccgtcaattaatatctttccatattggaaagatatgatcctcggacgagatcctagaaattaagtcttgatatcgcgagatttggtacttaatgaatatgattatgagctagatgtttgaagactcgtttgttactttctcggatactctgactaaggtcttttggatactcgctatgttggagggttgtcttgcctggacggatcttctatccagcatgtggaggacatggcttggataacaaacatggtccactatcttggttaggcctactattgggcctagagtaattgaattgcaccacttttagaattacacgtgttctcatacagaaacatggataccaatgagtattctatgttggaatgcccaggggttggggaaccctggtgcattcactgctttacgagcaattgttcgtatgtactacccaagtttagtctttttgtcagagactaaacttaatggcggttgagtggaggggttaaaatacagattggttttgcatatagttttcatgtgaactattcggggaaaagtggtgggttaatcttgatatagaatgatgattgggatgtagaggttaagtcctttacgaagggacacattgatgcacttgttaagtgtcctgacatggacttatggcggtttactaggttttatggtcatcacctaaaagctcacttatagggttaatcatggcgtctactaagtaagcttaaggacatgcttgctctcccttagatttgtggcggggacttcaatgagatcttattgctaagtgagaagaagggtgagaaagatataagtattttaacaatgagtgcttttcaaaatgtgttggctcattgcttgttcgatgatttggggtacagggttccaatttgatgaataaaagaaatggggaagctcatattcaggagaggctttatcgatttgtgtgtaaacagagttgacatgaattttttcctatagtaaaagtgatgaatagggactttaatcactcagatcattgccatgttgttgttgttgtgctagagaatgtggtgggacagaactcgttgtagtagaagatcatttagattcgagacacactggatgaaagatagtgaacgccatgatatgtagctggtttgtggtattcgtcaacatcaaccctcgattgctaagaggcattgcatatggctattgatacgtgtgctactcgactatcccattggagcaaaaataaatttgggtctatttaggtggctcataaaaaataaaaaattaagttctttattggaagttgtcacccctttggtcaatatggatgacgtgaaacgattggaggaggaattagaagacttgatggttagggaaaagctttactaagcaaagatctcgtgcagagtagatgatagcacgtgatcgtaatactaactattttcacaataaggcgagctcgaggatgaagaaaaatgtcattaaagaaatcatgactaaagtggggaaaatggtaggagatgaggctagtattgtgactgagatagaaaggtactttgttgagatttttcagacatcatggcgatagttgtagtggtcgaggagggtattcctagggttaaggcccatgttggcaaggcagaaaatgatcttgtagtggctccatttacatctaatgacatttatatggcggacaaggaaatttgtgcaactaaggcgccatggcctaatggttttcatgtaatattttttcataaataataggatattatcggtcttagggtgacatttatatgtttggaaattttaaatgacagaaagtcggtacgttcttttaataagtccaatgtggttctagttcttaaagtagctaaaccaaaggtggccaaggagtatcaaccaataaatttatgcaatgcaatgtataaaattgtgtcgaaagctttggcaatagggatgaacaatactcttgttcctcttatttcctctattcaaagtgcctttttgctaggtcgatcaatacagacaattaagattattgggtttgagttgctccattcgttttaagaaaaatagagagaaagagttttatggaattaaagttggatataagcaaggcctatgacaaggtggagttgaattttttgagagaagttatgaggaaatttggctttgcgaaaagattggttagtcttattatgaattttgttacaaccctaggatatgtgtttggaaattttaatgacaggaagtcggtactttcttttaataagtccaatgtagttctagttcctaaagtagccaaacggaaggtggtcaaggagtatcaaacaataattttatgcaatgtaatgtataacattgtgtccaaagctttggtgatacagatgaaaggcactcttggtcctcttatttcctcttttaaaagtgcctttgtgctaggtcaatcaatacatgataatgtgattgttgggattgagttattccatttgatatttaagaaaattaacgagagaaggagttttatggcgctaaagttagatatgaacaaggtctatgatagggtggagttgagttttttgagagaaattatgagaaaatttggctttccgaaaagattggttagtcttattatggattatgtgacaacctctggatatgcttttatagtgaatggaaaactacaaggatgtgtaatctttacttgtgggttaaggcagatgtgtcctttttcaccatatttgttcatgttctgtgtagaaatattatcgtcactcatagaactagctaagaattttataattagctagtggttctttaattttgagtttttt

SEQ ID NO: 184652 - DNA, 1933 bp, Cannabis indica
accaacataaggctctcctctctccccttctcttcatgcacacaacaacaacacaacaccaacataaggctctcctctcttcacacaacagcagcaagcaacacaaaaatctctccttttcatcttctctcttctcctcaaggcagtccgttttggaggtaaatattttgttcgtttacttatgatatatattttcttatcatattttttgttgtgcgtattttgtataatgtaatgctttttttattattttttatttttatttttgtttagttgttgtggctgcctacttggtgtttgctgaaatttttagcatccaaattggatatataagatgactggcagaagtgataaaagtggctcacgaagggatccagcttggaaatatagtgtagaagttgaattagaaaccactgcgaaaaaaagaatacaaatactttaagtgtaacttttgtaataaactgattacatgaggtgtggggagggtaaaagatcaagatggagggacacacaaaaatagtttactttgtcctaaagtacctcaagaagtgaaggatgagataattgcatatttgaatgattatgatgagtctaaattaagtgcacagaggagatttgaggagatggtagattgtggatcttactttggtagtggtagaagtactatcaatcacattccattagaggagggcaagaattcttaccttggtgataattctaaaggacttaggggacctatagatcggtttatggtgaatgtaggagtgggagatgataatgaaggagatggtaaagtgaccaaccaaaaaatgattgatgttagtgctaaagaactttgagatcaagtttgtatggacattgggagattcttttttgagaatgggatcccatttaattgtgcacgaagcccatcgtattttaacttgttgcgatcagatggaaattattgtcggggattgaaagttccttcaatgcatgagatgagaacttggattcttaaagaggaagagaagacaacaaaacaaattgtgaatgacataaaagcaacatggaaacaaacatggattttattattatcagctggttggtctgatatgagaaaaagaatcctcatcaattttcttgttaataatccccatgggactatttttttaaaaaaacaattgatgcatcaaattgtgttaaagatgccaaaaatttgtttgaattacttgatagtgttattgaagaaattggagaatatattagtgttcagatggtcattgataatgcaagtgcatacaaggcagctggaaatttgttaacggagaagagaaaaagtttgtattggatatgtgctgctcattgtatcgatttgatgcttgagaacattggagaattgccccaacataaaaattctttgatcaaagcaaagaaagttaacaattttatccacaaccatcaattggtgctaaatttagcaagaaaatatacaaagaaagatcttcttcgaccagctgtcacacaattcgctaccgctttcctaactttagaaagtatgtatcaattgaagcaaccactccaaatgatgatcgtttaaaaagaatggtcaaaatgtaaatctacaaaaaaaaaaaagatgaaagaaaagttgtgaaaaaaattgtgatgagtgatgcattttggcacagtgtgcatggtttattcaattaaaaccacaaagccccttgtccatgcattaagattagttgatggtgagaccccagcaatgggattcatttatggtgctatagatgaggtaaagaaaaacatagccaagaacctagatggagacttatcttcctataaggagatttgggatataatcgatcaaaagtaggagtttcaattgcaccaagacttgcatgcagctggatactattcgaatcctcgatttagatggagtcctaatgtt

SEQ ID NO: 184653 - DNA, 993 bp, Cannabis indica
caaatcccaaatttcaccttatccatcattaaatgtgattgagattttcctatatatattttaataatgtaaagaaaggttttttgtaataaaagcaaacactgagaaagaatcaccacaattataacggaaaataacgtgccactcccactacccccaacaaatgtcatgtgtgttagttggcttgtgttgggtcccacaaaagtttcttttcccatcttttgtttttcctttattcatgctaaatcatccattatcctattattacttattaaatttatttattttaatttaagaaagaattatatattaattattgtaaataattatagggttgagttgggtgataccggatcgtctgtaacgggagaagcggtgtggaaaacgccttggcagcctttaatggcttctctaaggctctcgtaatcaagaagatcagctttgcatagaatcaatctctcgtttgctccttcaagttctctcaagtgaccattcttagggtcatctgtattattcaattaattaattattaagaataataataataatatagagatagatcagatatagagattatgtcacctgggtttctgagagtccctttaacagtatagcctctttggagtaataggttcacaatccaagaggctatgaatccacctgctccagtcacacaaacagtttgacccaaacccgataaaccatgatcaataggcatttggagaatttgtagagtgatgagaagtagtacttgagagaatatatgtgtgggtttggtaaagaggagactcaaattattatgtctttaattttgaggaggatatatatttatataaagaagaagaggcactataactctataagcatttataaagagtatctctctctctatctttctactggttttacaaggaaggcccatgacatgaccccaccccaactcacctaccgcttcttttaactttttatacaatttatatttatttatttatt

SEQ ID NO: 184654 - DNA, 14104 bp, Cannabis indica
gaaacggcagcctgctgtttggcggtgacggttgctcttgagctcggatccaagtttattatcgttgagaatgactcgagggtagttatcaatgctcttaatgggaatgagtctcattgggcacttgagaactataccactttttgtaccaagtcttctccttcgtttattagttatatttttgattatattagtagaacttgtaattttgtcgcccataatgtggctaagtgtgtgttctccgacaagaggtttggttgtacctcgctttcaactatccttatagaacttttatgtaatgaccgagaggtctaactgctttgctatttgtcataagtacggtttccaataaaaaaaaattaaaatttacattatttataattttacattattttttttttaaatataataattttacattattaatctttcttttcaccctaatctttcttaaaattaaaataaaaaaaattagtaaaaaatatacaccaaaaattcatattttaatttattaatttattaattttgtaatcattggtgttaaaattattaaaattgtttgaaaaatatacaccaaaatggtaagcgtgagtttgcaattgcacaagattaaaatttatcacgccatcggttatcggtctaacaaatcgatcgatacctaaataagtgtttttttaacctttaccaatatttctcaacaaatatttcttaaaaagaaaggttggctcagtttccacttcctcattcgacttggtcaaaaaccaaattttcgatttaggacgacacgtgggtttcaagttgtcatccaaggtatcaaatggtctttaaaaaatttctcgtcaacaaagcataataaacctggaaataatttgatcaaagaagtaaaatatagtttaccaagtgacgggtttcacagataaaataaaattaaaaatacttggggtttgtcaatatttgattcttctacattgcccaagataaaaaatgcataacaatctctcaaccaatataccaaagtaggcaaaagtaccacttcgatggatggatgttagaatccaatcatgaataaacatacaactaactttccccacgtataaactgtatgtacatgtaggcgatggattttatcagtaatggcggggaagaaggattcacaacgtccccgccaaccatatgtcaacctatatctctctaccacctaatcatgtcccaacattgttacacgcactaacctacctaaacgtgggagagggtctaaactgtcatttttacaatctacatatggggctgccggtgactgcttgctacgtttattactgtctgtgcttggatgcttatactccattagcctcttcacaactctccaagcgaactcgagagtcattattatcggacacggtttgaaactttctttgccactcgattcttccagttgctctgcattaggagaaggtcagtagaaaatcatccaaaagaaaaatgcatatgaaaccaccattgggattagggtacagaaataaaaatgtgttcaacaccagagagtagatttaccagaggctcatcgtctgaaagttcgtcgtcagcagcaacagaactttgaggccctttatcgggtatttttgactttgggagactatttgtctcctgattatcttcagaatctgatttctcttcttccctctcttgctgattatcatcggaatctgttctctcatcttcagaatctgatctctccatctctttagtcttctctgcttgattatcttcggaatctgtattctcttctttagcctgttcttcttgattatcttctgattctgttttttcttcctctttggactgcccttcttgattatcttccgaatccgatttgtcttcctctttagactgctcttcttgattatcttcagaatctgttttttcttcctctttagcctgctctacttgattatcttcagaatctgttttctcttcatctttagtctgctctacttgattatcttcagaatctgttttctcgtcctcttcagcttgcactacttgattatcttcagaatctgttttctcttcctctttagcctgctcccctgaggcatcacttgagtcatgttcatggtcctcttctgaatgttgcttctcttcatcactattctggctcatgtccatatcttcagcaaccttttctcccgtatcaggtttctcttcatcagactccttaacaattgggctcctcttcttaccttttaactgttttcttttgggcactggcttcacttcaatatcagattctctctcctcagacatgttttcatccatcttttcatcatgctccccttcagaaccacctaggaataagaaagaaataatgaaaaatagaaccagaaaaaaggaaagggaaagtgaaagtttagataaaacaacattttccatgtggcagttgattagttttccacatcccaacacgaaatgaagtttaaacagatcacacatgatcaaatacataatctgtaaatgaaagacacttgtacctgagttcatttcatcctcaacttcagatgtcctgctcggttcaagatttgacacatctgaactctctttgtcttcagtttccaaatgattaccttttgacgcacccttttttccatgcttcaaagctttttttgttctttttcccttagctctataaagatgaaacatcatccatgttataaatacgaaattatgtaaaaagtacagcaaaacaagagcgtccagcatctactcacatcttggttgttctcttcttcggacgtaaagcatcaatatttttagtcttcccaggcgatctgcaagacataagtgacaaacaagatgacattaaaaaaacaactgtaatcaatactttatgtgtctatcagaagaaactaattttatcaatactgcaccaaagaaccattacaaaatatcttcagcaccaactacaggatagagtgaatagttgtgcattagaaagagaaacttacatgtcttttgaaggggaggcttttgatgaatttgatttctgtagattatgaaaagtaccagtgtaaggataatgtcatgatttctagtcctaccattaaagaaaataaaagaagagaaatcagaaatgcgacaatcagaatcatagacctttgtaggcttgcggccattgtcaacaagttcccagcgctctctctccagacgaagtacttctacatctccatcatcatataatatcttccatgttacatataaagatgagataaattagaaaaatcatgagaaaataggctcctgacgttctgtctagtaatcttcaaaaagagatatcggaagcaaggacgtgtagcttaccacatgcttctttttcgtagtatcaaatgacttcactgtgccttcataaaatctgcaagtgtaacagtaaatatttaattaaagtttaaatcaatacattgtggttaagaaatggaaataaaactaacaaaacaactcttttaccaaaacgtaatccattagtattatatgaaagagcaaaagttcacaaattccaatgggaaaaattaataaataagacagcaggttcatttgatgaaaacaaaagctacaccattgcacaagaaggtcgaaatgtacaagtttacaaaattaattggccttagaccccttgagaaataccataactacaacttatctctgaaaagtagccagatgtaaaactaaaaattgctaacaattagcaatttgatcagatttatattactcctacaactactttgacttcaccaactgaacagaatttaagcaaataataaacagaaatcaaattcatcaaaagcctccccttcaacttttgtttatcaaaagagaacttactccttatccaaaggccaccacacttttatctgcagccaatcaagtcttcaatatcctttccaccttccttagtcttgcacttcaaacaaaataataataaataagtaaatatgttgaggagtgacatagttgtagaattaaacttgatgagggaacaactcaagaaattaagcaatgagcaaagcctaagtgtaagcacattcatgcacacatacacctaagtcatgctcgctagtatttatagacttgctaaaccatgttgtatacactttcctaggtgctgaaatgaattagaaacacagacagagagagagggggcgttcactagcaagtgcaccagaacaactatccataatgattctcacacaacatgcagctaagaatgctaaaactgggggcaaataaagttgaaatatacgagatttagtaaccagttacagatcttataaacttctcaattctcataatatacacttaatccaagaagactaaaaagtatttactcttataaacgttggcatgttgacctataagttttaaaatgaataggaataataaccatgacttgagggcatactgctaggtacaagttagaatcagtacattgtgaacaggttcataagtagcatatagatgcatattacttgcacatccgttagcaatcagcctatctccatgacatcagcattttattaattattattacatgataatgcatgtcaggttggagatcatatcaaatgttacatttaacaagagataattgatgttggtatggaagaggtatacctttgccaaaactgaaacgctttttcgtttccgcttcttgacagtccctgaagaaaactgggcatcattatttgtgccaatcctgtcagtttccatctgcaggaacaaagaaagagtaattgttatctgcaattaacagcattaaagaagcattaataagataagcaacctacctcacggtcgctagtttccccaacctcatttgtctcatcattactccagcccaaacctcttcctttaagttttgatgaagaaacattcttttgaaagcgtggtgttgatatatctgacttgttgtttctagccaatgttctctgcatgcacatttagtgttttggatcagaaagggtctcgggttcaatatcaacatatggaaattagtagacacttactttaagtgaatcatccctgttatctgcagatgagacctttaaagtgctgcttggtgacctgaaggcactttgcccagatgatgatcttcttcgttttggaactggaactggtgtctcatcactagcttttcttttttcattctgtttatgttgtatatcaggggtcgatatcttgctgggagaacgttcgtgaccattgcttgattcaaatttattagattttcccaagttatccaagtttatttccctcaccatttttaagacatcaacttgattttcagcaatccctgattcaggcaacgtagacttggcctttttggccttcgcacccttagatcgtaagtgtttgattattttccccaaaggtacttcatttccatctccttcaccttctttaagattctcatcttcagcagtttctgaaacaagctgtagcaaaaaaacaagaataaaagtaaataagggaaaagaaatacatcacaagttagtcaacactgcaagacatcataagcagaatattaataataagcttgaaatgctgttagtgtaacatactgtttcactggtttccagcttaagcgattcaaagtgtttcaaggaactttcatcaaccagccacgtttgctcttctctggcctgtcatacacatgcaaatcattaatctggtttgatttcattgaaaaagcacaagagaatttgtagaggagatttacatgtactgcaacatctaaactcatcaaaggtatggatcaaacgattttcattaaccatgacttctaggagtaatcataccatatgtataataccaattgcctcaatctatcaacattttttacaatacagaaaactaaatataatgagaatattactaaccacggaatcatccccttctttcttttcgtatggtttatacatcattggaggcagggggacagatgtggtcgagtcttgggtatcatattcctttggggctaagcgcttggtaattgacaatcccaggtcacaaattgcatgtgaattctaataaaatcaattcaaacaaaaaaaaattaaaaagtatacatttaaaaaagcataagctcacagttttacaatctattctacaattttaaatttcgtttatctttacacttttttcatggttgggtggtggcagtttagccgattgtgctcatagtaactggaaataacaatcactatggatgtgagatctctattaccaacctttgactttgctgtatcgactatatcttcagatcgtttgatactttgaaatatagagattgttgcaagaatggtttctttcaacatgtcgttactcgcttcagatttaacatcttcatctctatgcaccagcatagaaataatcaagtacaactgcctgaaaattacaaaaccaaaattcgtaacttatgttggatgatacgatataacacatttcagtactgtcaagtcttagctaagtaaattttcaacattatacgtagcctacattatgagatgatatcgtaaatgaaaaaacaaatttgaaaacgatctacctgtataataattcataagctttgacatccttgcattcgtcaatatttggacatgaatgatgagcaagcacatgaaccaagtatgcgagaatgtattcgggataagcagtcaaggaatttgcatcactctggatagagagttgtcgtgccttcgtttggtgatacaattggataatgtctgccaggttctgcttctcctgtaaattcaaacaggaacaaaactcaaccacgaaggcactggcatgaataatctacttcaaaccaagcaagaatagagcaaatacctcctggaactctgatggtgtggatccaaaaatattaaacaacaacgcacaagcatattttccatccaaaatccgatcctttatgtactgatgaactttacttaaaaacaggctcttagcttcggggaaattaatctatgaaccaaaataaaacaaataagtacctgtgtccagcttgttatttgtaaatacaagaaaaagccagcaaagtagctatctaaatcataaaatgacaactaaatcacagtactaagaaaaatcttcagggccacacctcagatatcctcaaggttaagtggaacacatcaagagggattttatgatcccagaactttgacagacgaaggattgcctttgcagcggcaagtcgaaaatgggccttgtccactgaactgtacagaccaacatgttcattaaagttttaagcttctcgtcatgcgataatatggaagaaattattcgtcctaaaaaaagaggggatttagtcatataagtaccttgatcctatatcttttgacatttctccaaataaaagtatattcctcaaaatttcgaggagaccatcaatgccaggccgaacatttgcatctttaacaggcaagtagcttttgaccagtgttttaataccatatatctgtagccaaaatgaggagaaaaaatataaaggtgtaatacgataataaacttcatgaaaagataacctcacaatagagggttacagtgcaaagccatgtctatgttgacttttttatgttcaaccatttaaaacagccaaactttcaacctttaacaaacatagctcgcttctttcatcccaagatgttccaccttctgtcttctgcaagagtgcagcaagagaatgaatgagatctatttataagaacatcatacatggagatatagtaagtccaataaaactaagcagtcatacgttattgcattttaaaatcttatttattataaattcttcaatttcactctctctggtctcaaaaacaggcatcgcagtctgagctatgcaacccagggattgcagcacagaaggcaaatgagtcttctcctccagcatgcccacaagcctctgaacattgaaaaacaccatgtcttacaaatgttaatactaatcgtggacaaaggaagttaaaaccaagtaaaagtgatgatataattatagacgcaaaaaatatataaaaagtataatatttaaaataaaatacaccttgtaaagaacagaaagtgacttaagtccatcatcctttgaatcgctgcaagggcatgtacagcatattttgcctgccttcgactcccttctaaacatagcctctctaacaaaagatctatggaactgcaagtaaatagtaacatataagcactatactaagttaatatatattaatccatgagcatgcaagacatcctttcgaattgcaccttgtcgatacggctagttgttcgcggataataccaccagcctttgccaagatatgcaaaacaccttctgttataatttcatcaccatctttaagaaagcttattaattcttcttctgccccactcagtagcattgggctgaagcgtgcaagaatctgaaaaatagtcatagaatattttgaacacttgagaaccatatgtaagacttaaattttacagataatttcaccaaaaagttctactggtataaataaaattaatgaaaataaagaaaataaaattccaagttgaactgttttaatatattttaacacacaacaaacataaacaacccaacataggataacaattagaaaaaagaaaaaagatggcacattagttgctgatcagtggacagaggaaacatttcacacagagaaaacatattgaggaaaaagacgagtacacaactaacatatgatatgcatgaacgatattatgaaatactacaagcaaatattgtgaacatttctaaagggagaaaaaaataacttgaaacacatgaaggatatactcttaccaccagtatattcatacacgatgatgtatataatgaattccctgccaatttttgagcagcaacctccagaagaagttccttcacatgttccttgttgaaaagtagataagaaatcttcacagaaagagtgctaaggaaatcatataaccgatgctgctcgccaagaatcctaagtaattcttcctgaaattaaatatgaaaacaacaaaagtcattaatagctacagcatatgggtctttcaatatcttccaatgaaaagtagaaagcggattcaagagatagaaatggacttggcaccccttcaatttttgaaaatgtgaaactacttgaaattacaaaccaaattccaatcttaactatctttttgaaaaaaaaaaaataaatcaaacaatcactctgttggtggtgattgtaggacttggtacctactccagtctctcaattgataaaattctatacaagagttcacattccagttttcagaggtcggaaacagatataaaaagctgagggttgttgagagatttctgggaaaaggtgttcatgacagtggtagacacttttgcatggcaacatgtgaataaaaaggaccgaccaacaagacaagaatgatacagcagtgaaaagaaatcacttggtagtcagtcagattttggtaaaagattttttcttttaataagtatgcaattctgaaatctaaaagcattcatcaatatcattctaaatggtcaaggacctcacattgaagaccttactactagctaattgaatggctgagtgtaatgtactcttaaaaagttgcatcatcaatagatcattctcacccgataagtacaagcttgatgaaagctagtattcggatcaacaagactagtaagaatcttccagattttagcatctttcaactgatcaagaatctgaaaattctcttcagccttggcaggatcagcaaacgaacgtgacattacacggaagcaaaacagaacttttttttggatctcaggaccatcaccatcctgcatttgatcattgttaaaattccattgttcatttcatttccacaattaatccctatttttcaactttaacattttgctaacctgatacatctgcctgagagacagatacctctgcatctcttgctgtaacctgcaatccaaaaatgaaccccctggaaattagtttgcatttcatcaagagtcaaacaagaagtctgtgcggtttatccaagtcgcagccaggtgaaactagaatttacatacctttgcttctgctccattatcttctcaagagccttcacctcaactttatcaaatcctgaaaagactcttgcccaatgccgaactttatcttttatcgaaaactcagttgggaacagcgaatcacaaataacagactcaattgtatcagatctgcagtttcaattaattaaaaatatgaattctaataatttaaaaattagaaaatgcagagacaatggtaaatacttccatgattacttctgaagattcattataaccaaagatcactaaaagttcctgagcaaattaatttcacagttgtattttaaaaaataaaatggataaacatctacctatcaatgttgatatttatgtaccacaacacaataattcaaaaaagaagagagttgagtaatgttgatcctgtgaactctgaaaccttaggctttacctgaaatctttgtcatagaaacatcttaaaatctttccaggtatccaatcaaactcatcagacttaattgaagcatctgcagattcagtactaatcatgcaacagaccctgtaaatctcggccagcctctccaaggtatactttttaacaagcaactgtagagtaaggagggaaaaaagtaatatgaatctgtcagatggagattttgaaattcagatgataacaagtatagatgaaaaggggaaagcatatttacagatttgtctcgaagacgttcagcaacaagtttcactgtttcaagtagagtggaacttaaagcatagcaggctacgtcacaaataacggcaacaacttgcttccttacattttcatcaaagtctaagagtcggtcacagagggcagctaggaaataaaaacccaataatacatcaggatgggtgtacacaggtgaattttacattgcagcaattcaatgcacttacaaattatttcaggtgcttcagtcctggaagtatttgacagtagacaactcttcacatgttcaacgacagacattctcactgtaacatttctgtctgtcaacctcttcaaaaattctgaaaagattggctgaaaagcttcagagataacagagccaagtagtgcaaacaggtctccaactaagccaaccgcctttaggcgagtatctagctggtcagtctgcaaattttgaaaaatttcactgagaaactattggccaaaatttcaaaattctccaatggctgatacaaagatatgaacatgcttgctgaagatttatgacagcatataagtcatcccaagagcaatgttagcccggagataaaacaaggtgatttgctttctactgacaaactctaattcagaataagagaaactttaattgcacacattcttctaacatatggaaaatagaaactataatcaacacaagagattctgcgtccacaaacaaatcataaaattccatctgtacgaaaaagaagaaagaaatgcaaaccactggattaccaatagttctccagttaagtatggggcaactccagttaagatctgtggtgcacaacggtatacgtcataaataacttcatggtgatcaatctgacacttcactgatttactatctcccgacattgatgatataaggaactgcttgattccagcttcaagttttactgcacatttttctataacattcatagcaagcttccttgcagccatactaacatcctggaattgaaagtttactaagttaattgaagaagagaaaaaaggctggaaaacctcagtaaatggctacacgacatatcagtaccagtagtatgtcaatcatacataaattatttatgctagagtagagaagacatgctcacatttttaccacggcccaacacagataatataataaacaaaagatcatctcgaacatcctcactctcctctaatagaacaaccataattgtctccattgatgaaataacactgtctggatgatcatcactgcatacacaagaagatgaaataacttataattaaagcaattattaagattgagagaaaggtcaaaattgtgttacaattaatccatttgataaagccagcaacagatatcccaattcaaaggaaacatagaagcatccatttcaacagatcttatctattagacctcttttacatggtctacttcagtcattctaaagtagtattcttgcaacatttcaacttacaaatatataaacaacttattaagcttgcttcacaaaaggggaggggaaaaaatatcaaatgaccaaacaatgggcctgtataatatgtcatacataaacaattactaagaaggatgtgaaccagaagtttttgcaggaataagtttcaaatagctatcggaacaaataactgagacaaatcaatattgcaatgaaacaaacctggcaacagccaaaaatgtactgaacatttcattcaccagatcatcgcattcaagatccaacattacaacgcatgatctatattttgcaagagtctccaaaatgacaacccttctaccaaatgatggaccacttgtgtcacgtaatccaccaaaagtaccaacaatcaattgaaagatatcctgcaaaaggatccagcttacaataggcaatatttgaaaaccatatgtatgataattagtcactaaatgcatgattgatagccaatgaaaaaagcacctttagaacatcatcgctgtaaggagcttcaggtgctgtaattcgtgttatctcacatatgcttgtagcaactaaaagtttcacatccctatcttgatgcttaagcagctcaggtttaacaacttcattgatgaaaggctgcatcgactctaagatggatgcagatggtgattgatccaactcagacaggcatgttgcagcttgctgcagtccaaaataaaataaaaggcaaaactttaggagtagccaaaaatcaatccaagatcctagctttacagaggaaacacgaatgtctcacaagtttaaacatcattgctgtatatatcatgaaaccaattcatttttacggtctttctaacatttataagaaattcaaagaaaatcactaacacaattttctgtgttaaactctacatttatgtgaaacactagaagtgaaatgaaagtattatcctgaaaattttaactaatgcaatgcgaaaccacaattttaacatcagaacttaaaatttctaatctaaaatcataaaattttggtattcacgtatagacgtgtttcaaaaatgtttttctttttctagagaaaaattaaacatgcaaaattggcaatgtgaaaagtaccaaatatacaatcctagttcgaataaattttgaccaaacatccaatttcacaaaattcaaatccctaaactcgcgaaacactcccgccccaacctcacagaattaaattgaattaaaaacttatatcttcagaaatttcaaagtttaacgctataaaaacaaaaaaattccttactaaaccctaattcaactacttctgttacacaatggagctgaaaattacagtatttcactagtatttaaaaaaagcaaataaatttagaaaaactcgtagcaaagaaacgtaacttgcaaacaccttccttaattcgtttccaataagttttcaaaggaacagcaggaagaaaaaatataactgaaataactaccgcatgagggcatgaattctcaacgaagaagaacaaatttttcaaatttactcgctgaaaaccgtgaaaacgaagcaaattttcaaattaatgaaaaaaatgcgaacctttaagagcttgacaagagcgtctttggtaggcggaagggtctcgagtttggatcccaactccttgagttgctgctcgagcttcagagccattttcttcgtagaggtaaaagattgtgccgtttcagagcgttacagctctctcatctggtccgcaagggttgagaagtttgaaggtcacgcctcgcgagggagaacagatgggttttctctctctctct

SEQ ID NO: 184655 - DNA, 2412 bp, Cannabis indica
aacaatcaattataagtctacatcttaatctctcattttcttgagcatggggagctatgttagcacacaaatgatatttttgctagctattctttgtgtattcatatcaaacataagtagtattactacctttagttgcatggaaagagagagacaagctcttttaaaattgaaacaaagttttcaagatccaacacacaagttatcctcatggaaaggtcaagaatgttgccaatggaaaggagtaggatgcgacgaaagctcgggccatgtcgtcaagcttgatctcagaacatgttcttcatattttacaaattactcagacaacttacaagctaatgaggtgagccctagtttgttggagcttcaacatctcaactacttggacctaagtggaaacaacttcaattcaagcaagattcccaccttctttggctcaatgaacaatcttaagtatcttaatctttctcattcaagctttggtggaaggagctcttcattttggaaatctaactagcttgcaagttcttgatcttcaaggtcttttcggtgttagtactcatactttcaagtgggcttcaaatcttttgtctctctaataccttgatatgaatgatgtgaattgtgggaatgcatcagattttgtgaaggtacttactaagctcccttctttgtcacacataagtttatcttcatgtgatttagatataaattactttggttatgatcccatcaatttcactttctcatctaatctcaaatacctagacctttctaagaatactcataaaagatcaattctcaattatctccaaaacatgacctctcttgaagtacttgatctttcatcaaccttctatgatattagttccaaaattccaacttggttaggtgattttgagagccttgtttatctaaaccttgcatctaataactatgacacctttgaaagagaaggtggcttgttgtacctaataaacaatgcatgttccttgaagttgttggatttgtcatacaactcaattggacaagtgttagaccctcataatctaaattggacaaaatgtgctaaatataatctagaggtattaaatttgagtggtaacataatgaggggtcctttgtctagttggttagagcaactagaatcattaaagaatcttcacctttatgggaatttattccatggtccaataccatcatcatttggaaaattttcatttttggaattattggatctatcatctaacaagttaaatgggtcaattcctgaatctttaggaagattgtcaagtttgagagaaattgatctttccaataatgagttgactgggattattccaaaaacaatggggagattgtctttgttgaggaagttatctctttctaaaaatcaattgaatggaagcttaccaaaatcccttggaaatttagtatccctagaatctttggatatttcaacaaatttcttggaaggtgttgtatctgaagatcactttgctaaccttacaaggttgaaagagttggtcattaattccaacaatttctcatgcaaagttagttcaaattggatccctccttttagtctaaacctcattcacatgggttcttgcaaagttgaagggtctcatgggtttcctaaatggattcaaacccaaaaggaagccactgaattgaatctctcaaatgctaatatcattggaacatttccaaattggcttcatagtagtatctcctacttggatctctctatgaacaaaattagtggataccttccaatgaatattggttacactatgccttatttagtgactctaaatcttggcaacaacctattaaatggttcgattccatattcaatctgcaaactagaatctttggataatttggatctttcgcgaaacaagttttttggaaaaatgcctcattgttggaaagaaagccaaatagtaactgttattaatttttcttataacaagttgttaggcactattccaagctcaatggggaacctattcagtctaaaatggttgcatatgaacaataacaatctcaatggggaacttccttcaaccttgatgaattgctctgaattagagcttattgatcttggtgataataacttttctggacctctaccaacttggattggaggagatagccttttgatgataaagatcttaaggttgcacaagaatatgtttagtggaagtatccctttaaacttttgcaagctttttgcattgcaaattttagatctttcgggtaacaatttgagcggagaaattcctcattgctttggaaattttagcggaatgactatagaagaagatatacctgaagattatgcaaatgcaacattggaagttgtttctccaagctatgatatagaatggaacaaagcaaaggtgt

SEQ ID NO: 184656 - DNA, 3748 bp, Cannabis indica
aatgcagggtgtctatacgtttaatatggaggcaccatcaattcaggttgataccttttgtgttcatggaggccctgatggatatataacaggtattagaggaaaggtccaatgcctatcagaaaacgatttggagcaaaatgagactgatctggaaaaacaggagatgatcaaagggaaatgctatctgcgtttcccaacattgcctttcattcctaaagagccgtatgatgtgattgcaacagactacgacaatttcgctcttgtttctggagcgaaagacaaaagttttatacaggtaagaactcattaaaacatataaactagtgtgaaagctttaattctctttttatttcggagtctttgaatagcatttactctatagatttaacttaacaagcaattttttaatgcaaatatcagatatactcaaggacacctaaccctgggcctcaattcattgaaaagtacaagtcttacttggccaactttggatatgatccgagcaaaatcaaagacactccacaagattgccaagcaatgtcaaatagtcagctaactgcgatgatgtcaatgccaggaatgcaacaggctctaactaaccagttccctgatcttggattgaaagcctctgttgagtttgacccttttactagtgtctttgacactttgaaaaagcttgttcagctctattttaagtagtttctcagtaaacttgctatgtaaatttttatttacttttcttttttcttttacctataatccaactcaagacagtaaataaatgtatttattttaagctttgacttgatatattctaatagtaccttggataataacatccagctctcgaacagattattaataacacaaaataagtaccaactttcaaccaagtacagtataattctcttccatataaaagggctatgtcggctcatcttcctaatttggaaactttttctttcttccaataaattacaaatcattgtttttgtttatttcttatacatgtcatgtcatattttttcttgaaaaaattatacttcatactatttttattttattactatttaatttatatacagttttatagatcatatcacaattaagtggttagggactttaattttaacaagttatgtgagattatatttggtactttaattataaaaaaaagtacttatcaattaaaattattttgcagttatatttggttaatgtgtaataaaaaatgtgtattttttaacttatccctctttctttcaaaacaaaagttagggttgggcctaggctaagacgggctatagggcccaccgagctcaggggcccaaaaagaaatatttttcagttaaaattatacatattttttagtagttttcaaaaatactacatataattttttaaaaaaaataaatggcccaataatttttttttcttctaagacccacccaatctcataaccctgccttaatagaagttcaacgttttaattctaaaaacaagaaagtagagaacaatataaaattaattgtcgtaggaagaaaagaaaaagatttagattagatgacaaaaacgagtacaatagattaagttattatcatttacttgaaaacgtgtcaatatcatgctttttgaatcgaaaaattaagaattgttgatagtgtacatgaaattggttagttagaacttggttgttataggttagttatgttcttgttttcaactaactatcagaatgttagttaaggattctgttataattagctaagctctctttagagtatatataatcattgtacgcattttacttcaattaatgaaacacattgttttcttcttcattgttcatactctgctcctttgaaaatcaacttggtatcagagctcatggttgcatcactagtgttcacttcctccgatgctgcagctcatcattctgcagttccaaccacaatgttcgttccacccctgcgattgaatcgaaacaactattttttttggagatctcaagttctccctacaatcagagcccatgatttggaaagaattcttctcaaccaaaatcgacctcaaccaaggattcgcaaacctcctgaatcaacaacaatggtaagcaatcctgaatttaatagatggatgcacttagatcaattccttttgccgtggctaatgtcaactatttctgaatctatgaatggacatgtggtgaattatgcgtttgcctctaaaagttggaccacactcgagcaactatttgcaacttcatctcgagctcgccaaattcatctgatgaattaactccaatccaccaagaaaggctctttagccattgatgaataccttctcaagatgaaaaatcttgcagatggccttcgtgcagctggaaatcaaatctcagaggagtaacttattctttatgttcttgctagtcttggaacagagtatgaagtttttgtcgtaaacttaacctcaagagaaagactcactcttgcagaggttcaattcatgcttcagaatcatgaaattcgtattgaagcaaatcaggcccaggctaccattgatctccatggagctacagccaactatacttagttcaagaaaaatcaatctggtggatccaaccccaatggaagagttggatccatcaatttttgaggttgtggcaggacctcttatggtggaagatcaaacaatggtggtggcagaggctacttcaacaacaattgacctgtgtgtcaactttgtggctgcattggtcacacagttcagaaatgttacagaaggtttgatatctcttacaatcacctgatgagaacaatgaaaacttaagtccaaatccaccccaagcacttgttgcttcaagtggaactcatgatgatgatgcctggtatcttgacagtggtgcctctcaccatgtcacccaagatagtgccaatcttcaacaacaaaactcctacaaaggcaaggaaaagattacagtatgtaatggttcttccctttctatagataacattggtaatagtactttaactgcaagaaaatctcttttatctcaaaaatactcttcatgttctagccataataaagaatttaataagtatttctaaatttactcgtgacaataatgtcactgttgaattcactcgtgatttgtcttttgtcaaggataatgactcgaggatccctctttcccaaattctatagtcactagatccatcaaacctaccaatattgacttttatgttactcgtgttaacaaattcaaaattaattaaaaattcattttgagaagacttagttgattgtccaatgggacaacctcaaactcctttagatcaagaactccttcttaagggtatacttccttctgtattgatcaccttcttttctttcttgcgagttattcttgttgatctgctcaactctaataccactataagaattttacagatttaaccctacacaactcatacacacgaatcaacacattatttttgaaatgtggatgaagaggagaaacatgttttctttctataaatttccttttatttttttttagtttttagtttaacaataccaattttcttttgcagtgatgaacaaacttcaaaatcaaagcaaacacaatggagttaaaattgaaacacaatcaagtaaggtcaagaacttaagttgtgcagagtaaagacaaggaacaagaaaaatttcaaaagaggtgagagaagagaaatcaaaattaacatag

SEQ ID NO: 184657 - DNA, 5650 bp, Cannabis indica
gtcccattgggcacttgagaactatgtcacattttgtatgagatccacttattcttttattagttgtaactttatgaatattagtagacaatgtaactatgctactcataatgtggctaagtgggcgtttacccaccagatatatagatgtattccggtctctgccttgccggagaacttgctctgtaataaccgtgaggtctaattttttttttttaatctaatacagtactacgctaatttttaaatatatatatatatatatatatatatataatttattcctacggggccaaaattcgatttgaaatgtagttttcaaagtacataatacgaaattggtgacataatgtaccaacacatttgagaagcaataaaatacaatgtatcaaagtcttattccctttacattaatgttcaatttattattattattactttttttgaaagatacaataatgttcaattagtgatacatccacatacgatgtttcaaaaaaagatttaattataacattagccaattaagaaacgaaccacttaaaatgtaaccttttatataagtcaaatttgaaaacaacacttctcacctcactgaaacctaatctcacctcagaacataattcctattttattatgtttttggctttttccttattgattgaatcaatattcaatacttaaaagagaaatgctaaagagtattagtggtgttattagttcaactaagtatcagtctcatataatttaatataataaattttaaggaatattactaaccaatcgtaacgcgacatgtcgagaaggttataatagtaattctgaaaaataaatatagaaagaaattaaaattaaaaataaatgcaggctgtggggttcgaacccacgcgcacttatgtgcagtagatcttaagtctacccccttaacctctcgggcaaacctgctcatgtgtatagtttggtacatttaaatattaataacgttttcgtttaatgaaatttcccaattcaataaaaccctaaaaccaaacatcaaaaacataaatcagtgtttgtgtgaacgatcacggccatagtcgtcgtgctcttctttcactgatcacagtgagaagtaatggcggagcacttggcttccatattcggaacagagaaagatagagtcaactgccctttttacttcaagatcggagcttgtagacatggcgaccgctgctcacgcctccacactaagccaagtatagtccaaccctactcctctcgaatatgtatcagagacctgatatgctcactacccctggtgttgatacccagggacagtcccttgaccctcgcaagatccaagacaactttgaggtttatatcccattttgaatttcattattgttttcagatatatatttgtggtgttattgagttgaaagttgtttgcttgtttcttattttcttttaaatgaaggatttttatgaagatctatttgaggagctgagcaagcatgggcaaattgagagcttgaatatctgtgataatttggctgatcacatggtatgtttctgaggttttgtttagctaaagaaggattttaatgagttttcatgttttcttttatttgtttgcagaattgatttgatttggtatttattgtttgtgagcaggttggaaatgtttatgttcagttcagagaggaagagcatgctgctgctgctcttcaaagcctgactggaaggttctatgcaggtacacattttttttttcatctatcaaagatataaataccattaccatattattattattaatgttgtttgatgattgtttctgtcaatatagttgttattctttcttaagttgtagcctattagtgcaattcttcaaactatatcatattacggtgatagttgatttcagttactttacttgatcccaaaagttaaatcctttgcttgaacatttgtttgttgtttgcttttttgggttaccaaatggtgttgttaaatgttagagttggattcgttagttgtatagatattttctctcggttagttaatggtgacttctttaataattgcatatctttgatattgtttaattatacacaagaccaagaggggtagctcagacagtcaagcatatgggttgcttccacaaggtctgaagttggaacttctctgagtacttacatatctatctgctttagtttcttgggcctacaaatattttgtagggttaggcagaaaaaaagaagtttagtttgtattttcctttctcaggagtaggaaacattgccttttatttctttacattttagttttttctattatttatgagtatcattattggctggcttggatggttatcagaatgatggaaaattaacatctaagtgcatgctttcgtgaacaatgtaaattcaagtgtacgtaccaattgacttcgggatctaaccctaatcaaagatttttaaccaagtgctccattttattaagctaagaaattactgattttgagtcattgaccacatagcgttactaggacttaagacattttcagtcacttatggaaccattggattccattttccaataataatcccacattctaatttttcaataatctctgttggaaaatctttttgagtttgtgttcagtattagagtcaatttgctaggagggatattttttttccaacattaaggatgaagacacaatgacaggactcatttgcaacatttaataatatgattttaacaatgaatctgatttcaggtcatagggatttgagatttaaaccagaaccagtttaagaccaaatggcttggcacgattgaattaagattttcccatctatgacccttgtaaattggctcaatggctcgtcttttactcatcttagattacaatttgatgaagcacgttttggtcaggtaactaatagttttccaacatgcatttacctcaaattttaataaatataattaattatataaaaaaattggtttctatcaataacacaggttttattttgtgaattaattgttttggaaagagaataacatggcttattataaagtctgtttggtaggaggggaagtagattgtattgggatagagtggtttcttagtaagtaagatggatttaggagaaaaaggataaggataatcaatttcaaatcttcaatagtaactaatttgtaattcatttggtatgaagagatttttggagaagagatgatctctcatgtagtctacaaatgaacgaaggagcgatttgatcttttctcgttccacttttaccaaacataggaaagagaactattattatttctcacccccttttatctatcatagccttacttgattttgtttgtttcttttgatttctgttttattgaacatttctctatttcattctagaattgggcatgaaaattatgctacccctagtttttatttgaaattttttattgcatattatgaatggcatgagtgacaatttttatgtggattttaacatctatttaggcatgaagtaatgcttgatcatcctatttgtttgtgtggatttaacatgagtttcataaacatttcagggcgtcccattattgttgacttctcaccggtgacggattttcgtgaagccacatgtaggcagtatgaggaaaatgtatgcagcagaggtggatactgcaacttcatgcatttgaagaagattagcaggtaagtttcatcaaatgctttctttaaagttgaccttgctacctaataaagctcattactcattagttgatggttcattcactgcatgaaacttttagggagttgagaagaaaactatttggaaggaacagacggagacgtagtcacagcagaagcagaagtcatagtcctagtaggaaccgtggttatgaagaacgaccccatggaggtccacatggaggtcctcatggaggcctgcatggaggtcgtggttctggtagaagagatgatgacagggatcaccgatcccatgataggagacggcccagaagccgtagtccagggccaggtgcagttgcaggtcgcaggggaagaagtagaagccccggaggacggaggaataggagcccgccagcaagggaaagcagtgctgaaagaagggctaaaattgaacaatggaacagggaaaaggagcagggaggaggatctgatgaaaaacacaataataatggtgacaatgaaaatgaaaatgaatttgaaaatgagaagaatggttatgcacagaattcaagtcattatgatgatgattatcagcagcagcagcaatagtttggcggacctaaataactgatataattggacttttctggtttgtcccttcatttttatctggtatgattactatttcagtggtttgaaattcattttaatggttggtaactgaattgttgttctctttttttttttgaaaaaaaatttcaggtaaaccttttcctcccttaaggaatctatacaccctcgctctaccctctattttgataggcggcttatagattctccaggaagatgccgtttttaaattgtggttattattttttttttcttttgatatttgtgacatgttttaagcctatgaaaacttttagaaatagatttttgtaattttaatttgaagagcaatgtggtgcctaatattgatatttttgtggttttaatgttaaacgagtctttgctacatcgaaaatgattgttgttgcatgtttcttttcccagtaatttaactccccccccccccaagaaattcattgttggtaaaactagcattgctattatgtggtgtccaatgctagcatatcttgattggtgcaacgtcgatgctaacaccgctacggggggtgaagatatggtcaataatgtacttcatctatcaaccgaaccagcctcagttcttattccttgcaagatggatacttcgaccacagcaaatgattttttgcctattagcttagttttgacatccaaaacatttagcatgggaacctttacgagtcaatatccaatcctgtgataagctgcttaatggattcgggcaatgatgttagtcccatttggggcagacatgaaaatcttctatcaccagccatgttgatgaaatctaacataagatcaagggcttcaaacttcaagtagctagaaatggagtatttgctttttgctgttgatatcaactctatttgaagaatcttcagagaaagaggcaaaatattttcaacaatgtctcaatctttattgtagtgtggctagaaggagtatggagaatacagaaaaaatcaagatttcggagattgtgagaattaaaaaagactgaagagaagactctagccaaaattaaacaatgtctaccttattgagaaggtcatcaatgatatacgacggtggaaacatggaagactacacatcaaattagtgggttgaacaataggattattcataaatatacaaaaatggcataatttttgcaattttacagagctactgttttttcttcttttttgtatatttttacgattgattttttttaaaatattgtctatttttctgttgtttcaaaactaatattttgactttactgctatgaaaagtaacgtgaaagtaatattatttttttttataaaa

SEQ ID NO: 184658 - DNA, 1507 bp, Cannabis indica
taaaattttaataaagtattttaaaaaatagaatagagtagtcaatgaaagtactctagtatgataattcccaagagcaaacaaaatatagttaatatattgcgtgtataatattttagataatggctatgatagtactatgcttttatgaattgatattgcagttgagataccatctcaatttctgttgattttattttttgtttttcataaaagaaacaaatattaattttatttctcacataatttaggttgtgttttactctcttaaactgctcaagaaaaaacattaaataaagaaaaggaccaagcttaaatttgtctaaaacttcagttggaagtcttgatatagtctctttggtaaattaattgctcacaagtcacaagtcatatattatttaaactgtgctttttgtatacattgaatcccagttccaatgcaggttgggtgcaatcatttcatgtaaaaagatagggaattgtatattgacattatatatatatatatgtacaataaataaaatgttacatatttttattcatacacatcacttgctgcaaatctaagcatttggcatttttagtaaaagcttttattttaaattaatttgtaaactttatggtaacctcactatgatctcatcttatgcattattttaaaagattattaatttgcaatctagtcactggttgagatttttgtgtgtatatatatatttatatgggctagctgggtgacaatacactatttaaatcacatgttcttcttcttttttcaggtgcaaattggccctttccctagaactttgttgaaaaagtcatcagtcctagtaatattttcccaccaacctgagtcttaattggtgaactttatgaaagtggcccctctctaacagaattaagttagcataaagatgatgattttacattacagtgtattataaatcctattctcatccacatccacatatacaacaaacataattagtttatcaaatatacctatcttatcaaattatttgcttttactcaaaataattcctattaaaagtgacatgtaaagaaaaataaaaagacttaataataataataataatcctaaacagagaaataatgtatattttaagttccattttggctttaaattcaaatgaaaaagttagtgcaatagatttcaaacctgaaaaataattaaaaatcatatgatacatatacagcctttatgccaaagatggagtcaaatccattcaattctgcttatcttatagatgatggcctttgctgtttatagtttttttgtcattaagttaaaaaatttctacaaacaaagataacaaaacagtactactactcctcccattatctcatcttaatgttaatggtcatcatacattatcattacacaaaactaattatactcaccttatattccaaaccttaaatcattacttatgtactactactcaaatatggctcctaaacatattattctactcaattctgaggt

SEQ ID NO: 184659 - DNA, 581 bp, Cannabis indica
aaaaaagagaaaaacaaaggttcttcagaaaatgttgaaaacactcattatattagtgcatgctaactccacgtctaaacattttcattttgatgcagttttgtgctcatgtgtaggtaaatgacaatgacctttcaaaagagttgtataagaagtacagcgctgtgagtatctgtttatttatttcttgcttaacttgttgtcctctacttatttacttgtacttttagtgaatcaatctggtctcttgtttctgtttaaaatatatttttgtaaacagctaacatttattactaacatttgaatcctacttgagtacagcatacatgaagtagccactgctgcttcaatcctcatctttgttatatttttctaactagccatcttcatttctttttgacagattcatagacgtaaaatacgctcctggcaaatgatatgtgttttgtcacgttttgtttgtcaagatattgttgggcaagtcacaaattacttacatatttccctcaccgtaagtaaatgttacatttcaacaattggtgaactccatttatgtgtaccgaatttattataatattgtt

SEQ ID NO: 184660 - DNA, 4075 bp, Cannabis indica
tttccatatttccgatttaaagggagtaaattagcctaattttgttctaatgttcagagtcatatagtatagtggatttgttcgcaatgtaaattctactgggggtatagtagtaatatgtgtgaaagttatgtgcttccaatggaaacaagaatttctgttttcttcttcctgttttgctgttaagaaatacggaatgtttgtccgctatttttgtcgtatcaaattatcaataagttctttaaattcatgagcactgattttacaaaactcgtattgttaaacattctataatcaaaaatatatattttttttctttcgtaaaaaacgtaaaaggagtgagcttatacagcacagtaatgtcaatatgtgcatgcatatgagtaaaaaaccatccttcgaccccgacaatacaagtgggctttttatccaggttttcatgttccaaacgatgcaggtacagattggtacgcattcgtttacttttgaccatgtctatgggagcaccagttctccttcgtctgcaatgtttgaagaatgcattgctcccctggttgatggtttgttccaaggatataatgccacagttcttgcttatggtcaggtaatattacatttcaactttcgaacagcctcaaaagggagagcaagagattgatttgccttgcaattttggttacctttccctttcgttaacaatttcatatattgcagactggttcgggtaaaacatataccatgggcactggctttaaagatggtattcagtcgggaataattccccaagttatgagtgttttgtttagaaagattggaactctgaagcatcaaacggaattccaactgcatgtttcttttattgaggtttgtgaaaaaacttcatccttattgcgttcgatgcattagtagttcaaatcttcatctttatcaccgtgtttcgttaaccataagctatttcattttctttatagctgacttatgccatttatatcttgtttagggatacaattcagccttattaccaataaattatgtatctgctatggaaacatgaattctaacccttgatattgatagttatatggtctggctacttctttgtaatgctatgcgtcttttgttgtttctcagttagctgaccaaatggttttgattcgtagattttgaaagaagaagtaagagacttgcttgatccaacttttattagcaaaccagagattgcaaacgggcatgctggcaaagtaacagtacctggcaagccgccgatacaaattcgtgaaacatcagatggcgttattacattggcagggtctactgaaatcggtgtaagcactctaaaagaaatggccacttgcctggagcaagggtcattgagtagagcaacaggaagtacaaatatgaacaaccagtcaaggtaattaaattcttttaacatgaaaatttcggatatcatttacactcggcttctaatgctccagcaagatctagaacaactattataattttgtcgaagatatggggcatgtctaaatttgatttgaagtaaagtacacactttctaggagtctaatatactcatatactttcatgcctgtttttactacttgaataacgtgtcaaagctgagaacaggatgtccttttcactgcaattcgttctcttggtgagaggatatttaccaggtagggttagggtaacagaagacacagtatgctagttaagggtcatttgtctctttccattttgttaaatatgaaagaaagaattaaatgttaacaaagttagatggaaaacctgcatggttggaaatatctgagaaaccactagaattagacattttgttagaaaaccctctaaagcaatgatgatcaaatcacccatatacaatcactaaatttgtaaagaacagacaaacttttccttccacagaagattctgttagtaaccacaaaatctaaactaaaatatcaaaatttacattatgttttgataagcaaagtatttcataatttataaatccaaacagaggtcaaaaagaaaaaaggaaaaagcattagtgactttttttaatgacatttgtcaatttccatatatgttatagtcgttcacatgccatcttcaccatcacactagagcaaatgcataagcttaatccggcatctcctggcgataccagtcctacggagagtatgaatgatgattatttgtgtgccaaattgcacttagtagatcttgctgggtctgagcgagcaaagagaacaggctctgatggtttacgttttaaggaaggtaaacagaatgattcgtgaattgtgtttgataaatttcattgtggttgtttattaatcagatggatattgaacaggagttcatattaataaaggccttcttgcacttggcaatgtcattagtgcacttggtgatgaaaagaagcgcaaagagggtgttcatgttccatatcgagatagtaaacttactcggcttttgcaggtttgattcatttcaagttcttaaaatgctgaattttcattactaatggtttacttactggccgggtttttgttttttgccaaatccctctgtttgagggattcttagttgaattgaatatgcccatagtcttaacatctttcattacgtatgtgtaccattttattttagcttgaacctacatatatcatgtactaaaatctacgaagttaactttcctcattatgctgaattaaggactgaaaattatagtagactgtaaaaacttattgaaacatggctttgctggtgcttgacattttagtggtatttaattcaaatcatgcactatatattattctgactatgattgcttacctaataatgtatatgcattttggcaggattcactaggtggtaacagccggactgttatgataggtaatttgataagtatcatagttttggtttttaatttttgtgtgggcaaatttacttttgtacgcagtacatggtttccgttgtgtactcaagctaagtaagggtctatgttgtttcatactcttacataacctgaattttttatcaacaacatggtggtcattgtataaattttacatatatatggtcaatacatcacctctcagtctctcttgcaatagatatcttttacaatcgcaataggcaattgtttactgatggagttgattatctgagtatcatctagaatttttgtagttttgcacgtgtatttctcttcgacctttcacatattatcgccagaattttatcatgtcttatgcttcaaattgtgtcaaattttagcctgcataagtcctgctgatatcaatgcggaggagacactcaacactttaaagtacgcaaatcgtgcccgaaatattaaaaataaacctattgtaagttgctcgttattatatatatctgtttcaaaaatattataggtgaagtttgtctttctttgtcagggtctcacacgtgtatatctttcttgatgaaaatataactgcaacaggtcaatagagatcctatgtccagcgaaatgctgaagatgcgccaacagcttgagtttctgcaggctgaactttgtgcgcgaggaggaggttcttctgctgatgaaatacaggtaatggggctctacaaatagatgtgtggaattgatgattgtctatcagaggacagtagctaaggaaggtatccaagcggctgggaactgctactgtcaaattgttttaagaaagttaaataaaaggaactaaaaacatgcaccaaataatgaagagtgaaaagtatttaatgtagacataattttctcgatagacaaattatttgaatttgtaaactgaagtaataaactttacaggttctcaaagaaagaattgtttggctcgaagctgcaaatgaggatctttgccgcgaacttcatgaatatcgaagtaaatgtactgttgcagagcagcatgacagagatgctcaagtatgtgtctcttttttgatgtgtcactagtttttactcaagcaatttgtataaaactcttttggtttcttgctctacttggtggacaattccttaagttttttttttttt

SEQ ID NO: 184661 - DNA, 1133 bp, Cannabis indica
gccactattcaggttagtgtacacatgttcatatatataaatacattacagactatacaaacatttctcttatgctgtttgtactactgtgaaggtatacccggaggcatggacagcagttctgatatctcttgacaatgttggagtatggaacatacgatctgaaaaccttgacagatggtatcttgggcaagaaacatacttgagaatcatcaatccagatgaaaatggcgaaacagagtttgctcagcctgataatgttttattctgtggtgacctagcctatttgcaaaagtatgtcaattttcgtacttcttatctgccttaatgatcataattggtagcaagttttaactccattcttgtttgatgtttttcagggaacagaaacataattcggccatttcgatttcaagggaattcttgaggctgcctttaactctactgattgcatttttcgttttcaccatatgtagttgattgatgtttctctacgattgactgttgttgatatggttttgttcttgtttacaattcctggcagtagcactggcaactgtttcttttggtaatgtgagtagttgctgttgggtttaccatacaaacaaatttagtttaggattgggaaaaaagagtaagaaattctagtgattatttattttccttgtttggtgacgttttattaattgttcatgttaattgtccaggggtgttcctacccatttcttgtaattttgggttcattctttgtgcatctttcttcagtcttttctaatggttgcttactatgtgaatccatatcaacacaattggatcgggggtttaattatttctttcaaaattaagtctgatatttaggtaggtactaaatcctaataaaaaaataattaaaactttccaagttaaaaattacaaattttatgttgctacttttttttttcctttctttttgagatatttgattaatactaaataaatatgcattgtgaaaattatattactaaatatggtaaattttgataaatatcctccatcaagattttttttaaggaaaccctctttcatgacagtggcacctccaaaatttgtagtatatatcacttaactaatcacaccaatcaatccaattgtta

SEQ ID NO: 184662 - DNA, 4882 bp, Cannabis indica
gttatgatttatttagttagttgtaatataaattatgatcagctatttctgatacttgtctccctgacccaccaaaagggtcagaaattataggaaaaaaaaataaggggagctttccgtaagtggttcactcaaaaatattaatttcaaacgacaaccaaaacgaattaaaagccataagaaagtaacatattgaagttgaaatttgaacttataacatcgttgattgcggagattagaaaaagagattagggtgtaaaatgtaaattctttattttatatatataaataataaaaaaagagcctaaaagatagtgacaacagtcaactagaaaaatgctgcgtggtatcattataataaaaaacgcgtacgggatgagaataaagaaagaatgagttatacaaaagtgaccactatgaataaccctttttcatgagccaaacaaaattgttatgtaaagatctcaatgtatgtattgaccaaattccaatggggggaaatgtgaggttaaagttaaccacaaaatgaattcaaactttcaaatccaaacccaaacattaggagatatgcacatggtaccaatcccaaacagcattaattaaattagaaacgcttagatgagaaattgaaaacagcaatcatcataactcaggtggggttttttagaaggaaaaaaataaataaaacataaaaagaggtagtaagtagtatagtatggtggggttttattatttatttattttattattttcagaagaaaaaaagggatcaagtggggttaaagattgaccataccctgtttcaattgtccccagcccataatcttaattgggacgtgtagtctcgaccaaaattataggattcattgaagagaacgagtaaatgctactttgacaaaatcaacacaagaaaaaagagccacaataatattttgattattttttcacatcttatcgtttttctaggcctaaacctcaaataatgaagcaaagctcttgtatgtcaaaagacaagccgaattgtgtggcctgaagaagaggtaaggaaatgtgcaacaaatccgccattatactcagctcaaagagtttgtgtatcactactttcaatacaaatggatcccaaatatagagaatcgaacttaaattccattaccctaaaatccaatttgacttgatactatcaataataactaaaagtgtcatgtaatcacacaaggaaatgagattttgaccattgaaaacgaagcctaatgataaacacaaaatgtagttgcaactagggatttcaagaaatgcatttattcatatttgttcctacttagtttaaaaaaaaacagagagaaagaatgatataaacaatatatagatacacattaaagaaaaggaatgataagaattgtgaaaatcaatacaagtaaaaatggttcatgattatactataaaattggaaatcaaaagaaataaaagtatgatatagaagagataataacaataaaaacccacaaacgagcaggcagcagcaacagcaaaagataattatgatgatgatgatgatgatgatgatggtgtgatgctgctgctgctgctgttcttgtagccctgaataatatggtcaccaaattcatccctatacatacacaattctctgcaacctaaaactctttctctcctatttttatttttcacaactcaaaatatccatctcataacaatttttaaataaatatggagagatttttttctcctcttacctctctcactgtctctttttttttttacttttttcacctcttcctcaatttcttcttctctgttgtacaaatgaatttgacatccgcaagagtcaatgaaacaaacccagaattgaacagtgacccttttcatatcttcaactaattttggcttttattttcttcttcttcctcctccaccgagcgatgagaattgcccaaatgagaaaaagaacttgtagttatgaagcacaaggggaataaaaaaagaaaaaagaaacttttttaataattttttggtggtgggggattgatcactaaataacgctgtaaaattctttaaggttcttgaacaaaaggttagaggaagaaaattctcaaaagaatcaatagaagggtggtggtggaggagaagcatatgaaaccccatagattggtggcaatggcccctcatatacaggagtaggaggtggcgggctttcataaacaattggtggcggcggaggtgatgcagaaggtggtggatgctcacatggaacaggtggcggtggtgatgcaaccggtgggggtggagaactgtagtggacaactggtggtggcggagaactatagtgaactggaggtggtggagaactataatgaacaggtggtgatggtggcggtggagaatggtacactggtggaggaggtggtggtgaaggtgatggaggtggtaagtaaaccgtaggtggcggcggtgatggtgaaggtggtggtgggggagagtactctacacatggtggtggggaaggaggtggtggaggttctatacaaggaggtggtgatggtggtggaggagaatgaactgggggaggtggagaatgaacaggtggcggtggtggtgaactataggggtatattggtggtggaggggaatgtgggggtggcggtgaatagtgatgaggtggtggaggcgagtgatgtggtggtggtggcgagtgatgagttggtggtggtggtgagttatagtagtaaggacttggtggaggtggagagttcagaggagcaggaggtggaggtgaatttggcggaggtggtggaggagaccggacgcagtaaggtattggagctggcgaagatggtggtggtggtggtggtggggaatacaatgggggtggaggagaaggtggaggaggtgatggtggaggtggtggtggggaataaactggcggtgggggcgatggtggtggcggtgaaggtggagggggagatggtggtggtggtgaaggtggtggcggtggaggggagtatactggtggtggcggaggaggaggggaaggtggaggtggagatgggggcggcggaggtggtgagtagactggtggtggagggggtggtgagtagactggtggtggaggtggggtggtgagtacactggcggtggaggaggagatggagatggtggtggtggtaaaggcttaacaactggtggtggagggaaaaccaccggaggaggggaaaggagaggaggagaaggaggaggaggtgatgggagagaaggaacaaagggtttacatttgaaagtagaacaatccactgggtgagaaaggaacgacttacaagccccagcagacctctgtaatggccttgaaggaagacaattcctccgatcatcgaacccttgtagtgccaaacacgacggtggctctccggtgaagaaattgtaggagaaggtgaagttttgcagactgggtaaggagcaaatgccatcaggaatcttccctgagagcatattgtgtgccacattgagctgttccaggctcttcagatctttgaacgtgttagggattggacccataagcttgttgaagctcacatcgaacacagtcagattcttaagcattccaatctccggaggaagacatgaattcaaaccattgttcatcaatataatctcgttcaggttcgacatgttccccaagctcgacggtacacagccgtggaatttgttgttcgccactacgattaccgacaccggtgagtttccgaaattgtcaggcagattaaacacgaacctgttatggttgatgaaaatggcatccaatggtctgtcaaagagctcacgaggtaccgacccttcaaactcgttgaacctcagatccaagaatttcagcgatgggagtttcagtatcaccacaggaaatttcccggcgaacctgttgttactgagatctaactcgaaaagcaacttcagattcttaaacttgtgaggaaccgtaccacaaaacctgtttgagttaatatggaacaatgctagatccacaagcagcccaagctcctccggaagataaccggcaatgtcggcatggttgagatcaatacctgcgactgtacggatcttacggttatcgagtgccggagcacaaaagatcccggtgtagctgcaaacatcagatccaacccaggtaccggtaatattcaaagggtctgacagaatggcttgcttccatgcttgtaaagctatataagcgtttctaatccttccattctcgaaaaccagagatgggtcaacagtcacattctctcctctgtcaccaaactcgtccctgtaataaagcaactgacgttgcttgatgaacagtgtctctgctgagctgaggcgtccatggctgatgagagaagccgccggctcagaggagcagacggagactgaagcagcgaagaggaggaagacaatgaggactgaaatattaagaaaactaaggctgaaatgggtcttcttcttcatctcacatgagacatctgatgctctcaatgccacttttttttctttttctttttccaggataataattataaatccctcactttctaggctggttaaccccaaatgggttttctcagaaagactccgtgtttcagatctgagaagaaaaagaaaaatgggcaatgtaataataagagaataaaggcggagtctttggtttggttttggttctcttctctctctctctggtgtagtctggtttaagaggagagagaatgtgttgaatggatagtggagagtggagaagagaagagaagggttttttctagggattttggagatgtgtgagtgtgtcaaatagaaagagaaatcaaaatattatacgttttttttaaattattttagt

SEQ ID NO: 184663 - DNA, 1980 bp, Cannabis indica
gggaaatccttatgtaatcgcaatagcttttgaagtgatccttcaatgtaaggatagccctagcttagatgtgctttaaactccaagccctagttttggaagaaccactcatactacactcgacatccacattaaaatgattgggaggatagcaacttctttcatcgggtagtatggattgacatataaagttattaccttgttttatgccacataatgtcaagaaatgatcgacgtatggggcaatggaagtgatcttagacttaaaaaactccgctcaaattcttatttcggttccattgtcaaatagtgtcgaagattgttgttcgatttaaggaattgctccattgtttgttattttttagttgctcaatcaataaaaaaaataaaatatatttttatttttatgatgtataggtgatttatattttcttttgctttattaagattgtttttatattttttttagttttttggcgcaatatgttaatgtttgtctagtttatttgctaaagtagcattgatgttaagttattttttaattaatttgggatttctttgttgttggtttgatgtatattttaagtttatttttgacatttttttgtttatgtgtttgttttgtattgcatggtgggtttatgttgtctttatttatttattgatttttgttacttttatattgtttttgtcaatgttatgagttgatatataagtgatttgcagttgtttttaagctatattttaaaaaatgaaattcattcaaccacaacaacaattacaaaaaattaggcaagtcaagttgtaaaacttaacttgcacaagggagttcaaccccaatccacatagataactttgttaatcaaagtttgattagctaaactaagagctacttcattaacttcacaatatacaaacgaaataccatcaacattatcatataatagctcatcccagaacaacccccaccttatcaaacattcattttcatttcccttcatttagtggctcccattttacagctatccttccacctcctttctcttgaccataactttctcctaccaatccacaatgtttgttgttcttggcgtacaatctccattattcatagagtttcgaaatatcataaatgccaagacacaattacaaagaactcgaatttctccttaaaacatctttccttcccccacgacatacttgcttttaagaccacattacttccaaataggagaatgtagtttgcattcccaaagtgtatgaaaaacataagaacatctttgacaaccagaatcagcatgaatctcctaagttcagtaatcatttcgtatccacgaatattctctatttttattatagtgccatataattttgtcctcaatctcccagctagaacacgacaacttcaaaattagctcggtatcctcttcattaaaaatagctttcacggattcagtttcccattgcccaattagttggttcaagtcaatgacaaataattgtggcggaaatacttagcttatcatagatcttccattgccttcacactattctcattcccaatcctctatctatacccatttaatatcaccttttttccccatactagacttcccaagacaaagaatacatgtgttaatttttttttcttcaactaatcacatttattttagatgataattagaaatgaccatgtaatgttttggtgcatattaagtagttaaatcttgacgattcacataaaatatgtgtttacatttaagagagctaacatgttgtttacaccttttctctcttttaattttattattaatttttaataaaaaatttaaaatgccttaaacaaaagagtaataatatataatatgcacacgttttaatagcaccatcttaaaatgccaataagaattaacatgtaatttgcaccattatttttctttcctttttattctttttataaaaattagaaaacatctttaa

SEQ ID NO: 184664 - DNA, 13421 bp, Cannabis indica
agtctctatataaactccatttttgtaaattgtacgcaaataaatgtaacagtgcatcccccctaccttacctttgcttttttcttttctctatctatgtttatgttgtcattattactcaatatttaatttactatatagtcttctccataatttcttaattattatactcctctttattctatcccacccacatgccaagcaagactgacagtatgcagtgacaaattattatatattattatacactaccatcgttcataccatagaatattattattattattgttttgataacaaaagaaaattggttaatcatcatttccacatgcagagagagagagagagagagagagagagactcactgcatgtttgggctttaaattggctgtcctcttttgaattattatgattgatgaggatgatgttttatatctccccctcattattattccactatcattaattaaatgcccatataagaataacaatagcaatgcaataggaacacaagattacgattaatgtaggggagccaaaattaagaaaaatgaatacagtatattgattgattgattgaggaatcagaaacaatagttactattactatactactacaatgaaatgaattggctaccaaaagtaacatatcaagtgcaagtgggttccattttcatgcaataaaataacaactactttatgcttcaatcaagctttgtacttagtccacagactccacacccacacccacacccacacaacgtgcttcttcttgtctcttaaagccagagcaagtggccggccccaccaaactccatccttattaatattttattacatccccaggcccatcttaccagtaccactttgcttaaatattcaaagcagactaaaaatcctatcaaaacttgtaactaaacactcataataattgaaactaatttcacaagcatcataatcacaacacttacaatttttgaaaaaataaattaaattgagggaaggagtcaacaaagcttgtgtatatctcggtcggcatcggttgtccttgaatcaaaatgggatgatatctctcaaatattgatagcacaaccttttgcagatcaacatccttcaaataacctgtaacgcaataatgcagttgtcaataaatattcaatttgatttgatttcacactttcaatcatttttaccaaaaatctacaagaacaagatgcctacccaattcaatctcatcatcatcaccatcttggtcatccaaatcctcctcctcttcgatgactgtaccttcttccaaagcaacagctacttttgcatacctattaagaaactcttcctcagtttcttcaagttcctcagcctcggaatcctagttcaaatcaccaagagaatatgacaattagacaatagcagcataagatgcatgaattataatgcaaacaccctatcaaacagtaaacacaaatttagcagatgaaattatgtcattttcaagtggaacctcatcgtcatcatcgtcagtttcatcatcatcgtcatcatcttcttcttcatcacttccgacctctccattgtcttcatcttcttcagcctcttcttcctgaatttctttaaaccgaacggatgcctccattaatgaagtaaagcattcctctaacaaactatcacggggtttccctgattccacgtgcctttcaattatcttggccagtgccataactgagagccatacaacaaacagttagtgagtccacataactgacaccgaggaaaaaaaatgaaaatgtacaaatcctgaaagtggtagatactaaccaatcagccttatctcagactccattgtcgggcaagcttcatttgatctactgcagattttcgacaattcagatgcccagatttctaaagctccattgacatctttgttcaatgatctctctacaagatcaggacagcacaaatagcatgatgttaaggagagcaacaagggcttccattgtgaacaaggtttactctgaagctcattaaaccgagaaaatgcaaccccagaaaaagcaactgccaatgactgcatcacaccctcgatttcaactgaatctcttgggagtgtgagcaacatatgaacacaagagcaagctctccacattgcagatggatattgtgaaattgcctcacttacaaaagcaccgatgccttctattatcgaacgtttaggaacatgctggttgggagaaggaattggccttacaaaaaactcttttaacttatatctgttttgtagactaacaacttcttgaatgcaatcgaaaactgacatatcctctgattcctcccacaaattccattcggcaatcagattagcccaaagtaataatagctccggcaatttaagcttcgaaattgcattgctttcagtaaccgatagcatgatggatcgcagtagtgttgaagcatcatttatggaagataaagtagaaacctcatctatgtcgtctttctgatcaacatcataaagggagttgcaatcaatatgaaatctaaaagtaaagttaagtaaatgtgaagattgctaaatcaattgatctccaaccaatggaattgcaggtgtaaaccaagcctgttgcagaagagctgaaaatgatctgcccacagcagctcgaccagacgcccacttttcactagagtcctcagattcttcagagagagagttttcccaagattgagctatcacggctaaggctgcaatgcccttttcaaccatctattaccaaaaactcagttcatcaactgtacaacaccttaactgatacaatacaattcaaacttgccacaatttaaacacactcgaaaagtttttgaaaaaatcactacacatataattaacatgagagccaaaataacagaaggaaaagaaatagtttttctcactttcaatgcatatttatcaacgtcctccttatgtttacagttgcaaatttaagacattattcatcccaaaaaagacatgcaacctatgacttagtgattaacatcacactagaattaaagcacacgtgagaatttcaggatgccaaattatgttgtttatgaaatctagaagacacacttggaaccattaaatgtgatgtttaagcatgtaactaataccaagcaattttaggttctctttctttcttagcttttctcccaacaagggccataatttccatttattcacctcctccatcttcatttttaagcagttggaaggtgatacaatcacttgggtagagctcactctcaaagctagcctatgataggagggtgcccaagaagttatataaaatattttttttataggaggtactaaccaatcccatacttcttggctaaaacattaataattttttttttctttttttttatgtgctaatgattcaattccagcctgcctattcaaaatcacaaatcaacagctagctgcttatacaattatatgcatacttgaggccatggcttctccggattaggaggtatgcacttcgaaattgtaccagccaatgatgaaacaatgaatgggatatgaattgcaacattttcatttcccgcttcaacaacagaactgagaagttgaaacaatacagagctatcttcatcatcaataccaattctaccaatcacaacttgaagaagaggaagccaatcaggaggcagatattcattctgaagccagaaaacaaaacacccatatgtgataatcataaaactctaatataggtaaagaggctccaacaaaaagatttgactttcagactcacttcaagaagttctgcaattgccccagcagcagaaaccctcacaggataacaagaagtatccccatcatcaaggacagctaatgcatgaagtaatgaagaatatacatctgcacttatttcctgaaaatggcatttttaagactgattgagacaattactgagtttcatgaaactatgatgccatatcaaaggaaggaaaatgtgataaacaatgtgaagaagcaaatgaaacacatattagcaagtgagctaagagaattatgggatgagaaatactcgtacttcaggcaaacaggaggctagctctccaagtacccaatttgcaggagccattaagtatggtagacatactgatgacctatacaatggaagtagccgcatctgaaccaaatttgtaatgtgtctcggttcttgctccctaagaaactgcatatgtataacttcaaatactagtaatagaacacattccccgattgattaaatgggtaggataataaattcttacatcaatcagactaccgtaccccatcaaaacaccaaaataactgcaatgatagccgcagtagatttgtgagagaatcatcttgataaaatgtaaagcaatatgaatgaaatgtaaaaccttgaatgtaactttcacgggcagtagtaatgatgattttggtcatggaaataatcacataagagggaaataaaatatgatccgagagtaaagaaaatgtaagtttgaccaggtaatagaaaaagactggtgtcactgaacttcaaggtccactcatgagaagaatggtattgtcaaacagatcaggtcgaattgttttcaaggtcactgttagcaagttatagaattcttgcacactactcaactcaagataaacaaataatcggattacgttttctcaaaaaaaaaatcggattatgtgaaactgatgcatctaagagaatattttggcacgaagaacaatgaaggcctgctgtatgataattgattatttcctttaaccatcagtcctcccagaatagaagaaaataaatcaaatgaaaagcaaagtcatttgagcaacattaaaaaataatttttcaactcacttgtttaagttgccagtttcattatttccagatggaatgggaaactttgaaaggaagggaagaaccaacaattcgccaatagagctgtgtcgactatttcccttgttcttttcacctttctttcgctttgatgaagttgaagaagttcttactggaggaccctgtaggcacccagtgaatagtaagctaatgtatatggctagaaaagtttcgagtaaaacatcaagagcaacctttgacatagcaatcacgccaagtaattattgcactttttctggctgtaaacagatcatccttccatccagaaacttcgtcctgcattcaaaacaggcatggtaagtcggtgacatggacattgatcaaatgtgaattaattccataataatcagcaccaacaatcataccaggtcagatggaagattctttcttataaactcatccgcatcttcttcccactcagtgatatcctactcggtaattttccaaaacattacaggaaattaattacttggaaagttttgaactactttcaaacaaaaaatcctttttttcccttcagaacatttaccttttcattcattactaatgctggaaagattgcagtttctaacaataacgaaaagtggggtgcgactaatctccatccctgtttccaaatgacatttagctccttacataaaacacacattgtacaaacggaccatccaatggtaattttataggttttactgacacaatctataacacctaaatgatttttatacaatacccaaatttgaaatttgggtaatatttggtatggtttaactaattagataaccttttttttggatgaaacaataatgagataacttacagggcccgtctccagtacacgtgaaatcacatcaaaagctaatgaaacaatccgctcttgtaaaaattcaagcttctgtgtacaaaagattttttttcgttagagcaatatgaccactagtatttagagaaataaactaggattttcttctcaaatacaatttatgggccaaggatcaattaagaatcagacaatcttaaacttcatttgtaaacctaataaaaacactaataataacagcaacaattatacaaaacaataaaataatgtagtagtaagctattacaaaaaaaaaagagtagcaacaaaaatgaacattagtatagtggaagatttttcataatggaatgccatagaataaagatcgagtataaaacaacgaaaaatcatgttattaaaactctaaatgccattcatctaacaaaaaaaattgccaaaacagcaacagtggagtttctaactatagtaacaacaaggacagcaacatcatatatacctaagacaatttcaagctatacaaacaaagaagagagcttggtgagtgcaaacaagtcagtcacttgaaaagcaaattgaaaacaatgaggacaacgtacactgatatttttactatgcttcactatgtttaaagcactgtctatcatgcgttgcattaacctagaacagaaagaaaaaaaaagaaaacaatattaataacaagcacaataattattaaattaatgaaagtatacactaatcacatgcattacttatcggaatacttccggtgacgtgtaaccagggcacaaaatatttgcaaacttctcttcccagtcttcaacctcatcaagtacttactctcaatagtagccttataatcaaagctcagagagccaagaatgtcaattagatcatgacagactgaaggcagaagtggagctaatgaagatggcatatgtgacctcacctacgaaagaaacagttccgagaatttgctattaagatataataaaaatagtgcaaggaagtggggtcttttaaagcagcaatggtttcagtccacggccaataattttaatagctatcatcccatcagatcgaacaaagagatccaacacagcgaacaaacatctaaattataattttgagtacggttatagcttaatccataagataaccagctatattacttatttcaacatatatttgttttccattcttttcttttctttttttcactttttcctgtaactcatgcaaggtaacttttgagtcaataacatgttcacacaaatagtaacagaaatgtcactcacagcaaaatatatgcattttgatataagaagaagtgtcttctctgtctcctcggtcccatcccttgtagtatttactttgatctcctgtttacaaaattaaaaaaatatattgtcatggattcactgaacaaagtagtaacagaaaagaggtgcccaagtacaaccttctcaacaaattggtgaaataaagataacaatggaacgagtatttcttttgagatttgctccagctgcatcggtacaggctccttggcaagtttagggtctaagaaatactgcgatgaaatttaataagcaaattttatcacttaatctcataagtccactatagagttaaaaaaaaaaagatattgcaaatacctggaaaggcctgagaagagcatgaagaactgtaagggcattgatggtgttccaattagactcagcagaattggtaataagagtactattctggatagcagaacgaaggtctggcacaagctctggccaggaattctgcttaacaacatcggcggatacaacaatatggaactggcaacaacaacaacaacaacaacaacaatacaaagattaattcctttctttttttctgaattaaaggataactttcattaatgagaacagttcggcattacactaatacgtaattcaggcaataaatcaaaagcctgaaaaatacgacacggagagaaacaagagctacacgtcaaccagggcagctttgtttgctgatcattcaacaaaatgttaaatattcaaaagactcctatagtcatgaaccaataaactacattatggaggcatatgcaaattactcttaatagcttagacacaaaattaactcctttttttttttaatattcaacatttcattgataaaaatcagagttaagtacacaaaattaattctttaattcgaataactgtgaatattgataaatgaaattaagtgtggaagcgtagcataccacttcagtcaaaactttgagaagaggttgttcgacgaggagcaaagcacgcaaaagctggtctttgaactccttacttactccctcatcgatcttccgccaagtcaaattcttaaggtatgtggctgccgccaatttttgaccttgattttcaccttctacagaattaatgaatcgaaagaaagaaggaaagaattaattaaagaaattggaaatgaaagtagtagatcctggtaataagttacgtaggtaccgatggtgatggagaggagagaaaaagggaagggtggaaggagtgagagggcatcgagagcttcagtagctacacgcactacttcgcaatcggggctgagagtctgattcagcaactgagagatttgagctgccatctccatctttgcttcttctctctactcctctttctccaccaaaaaaaaccctacaaaacaactgtcaaagttattgcgcgggaaaaagaaaaaacgacatttatttacaggtgaataagatttttctttttttttttgtttgtttacatgaaattattattaaagaaagtaaaaatggagatgcggggtatcgaaccccgtacctctcgcatgcaaagcgagcgctctaccatgtgagctacatccccattgttgatgagcaattagtttaatactttatatattataaacattgattagtacatacaaaaatctatctacaatagattctagacagagagtaaatgagatgacaagtggaagaagactctgagtccagtatgccacgccaaataccacgttgccttcatgcaatgcaacacaccttcatccatttttctcactttatgtatatatattatattatatagtagactaactcagtaatgaaattaacttacaaagatgccaggccttactattggagacaccatccccaaccttgaagcccaaaccacccacggcaacatcattcttcacgactatatcggtgatggttgggccattattttctctcatccaggtaattaattaattaattagttgtatcatatcattaattctatataatattattgtaattgtaattatataggtgatttcacgccggtgtgtactacggagcttgggaagatagctgcctatgctcaagaattcgataagagaggagtgaagcttgtgggtctctcctgtgatgacctcaactctcacaaggagtggatcaaggacattgaagcttacactgtatatacacaattaatactcgatctcatctggatctagcttatatatcctatataatatgtgggattctctaatagatatatatgtttgttttgattaatattttaatttgcagcctggtgctaaagtgaggtacccaatcattgccgatcccaacagagaactgatgaagcaattgaacatggtggaccctgaagagaaggactcctcaggaaaccaagtcccttctcgtgcacttcacatagttggtccagacaagaaggtgaagctgagcttcctgtacccagccacaacagggcgcaacatggacgaggtgttgcgtgtggtggactccctccaaaaggcttcaaagcataaggtggccacccctgtcaattggaaaccaggggaacctgtcgtcgtttctcctaccgtctctactgaacaggccaacaccatgttccctgggggaattaacaccgttcacctcccttccaataaggattatctacgcttcactaaagtttaattgaacatatatatatatattgatcatgaatgatatcgtgatcagatgacactagctactaattaattaatactatatatgtcataactatactactactgctgctgctgctgctactagttgagtttgtatttaatgtttatatatgcctatattattataaattaataaaatatgcatgcatcatgtaatgtaagatatatcaaagttggtttggttgtggttttagtattatatatacagtagttagtaacaacataaatgtggggtcaaattatgcttgtgtttctgttgactagaagtaaaacaacggaggatgaagatgaacgacaacaaattaatgaaatagaatagagtagttgattaattgattattattgattggtccattggtaagtaaagaaaacagtacttgggcatgcaaaagtaaccatgactaaataactacaatacaatttgaatgaattagcagctagctagcgctcctgggctgggccgtgtattaaaagacgtgcttccccaacatgcgaaacagctaatatgcaatatatacttcaaggacatgaattgattgtcttttttttatatttgctactgttaacaaacaccttcaaaaaaccaaacaaacaaacaaacacaaaaaagaaaaggtcaatcatctgtatctgaacttaataataataataatagctagcttgctttgctagtccctagtcagtcgtatttgatttcatacacactttgtcaaacctgtggatcccactagctactactcactcaaatatcattatagcctctgtgccaatgccagtagtgtaacgcgcgttcttcaaattaaaagtatcaaatgtcgtaaagtaaacgactaatttccggcatctgatccgctagctctcttcggtccctactttagcaaattgtctttaaaaaacactattcactacttcctctaatccgtaacaacaaccaaccatggcggcatacttatcaatagcaatactagtaactactctcctccaacttgttccagcactcgccctactcaccccatgccgcacctcgtgcggcagtgtggccataaagtacccgtttggagtggacgacggctgcggggcgccacagtttcgaaacatgctcaactgcaacagcacaaccgaacttttcttcgtgactccctctggaaactacaaagtagaatccatagactacgataagcaaacaatggtagtgtacgaccccgccatgtcaacctgctccatcctgcagcctcaccacgacttcaagatgaccgacattcagtctgccatcatacctcccacctcggacacagtcttcgcgcttctcaactgctccgtagactccccagtgctcaaccactacagctacctctgcttcaacttctcgggccactcgtgcgaggagctgtacggcgcctgcaatgcgtttcgggtgttccatttcttgacaaactctaccccgccgtgttgcttcacggggtacgacactgtgaggacgatgagcatgaacatcttggactgcactcactacacgagtgtggtgaacgcggatggtttgagagggatagggcctcttgactgggtttacggcatcaagctcacttacatgctccccgaaggtggctgcagacggtgcactcagtcgggcggtacgtgtggctttgacaccgacactgagggaaggctctgtctctgctctgcttcatctaattctacaagagaatgcggtggtaagtcgtatttatgtatgttaatattgttagagcttttcttttaattgagagatcgagcaaaaccttgaatgagtttatgtaaatccaaggcaaggcagggcagcgcatgcagggttgttaactgttataacatctttagtctttagaaaatatatacaacattacatcccacaaattttacttacaattaatataaccttccttgcccttggattttattattaattgttctcttcccaacctcaactttgattttaggtcatcacgtcaatcactgttctcatctccactctcaaatgtctcttaatttcaccactccacaacattccttaacattaagtctcatcatttataagtgcacagaatttacattacgtatttggataagtagaatatttttcaaaggtattagtaaaataaactaattaaaattttgatgtatactgatattcacaatagcaagatattacttaattaattttggtttaataattttaatcatggtaatagttaggttggacatacccttgtactcccccattcagctaagatacaatatttatgaccttatatatgactttacattacaaattaaatctcagtaaataagaatcagatactagagataataataatgtttattttatgtggttttgaattttgaaatgatgcagcgggtggtacttttgtaagcaaaggatacacaaagaataaggtatttggtctatatcattatctcctcccatttctttaccattattattacacttctccaacactccattaatcatattaatcttgttgattaattatttgaaccccctttttttattttattgtatactatcactatgtatacagatgtttccaagttccaaagttttctttaattatttatatgctctaatgaattacaactaatccttcaaaaatcatgctatattgaagttttttttagttcttgaacctgtaagatttgaattctctattcaattttaggaggaagacaaattcttctacctaatatacttaaaagtaacaaagaaagaaaaaaaaaaggggttagataacatcaaataagtcatgtatcttcctacttaactattcaattatgtatatgattgaagtaattaaattacaagttgatgagtattattaagcattattttgtgtttttaaattttgcaatagaattgtctcaattaacgccgaccaaaagttgttctcaccacgtgatttgtgcatctttccaatgactcaaaactctttccgttccttaatcaagtattgttttaatttaatcccgaaagaaatatatacatacagttatttgatttggattttaagagacgattaatcactactcccaaaataatcagtggcactgtcacataaataaaattaaactattatatatgtatatggtgtgtagggttagtgctgtaaatagacgggactttttgacacgacacgaaactggcacgagcacaacacggcatgaaaaaatacgggtttcgacatgaaatggcacaatgctataaattggcacgacacggtacgaaaaatatattcttaaacacaacacaatatgaaaatcacaaaaggcatgatacgtaagcacaaatagactagtccgaaaagcacaaaaatatcaggtctacaagtttgggcttaccctttaaaatattagcacgacacgcacgatccatatttttctgtagcatggcacgacacgacccgttttttgaaaagcaaagataaatacgagtcgagccagcacgacacgcacaaacttacaatactatgtggagttatatctcaaaaaaccaattgataatggaaaaaataattcatgcatgttatatatagtgttattatggtgaaagatcagtaacagtgtttaagaaacacaattcaaaactagaacc

SEQ ID NO: 184665 - DNA, 2172 bp, Cannabis indica
actgtgaaacattcaaaataaattgcttatatataactctaaactttcttttttaataagagccgacgaattaattacaaaccgttaaacattaaatatttagttgtgatggattggattggatgtttattttcaatattgaattggattgaatcttagatagagtgtctaacaatccaatacatccaacatccaatctaactaaataaaatataatattgttatatatatacatagttaagtcactattaaaattttactttttttatactatccaaaaaatattaaatttaaaatattagataaatttaaattaaactaataaatatatattaaatacattttatctcatcgatataaccgatttaatctaacatctaataaataaattagatgacttaaattaattgaataatatgttaaaatttaatattagatatggtctaaccaccgtaaaaatatattattggtttgcttgacacacgctctgaagtgtaagcattaaatggtatacacacatacgaatatggtaattggtatgtgaaagtgaacattaactaatatttgggcggacgctatggggattagatataacccaaatcgccatttgactaaccaaatttacagctcacataaaacacctttttgtcccacaaagtataaaataaagcaccaagtactgattgacccccgtgatcatggagttattataatgtcattccctaacaagtacacgggataagagtgagtgagtgagtgtttatacagttttagtttattaacttttgagttagtttgatctaatttcttgagaaactgtagccactagagttggagtcaatgtctgtgattgtgattaggttggttggttggtgtttccaagcttaatttccctctcccctcactccttatatatagataagtcatcagatataagtttataacactctctgtttttcatggctaatgttaatagctccattgagtcagagcctcggaccttaaaagaagagcaactcaaccttgccagggtacgtacacaatatacaatacaatgcctatatcttctccttttgttctattctaattcatgcaaatttcattttacatatacatttttatattcttcacataacattatattgaatttgatcttgtgcaggaagtagcagccgatgctgttcaaaagcttgagccacatgaagccacaatcatattcatcgaggttgatcatatttccttcattaatatttcctctgtttaattatatatagttgaatgattcttattctatttttcatgtagagaatgacaccagttggtggttcaatccaaaagatgaagcaaataagtgaaaaagaagatgaagttggtcgtgtgttgaaagaaacaagagagattattgaaataccttgtcagtgcacgtgtacatgcactcctacaactatcatcagaacagaatctgtggaacaaaataagcttagggaacctctttcatccccattttgaaaatttcatattggaataatgtttgggacatagactcaattattactgtatgatttaaaatgtcctttattgatttgtttttatggaaaatcaatacaggaaattattggtttcaaatacataataagtacaagagaataagtgattcctataaatttgttgggcttgctgtaattataataaatgatttcagaactcttttattcattatcaatacaaaataatctgtattcatatattgtgatgctttcaaaggtccatattgaactatttgtttaatgtttagtagtgaaagaaactccactttcattatgtaaaaactaaacatgtaatatatattcaaattcaattgcaaaagaacaaacaagctctagcaaacatgtaatctgatttcatatatgtgttattttagtagtgcaaaaaacccttaattgattgaagtaattagcaaaacatccaaaatataaataagaattgttacattacaataacagaagggatattatacatattattggattgaaaatatcttaaaatccacatgtacattatacatacattgggatgcaaccttaacatgtatgtgcacaaatctttgctcctggagaaagagaacagggaaaatgatacttcactaacaaaatcataaatagaagagcactg

SEQ ID NO: 184666 - DNA, 3807 bp, Cannabis indica
cttacgttaatggcttctctgaagaggtaattacacacccacatcttcttcttcttcaaacgtgggacttaatactctttatgaagagaggtgtaataccaataccatcatgcttactctattatgaaaagaggtatcagggaggaaatgttaaaatggtagaaatagttatataatatcttcatacacgtatcaaatgtttaatgtgttgatagcatagaagtccagcaagcgatgtcactacttgtgataataagctctattttttttttccttacaacaagcgatgtgaaataaagtaaacaaagtaatattactacatgaatgcaggcgacaatatataatgaggacattgaagaaagagaaaatgctggaacaccacaaataatacaaacaataagagcagcattggctttttgggtgaaagaatacattggttatgaagtgattgagagatatgagcatatgtatgcagaaaaagcactaaagaggcttctttcgaataagaacatacaagtattaggaaatactagtgttaaacgacaagccatattgtcgttcctcgtttattccacaacaaattcttactcaacaaaccttaaaaatgggcgtcaaagtgacagcagagaagaagggctttacatgtggggagagactggaaacaatagaggtaagcctcttcatggagctttcgttgcagccctcctcaatgacctcttcggtatccaagctcgtggcggttgtgcctgtgcaggaccctatggtcacagtctgctcaaaattgatgaggctaaagctcatgcctatagatctgccataaaagaggtgagcactttttaaatgctttataacaacatgaatcacagcacagctataaaattaagtttgaaaaccctattgtttatagctacttaatttgctttccataaattacactaatactaaactgcaaaattgacaatcaatgcataaacatagtacatgggattctcatttctgataatattcttgttacaaaaggcataactaaaccgtgtttctccttaatatgaatagggctacgctggagtgaaacctgggtggacaagaatcagttttccctattttatgtccaatgaggaatttgagttcattttggcagcattggaatttgtagctacttatggacagcggttcctcactctctataactttgatttgagaacaggtagttggactgccagagacaagggaattttatgcctcatcaaggataatgcttgcaatgttcatggcaggcctcttgcaaatagtacaaatgcagcagaggtgaagagcgaacaactcaaaaaatccaaaaacgtagaagctaaggaaaatggaattgtcaataagtttgagctgtatttaaagactgccgttgagattgctcgtcaactgcccaagttccctccacagcgcaaacttcagggagaattagatctcaacattttgtcattcagagtttaatccaattctttaaaaggctaatacaacacttgacattgtatgtctttgttctctaatttattcattctaagttatatctgtaattgctgaaaagtgttgttgcatttctccccctcccccgacatgccctctctttcatgtgcgctacaaattaataagaaactacctttctacttctttggtcgattaagcccctcctcctgagtacatagcaattgctatagcgttctagttcctaaatatttataatatggcgaggaatctagtcgtaaagaaatctgtagagctaccaaccattaaacataccatgtatcctcaaaatatctaccatccagtaatcctttgcctgcaaaagtagaataacacaaaattttagctaattataaacaaactcgaaaggaaatgttaatctgcaagagtgaagacttattagagaaatttccccaaagtgggatgagctacaggttcaccgatcaaatacaatgcacaagttaattgatgaatcccacagctacactcaggtaaccggaaacttaaacgctactgaagagctagaattaatctaacagccaactatattaagcctcccttggccttttttttgtcctcacactgtatacccaataaagaaatggtggcccttttttctctttctcatgagacaattcaagcagcatatgcagttgctccttggcattccctttgatttcatagtggaaacaatatagaataaaatttccaaatagtagggaaagatgtttacttttatagaaaatggctggccattagaagttgaggtttttgtttttcttcttcaaccactgctgaagcttcagctttcatgtcttcaatctttttttcccaaatgtcatctatcaacttccaggtttcatcattcaccttctgggtctgtaaaataattaaaaaggaaaaagaaacagtcacattaattgttgaagaaaaaacatatagcataaccccagcagcatagtgtctcagattacctccataggtctggctgcaccaaacgttgcaaatccaacatttccaggtgcaaatgtaacccgaccaggaagtgaaaccccatgtattccccatctccctgcatatattagggctccatattcatccactggactcacagccggctgggcaatttacaaaatcatttatcataatatcattagagttggaaaagtgaactagtacactgcatcaaaatgcatccactgatacatatgaacaagtcaggtacagggaaaagaacaatgtaacccataatagcaagatttaagatgcgtattgaaaagctattacgaaaaataaattgcattcttggaataatagggaagacatttccatttgaaccaaatagctttgtaattcataaccaatttagtgcgaagaaaaaaatcgtaattcataactatataaaagaaattatgttgacaactacctggggtattcgagcagtcgttttataaatatcccaaatttcctcagctccaatttctcccttttcaagtagcacgtctgcataataaaaagatatggcaagtattcaaacattacaatttgttatctaaaagtcaatctagtttcgataatgtaaactcaagcaaagtaattagagatcaaagtatacactgtcccagtattggttggaactacaataaacaaatcataaacactagtcacctgtgattgtctccgcagctagatggtactccctcaacacagatgaacatttatcaacagcataacgcatatattcatccctaagtgcttcaagcttagctgcaagctgttgaaatggagcaaggcacgaatgttagttatgtgaaatagtcctatctaaaaacttaattgggaaatgaagtgctttgctttagctcagcaaggcaaactgagttgtaagtttcataaatgtaatatgaatacacataattgcataacagaagttctaaagctaatttcaaatttatgaaattactagttctaagtcataaaagcacaaactaaattctttataagtttaaaataaaaattcctaatcctaatcaataacataagagtagagcttaaagtcttaatcaacttaaaagactaaggaatcctcattttcatgatcattatcatcactgttgagattttctaaaaatgaaagcttcagaaaataagtatagcatcacacaaatgggacactgagaatagaagcaggtaaaggatgtcttatttatttggaatttggattttactttttgtggcatagacagaccaagtttaaaagccaaacatgtaatcagaacactttttttt

SEQ ID NO: 184667 - DNA, 7085 bp, Cannabis indica
ttttttttttaagaaaaaatataataaaagacaagatacaaagagcaccctgatttggtaaacacttgtgctttatatgtttatctatgtgctttttttaattttataaataaggtcagagaaaaatgagtagaaaaggaatggaaaatagtgtaaaagcaagtgctcccctttatgcagaattttgaagaatctcatctcaaagggctttctttatttggaagaaattattgcgctccttgttagccgcatcgacatcatctgaagaggcaactgcaaccacagttcctttatccttgaccgattcgattgcatcggcaaattctttaaagtccttcacactgcagagattcatcgaaaactcagcgataaattgaacggtacatacttgacaaaggttgctcagacattataaagaacagatcataaatagtatacataactacttttaacaagttatatcaaaataatggtaaaaaattaaactattgtcatcaatcaacattggcttcctagttctatgttcgaaatatcaacatacgtaggcttgaaatcggaatcaggtttagagagcatttatcaggcaaaagcatcaatcataataaactttgttacctggttgacaatatctgttcacgtctcaattgcctctcttcatctgtgactcccaacaaatggcgcaataaactaagggaaaaggaaacaagtgaagtgaataactcataaatgaggtaagaagaacagaaattgcataaagaatattaagtttctaattacactgatctgacaaactctaccaaacatgataaatatatagaaatttctgcagagagaagaaaattgttgtcgacttacctactataacctttggcatctgggagctggtatgaatccacatctcctatggttccaataatggcctttgtgagagtatcatcatccatttctagttggcgtagaaactccgcagttccatcataaacatcaagagtctttaatagatttgggtcacggtaagataagaaagaaaatactcctacatgaagaaagttcagagtaagattctgaattaacatttaagagttccatatcaacatagtaacagcatgaagtaatacctgagtgagtatcaaagtcacaaaaaccaccataagcacccccactaactctaacgcgatcccacaaccatgtattaccgatatattttgaaataacgtatgcactcccactgagctgataacctgtctcgtatatgttggctgctttcccaacataattaacctataaaaaaacaagtttaaaattcaattaatctagattaaaaggaaaaagaagaaacaggtacaagaagaaaataatagcatctgcacctgcgtaggtatcacaatggcctcgtttccagatgacaatcgtgcattccaagtcgttgttccataaggagagctggtgggaagcaaatcaagaaatttgctaacatatttttctgagttggtgaggtttttcccctctccggtcatatttattaagcagccattacgagatagtaagcttttgcgtatctcctcaagagatgaagaaattccctcccaatcttgatcaactttttcttcgagagtttgcaagaactccaagtaactataagaagacaaaaatgttctttaagtattcaagttaagaaagtacaccaacctctcataccaaagcataagtatgataaaccaaaagaacaaccacttgtcaaataacaatgtaaagaatggcattgaactaaatatggaactaaaagaactacagctaatgttacatctttgaagggggaacaggttataagcaatgttaaaagaacaatctgaagactaatttccaactttcttgagtaattagatgaagaagaagctaggttgggtatcagctgatgaaaaaagtgacagtccaagcctcacatcagcaatatcattgctaaatactacaagtaagggcaactcccaacttggtgaactaaatacttcagaatactgatcaatggacatgctaggccgtgagttggccaaagaagaataaattgatacttgattgagttcgagactaacctgacgccacccatttgttcagaaacccaccctgcaacatttaactttgcgtccatcctagcagctgcgatcccgtgtccactgcctcttaaacggttctggcagaaaataaaaaagaagacatagtgagatcaagtagtgagaggttgggatctactccagttccatttttcactacttaaagtcatatatacctccattcttgctttgctttgggaaacaaattgtttaaaccgctgctggtcagtgaactgaacttcttgaagaacacagttaacctacaaaattataacatatggcattatatagtgcaaataacaaccttcaaccaagctatgtgttccacacattcttcagctcagtcaaagccttggatgagttaagagaacatcttaaaaagaagacatttgaaatgtcaatgggatgatttccaactttctttttccagatgattccctaaatatacatgcgtattggcaagaaaattgttaaataccaggttgaatagatcttcagcacgtcctgccatggctttgcctcgaacaattatattcctactaggatcctccttgccacgaacagatgatgttagtggataaactgatatgcctccagttttcctcccaatcaactgattaagctgcacaaaagataaatcttttgtacccatctccagcaatgattgactgtcaagaacatagtcagagaaggaacctattaagctcatgtataattaagaccctgaagctgcttgaaacaaatttaaaatatttcacagagataattaatagtaattgttactatcactgctttacgtatacaactatttttattagactaggaccctatgtctgatttcttgaatatgagatcatgatctacaagaaaacgtgcaatagaaactccagacctacttttagaagactgatgttatctgctccttcaaagggctcattcctcagcttttttcaaagagtaatcaacaatagctgctctgtcatttacttattattacttacactgggagcatcctacacagtaatttttagctaacagaaacagaaagcatttccttgtgaaacattgtacaggaagcagtttgttcacagggggcaaagaaaataaaaggacagttgcaattatgtttaatttatgacactaagcatttcttgactaattataaactgttaaaacactgccaaagtgatcatataggcaatttaaaattctcacaattaagatctataatcctcccaaatacttaaaaaatagcattcagctggccacatagatatatcaatccaagtttaaataaaatcactgagcttaaattctagccaaatgtatcattccctcctatgaacattgatataatattcaattttgtttgagatcgttgctatgccctcttaggaactaaaataaacatacatcaaggaataattatattgaagacaccttaccaaaaaagaggtacaagaggaagaagctcttgcttcagtgagctcatgttgaaaacaacttctgcatagaggacatcattggtgaaaaggtcatgcttcaaaacctttactccattaatatctcccatctacatgtaagaaaaaagtacttaggactatcaaacccaaaaggagaaatcaaaaggagaaaaacacaatgttaggatgatgacctctgtgggaacatgtataggttctttgggaatgtcctgaagagaaaggctaggaacagctctcaaagcttccggtggatcaggagtttcctgcttaagccgcaattcttgtgtagcgcgtgctagttcagcaagatcttcttcagtcatgctggctttaactttatccaatgcttctttctcagctgcttcctcaagagaagctttctttggatcaggctgatacataaattctcttattagacaccaatgtcccaagtcaatacattacctatatacaaactcatgtgctcaaatgaaaagttactcacctgcatttctattgtaactcggtgtggattgttcaaaatgaatttctctataagaggagagaaaacagctttggcaccttcactttctatcctggctttaagggccattaagggtttctcatacttcaaaggctcaaagggatccatgtcatatatccacttaccctataaaaaaagaccaaagcatatcaaaggaatcaggtattgacgggaaaggacaaaaactcaactcacagacatttcaaagaaaaaaagaaaagtaagaaaacataaaatagcttacaatggaccgaagcattagggacaaaccacggggaaacgatccagtgttgttctcccgaagagaaaactcaatcgtattcattgatgcctccacggcatttgtatcaaaaccttcctctgctaatttttttaatgtactgattactaattcttctaccttctgaatgttatcttctgaaacacctttcaacccaatactaaattgaggctgaaggagctcatcttctaccccacctccaacaatagcctctccaagcccactttcgagcaagattttcctcaagggagaagcaggagttcccaacataagatgatccaaaaatccaagggtgagctcagtttccaagtctaatggcttttcagagagtagccaattaagacataccatatgtttcttcttcaaatcaccctcttcaccagcaggatatttctcaataatcctaataggctctgaaaacagcttttgaggttgaatcctcgattcattaggagctgaatttgcatcaaacatatttaaatattctgcagagagtgagacaggtgaataagataccataccacaatttattcatattcctaagttctaaaatttttactcataaaaatcattaacatgaaacaataacatgaactcatctaagaggatttaattcacttgcttcttatttgcatttcacccccaataattgtatttgtttagtttgcaaatcgcttatggtttaattgctctaatttaaatggaaagatggacatattcagtcacagtgctgtgcaactatagcctagacttcattttaattgaaagtaaacactttttttctacaatcctacaaatccagcaccaactcacagctcgcatgtacttattagcacactcaaatgtacaaacatttatgatataatataaataagcagattcatgcagtaccactcaaaatgcgtagacgctcactgacatcatcatctccataaaaccatattctggcattgctgggatggtaatatttacgatgaaaatcctgcacaacttagcagttagagatgcaaatctaccattaacaataataaattaagaagaaaacgaagcataaatacacttgcagcatctatgcagttatagcttgaatttgaaagcctatttaatctaatgcattacaacaagcatttttcattttagtgaccaaatcaaaccttaaattcttcaaatgtgaggttaggaataacttttggatcacctccactatcaacgccgtaggtattgtctggacagagagcctacaaaacaaattgtattgaaattttggaaggaaacaataactcaagagaaagaggacaaaatcacatgataatctagtactctagtagtactacaatccttgttgcacacagaaagtacagcaagacatgtcagccaattagttgcaatatccaattagcaatataaaccaatagttgcagctcgagatgatactaaaatggatagcaagcacaataatgaaatagaaatcattgacttcaagaaactacaaaatgcaaggccccaatatgaaacatagatgagtaaaaaaggagtaattggaatatgtaggaatgtggtagacaatggtgtgtaatggaatacgagaaaatgttgaggtgaagcgattggaatacaagtgaagtgagaaatgcagttcaatgtttacttccggtgaatgattttgttgagtgcaactatattacatgatttacttggaggcactgtaagcaacaatttatccaaaaactctcactcaatggcatataaattataatttctccatcttccttgcacaatctaattaaatatggttgaagtgttccgtaaaggatccaaattagagttgtacaaaccaaaaattgaagaagaaaggaaacttgcctgttgagcagatcgccctaaaatgttatcaggctgggagtaaactcccttcatctcattgaaaacaacccctaaaatacaaagaatataattttatgtaaacaaaagaactccataagatacaaagaaataacttagatcaagagtaacccaagaaataacaaaacgagaacttgatgcataaggaaacccgtcaacctttgtaacttatttcttcagaaggattgttgagttcatagtgccatccctcttgttggaatgtctgaaaatcctccacgcacttaggaaagaaaacagcatctaggtacacatcaacgagattataaaaatcctataagcaaacaacaaccatgttttaggattaaatgcaatatttaaaattgcgtttttgtggaagcaactttatttccatgttttccacctttgtatttgtggaagcaaccgggtaacaagttctatcaggataggtgaatgcattcagaaaagtatgcaagctccctttcaataattcaacaaatggttctttcagaggatactttcttgagccacacagcacactgtgctccaatatgtgcggaataccagtagaatccttcctgtatcaacaattagattaaaaaagtaagcaaacaacttgatcaattacaagagtttctcacaccattcattcaacaagtaaaaacctgcatattcatgatatgagttgctcaagaaggtttgtagacattgcaaacaatgttatcattctctatctacttcaaaataatatacatctttttgaagcattgttaagcgtactgcatagtacttacggtggcgtacggaaa

SEQ ID NO: 184668 - DNA, 2495 bp, Cannabis indica
tttttttttttgtgtggttgagggtaataacatgaattctagttaatcttgaagtgttgctgctcttggttatgaatggtttttcctgctgtaaaagaaagtgtcctagactatatacattctcctcacagctgcttttgttgctgtcttttcacaagcatacatttttatattataagctattgtttattgtattaggatgaaaaactccaagatgttttggggcattttaaaaaagactttgaagatggaatgtgctctgcagaagatctgggtaagtcaaaaaatagctgaactataatatttattctccaatgtattatcagaatttgtttaaaaccctctaactaatcacttaataattcactaattgcaatagggtcaaaatatggtgggtacggttcttttttaccaatgtatcagcgatctcctgctttatctcacagaactccaccaaaagttcatagctatagcacttcaagatctccaaacaatttccatgtggaggtactaactcttttgctatacgttttgctttctttctgtaatgatgtgctgctatctatcaaggattacaatttcaccataattttgtgaaatgtttatttacttaagttaaccatgtctcctattagggtgggcattgcaactctgtagtttctcagtctggtggacttgggccgacttctaccagttccacttctttccatgtgtttaaggcatcatcaataactgagtcaggaaagcaacatgtaggcatgccagcaacccgtgcagaagaaatagcacctagattagattctaaaaacaagaaaccgacaagtgcatcagaccagaaaactctgaaggtcagaataaaagtgggttctgataatctgtccacacgaaaaaatgcagcaatctacagtgggcttgggcttgatgattcgccatcttcctcattggatgacagcccctctgaaagtgagggaatatctcatgagcggccagatgcttcctttgattctccaactagcatattgcaggtgaatcatcttaaatattatctatgtacccttcttgttcataatgtggcttaaggtgatcattaggtgtttcttttatgatgtggaccagatcatgacatcctttccagttaacggaggtttacttttgtcaccacttcgtgatgatctgactggcttgatagaaaaggaaaaactttctaaacacagtaggtttgtacctcatccaaagggtgttgtggaaggctctggcttaataactggatcagacagcttgaagagtggtgggaagttgtttggggaaaagaaagtaaaatcagtggacatgaatgattattcagcagaatcaaaaagtgtaaatgataaagttcctcgaattcgagatatgccaaggaaagaaccagatcccgatgcattaaattatgaggagcttgtttctaatactttaaagcttccaattctgtcccattcatattctacttctggtgacatgaaaaagtgtaaagaaatcaacaagagtaatccaaaggaaaaagtattatctgatcacgcaggagaacaaattgagttaacgtcctcacgaggcgatgggcaggttgaaaagctaaagcctagttcagctgggaagggcttggtagatggaaaggagagttttgttaatgaaatttcagctgatctacataaaggaggacaagtgaaagaagataaatgtcatgaattaatcaaagctgattcaaatgtcaccaaaaccagaaaaacatcaaatgtagaagctattgattcttccaagcagaaatctaaaaaggccccatccaaagaacaagataatacgaagttacttcatggaacggagaattcagttcttgctgagaaaaagaaattgaagggcagtcatggctcctcatctgcacaggctccaaaagaaagcttgaaggctggttcttcgatgcctaaaactaaaaaaggtactaacatggctacttcagtgtctaatagtgatggggaaaatgtgaaatcacgtaaggatattgggaaagccatggatacatacaaagacttgtttggagatttagatgaggaagataattcattacctgcaaatccttatgaagacaagctgagggaatctgttgggtttgcaaagagcactcctgcaatcgatggattattaaaggagagagtaagtggtaagaaaactgagaagccatcaacgtcggaggcatttcttctaactgcttcaagtccaaaatctgggaatggattctctactgatgtgacgcttcccacggggcctgctgaggtgataaaagaaaattgggttgcttgtgacaagtgtcaaaaatggcggcttcttcctttgggtacgaatccagaggacctacctgagaagtggttatgtagcatgcttaactggctgtaagtgttttcatttcagtcaaccttttttttgtcactcatttctattactcataataagacaacttttttatt

SEQ ID NO: 184669 - DNA, 3712 bp, Cannabis indica
accaaagcatcacttttttaattaccacattaaacccattgccctcttttgatccaactcaatgcctctttgactccaattatctctgcaatttcaggttggaccgccccaaaccggctgccagaaattgctttgattaagtggccattagagtcacgagcaacacacccataaccaaacttattctcttcttgaaagatagcaccatcgacattaatcttgaccgtattcaccattggttttctccaacactcaataacattgttaatatcatctactaacaatgcacttttcttttgtgattaagcattaatccattgatcaagaacgatctagccgaccgcataacttcaaaagctaaacaaattttattattccataacaagtcatttcgaactgaccatatttttcaactaatcattgctgcatcagcaaccatagcagttggttgggacttaaacaactcaaaaaaccagcttttaaattccctaactcccataccagccatattaacacttgagatattctaacatgaacgtgcaaaaccacaatcaataagaatgtggaatatagactccacagccatattacgaaatgggcacataagatcaacgttaacgtgcttagtgtttaactgtaccttggttgggagacaacccaagacggcacgccataagaagtgttggacttttgggggaatgtccaactgccaaagtgttttgtagccatcgtagtcatcttcttcaagcacgaaactttactgctgtaagaggcggtatgcactttttaccgtgtaaaatcctgtcgacttcttactccaataccaggcatcagtaagcacactttcacccaactgaatcgataaaactaggtttctatctcttgcttcgaacatgtcatttatcacctccatatcccagtttctagatccaaccacaaataaacttgacactctttgattatgcagccccaaatgtgatgaaatagcatatggattacttgaatctggcagccacgagtcccttagaatactgatagagtgaccatcaccaatcgatcttctagcccccatgcgcaccaagttctgagcttcaaagatgctttgtcatataaagcttgggttttgtcctaaggaagcattgaggtaacttcctgtaggttggctaaccagtgagtcttcatttgtcaacaatctccacccttattttccaaggaaagcaagattatagtccctaagatctcgaaaaccaaaacctcccacatatttatgacgacaaagacgctttcaactcattcaactcactcctttgctagcagcccttgacttagatttccaccaaaattttgacatcattccttcctagagcaaatttccttagtgagtaacaacatgctcatagcataggaaggcagtgcttgagtcacagattttaacaagacttcttttcccgctttagacaaaaattggctttcccaactgaatattttcttctgcattttgtccttaataaaatcaaggatcacatttttatttctccccatagtacaaggcaaacccaagtagaaactattatccgaagcttcaaccttttccaacgcagcacacattctattacgagtttcctcatcagtattcttgctgaaaaatattgatgatttggcataattaacttgctgccttgacgccctttaatattcatggtgtaatgtaacacattcgaagcttcattgtcattagccttgcaatagatatagctatcatcagccaatagcatatgggaaactcgaggagcacccctggtaactttctgctttcataatgtttcaacattgaggataaaccttcagcacagaccaaaaaaagataaggggataatggatcttcctgcctaacccctcttcccgaagttacaggacccataattcttcatccataagtgacattgtaactgtggaaacacaaaacataattagcttcagaaaatgcaagttgaatcctatccgaataagcataacctcaagaaatgcccacccaactcgatcgcatgctttgctcagatcgagtttaagtgctataaaaccctccttacccactctcttcctcttcaaataatgcataatctcataagagatcataatattatctgatattaatcttccaggtaaaaaagcactctgcatattggatatgacattcggcaaggcaatcttcaatctattcgccaagacttttgaaattatcttgtaaagaacattgcatagagatataggacgaagatcactcataagctccgataattttttctttggaatcaacacaatattagtttgatttaaagaactaggaaaaaaaccagcagcgaaaaaggagcataccaaagcaacgatatcatcaccaagtatatgccaacacttttggtaaaaccccggagtcataccatcgggtcttggaattttatcgggatgcatttgaagtaatgcctttctaattttttccctagtaacctcctcaatcaacattgtattttgagcatctattatcaaagtcgggatacaatcaaccaccgctctgaaatcattagcagctggaagaaaagttgctaaaaataatcagctaccacagttggaagctcatcctcccacccgacctaaacaccctatggattcttcaatttctgtatcaggttggttcttcttctcgaagtggctttatcatagaagtacttcaagttttgatcaccttcacgaagccataattgcttactcctctgcttccaaaaaatttctcgctgtaaaaggacattatttaaattcaattcagcagccttatagcaggtaatcgactgtgtatctcttcccctcgtccatttacaaatctcaattttgcaatctcgagttccttttttgaaattgcttgagtaatcttttcctcaatcaagtaacacttcaccacaacccttaactttctcaataatgttgctgccagcgtagcagtaccaagtgtcttcaacaatcttaaaataaaatggctcctttaaccaagaattgtcaaatttaaagacttttctactcgcaggagtagtagggatcgcaggcaccaagtgaagtggacaatgatatgaagttgtaacctctagattaaaaagctttgccaatgggaacatatcgaggcatcgttgtgagaccagagccctatcaatcctagcttcaatccagccattcgtgccccgactttgctcccatgtatacgggtatctatttaacttcaaatcatgaagaccacactcctctaaaacatcacaaaagccattaactaaccatcttggttccgagtttcctccacgtttatcttgttgagacgtgacattattaagatcatctataatgcacaaaggcaaatcaagctcctcattcaaagaacgaattaaatcccaagttattttccttaaactttaatttggttccctatagagaccagtgagcctccacttctcatgatcatgatcatccactgtgatatcaatgtaactagagccatatcgtagaagatgaacaccatcactaaacctccacaacaaagcaacctgtccactcttaccctgaacctcaacaacaactgccccttcaaacccgattgagaccctaaccattttcacaacatcattttttgtatatctcacacaaaaaccaaatagttgggctttttttttgt

SEQ ID NO: 184670 - DNA, 4101 bp, Cannabis indica
aagatgaagactatgtcttaagaatgcatttctgttgttaaaagattcatagacatcctctctaagtttaattaacttgtggaagattaatattgaatatttagttgaattgaaataattcttgaacttgtagctcttatatagcgttatgagaattattgctgaataaggagattgactatcagcttgtctcttgggatgttattattattatttgtttctggtttattattcattatctttcaaaatttcctttgtgcctgatcctcatgaagttggatttttatatttttacttgcatatatgtatgtgtgcatgtgtataatatatattaaaagctgctatttctctgatataggccttttcttgttaatgaactggagccacaacaccttcttcatgacagaaggaaggtatacgaggtatgtgaacttttttccccctctatctggtgttttcaaaaatggtagctgttttcagatgtataattgcaaccaataaaaatacaaaaagtaaaatgaataaatctcttcccacaaattctttcatctccttggcatttttgcttgtgtacactcttgcttaaggcataaaagtgaactcataaagaattatggatccacagaggaaatttagaagtaacagtaaatacacacctgttctaaatgttcaaactttatgatccaagtaaaattttaaaattttagaagtgactgggagattggttcttgtaattataactgttatggtttttgtttctgatgtgagtgaggttaaggtttagctctccgtgtcaataataattgttatttcaaaagcaattattcctaataagaatattttgttattttgtaacatgttcttttcaatatttatggtttgttaatgttgaacaacatatcctaacaccttaatcttttggggtcaagcgccttgaaatgtatggaattcccgttccaagatatgcccttgtaaatagagaaaagccttatcaagacctagactattttgttgaggaagaagattttgttgaggttcacaatgagcgattttggaaaccatttgtggagaagcctgttgatggtaagcttgccccaatactttatcttttaagatattatattagtatgtaatattgttttttctgtatgttgtaacaatgttattaatgattgtcagtcttttcttttgtgaaggagataatcatagtataatgatatattaccccagctcagcaggaggaggaatgaaggaattatttagaaaggtgagctattgctaaagttctatttattttctgatgttattgattagatctaagttcgaaaggtttgtggttgtttgagattattagctggtacattgtaacagtgttcaagtccatgggaatttatctttaagggttgggaggaggttcggtagatatttttactcatcttttttattatgacaatcaatgtttctattcgggaaagaaagaaaaagcatttaaacataatgattgttatattaattgaagtgtaaagctatgaacagttcatccatgaataggtgtcggttattattgctatatacttatacaaatatttttcacttcaggttggcaatcgatccagtgattttcatcccgaggttagaagagtgagacgtgagggctcttacatttatgaggaatttatgccaactggagggacagatgtcaaggttgtatagtttggtatctcttacctgcatagtaaatttgttttgtatctcaaattatgctagtggaaaaaggcatagtgaatagcatgttcaagtcggttttgaaatgattgaatatctggagtagcaccttatgtctttataattgatgagtctactgtactgtagtggaatatatttttgcttttgtgtttacagttgaagtacaccattagctcatcttttatgattgctacaggtatacacagttggtccagaatatgcgcatgctgaggcaaggaagtctcctgttgttgatggtgtcgtcatgagaaatcctgatggcaaagaagtaagtacatgtagtttgttctagtccaaaatgtttaatattcttccaatctgtagctttatagtcattttgttttatcaagtagctgtgtgacttatgcaccatttcccacatctgagagtatcatacacatccagaaaatatttttcgccaaactcaataggaatattgatatttgaatttgtttcttgaaagctattatgttcaatgtctggtgtgactagacacaatggtcaagctagactatctgtatgaactaaaattgtgatttgtgaaatattttgttatttttatttgacaggtgcgatatcctgtcttattgacacctatggaaaaacaaatggcgagagaagtctgcattgcattcagacaatcagtatgttatatctctttgacaaaacacggtcatgttataatcacttggtatttttattgtagactactggaatattgttttatgtggtgttttttagtcattgagtatcaatttttcagaaacactaatattgttgagtactgttgaaccattctatttttccagtttccttggacgtaaaaggtcctatgcatgactatgcatatgtttagatatgctgatgattttctaatgaaatggaatatactttggtccattgttaaagtcgtacttattttataattctcatatgctattatgatacttctaggtactcagatgattttctcataaatacttctgggccaattatgaattctttttgttgtgtgcaggtctgtggatttgatcttttgcgttgtgaggggcgctcctatgtttgtgatgtgaacgggtggagctttgtgaaaaactcctacaagtaaggcttttatgacaaacaactaaattttgtgatattgttgttgtagtggctttaatagtgtcaattgtcgtcaatcacttttatgttacattgtcatttatcagttcagcttcaaaacttgtgtatcttaaatgttcagaagaattgtctttgaccttgttgttaaagccccttgccccctcctaaaactgcttaagatgtggagatcttaggtaatgactgtatgtggtggacaaacagattttatttttcattttaaaaactcctatcattttcatcaattagtgacaatgagttctcttaatccttcctagttaatgatataattatctcaaacatgttgcattcagtatttaaaacttactgactggcagatcttatttttatttatcattaagtttaatgatgtcaggcacttctctatctttcttgacaaatgtaagtgtttctttttcctcgatgcaggtattatgatgatgctgcttgtgttcttaggaagatgtttttagatgccaaagctcctcatctttcttcagtaattccaccaactttaccatggaaaagtaatgaaccaagccaggcttctgagggtttaactcgtcaaggaagtgaaatcattggcacatttgggcagtctgaggagttacgatgtgtgattgctatcattcgtcagtatgttatatttttccttcttctctcttgattttatgttaggaatttttttttgtcccttcccttctaagcctcgctatgtttttgagcagtggtgatagaactcccaaacaaaaggtgaagctgaaagtgactgaggaaaagcttctaaacttgatgttaaagtacaatggaggacgccctagatctgaagttaatatttgctcttttacttttactattttacgttttcacttttgcttgctcgagatattgtgtagtctaaccactagttgctggttcattttgtgtagacaaaactgaaaagtgctatccagttgcaagatctgctagatgccactcgaatgcttgtacctcgtatcaggtagtctccagataactccatgaactgcatctctagcttgccagttgttatgtttatcataatttacatcattttacacctttcttcctttctcaaatttgtatttgaagtccttgtggctaacataaaacagtttgatatttgatttttatatgaaaaagcagaaatgttcttcaatccttatttttttt

SEQ ID NO: 184671 - DNA, 8175 bp, Cannabis indica
tatattaaatttcacatatttattctattgatacctcatattaaaatgtcaatgaatatgctaattaaaaaagaaaaaatgactttacaaattcacatgaaatttaatgtttcatttaaagaactttgaccaatattattctaaattgagatcaaagaaaaagtttatgctaaattttcgggacaaacattgtcacattaaattttacttatacgataatactatattaaatggccaagtttttaatttttcctaagtaataaatattttggtcaagtttataattaggtaaatataatatatatcctcaaaagattgatctaattatttattcacttaagatcgagtttgatcaaatatgaaaaatatatatagtcaactttatattgctcacaattcaaagtcttttgctttgtcttggttcttttttcttcatttattttattattgtatcaaattatttgtaagacccatttgatttattatttattatctatgcatgtgttacttttgtaacaattatgggtgtaaatgggtttaaatgagttatttgaaagtaacttattgttaaaaaaatgctcaataaagctgaaataataataactagttactaattattaaaatttttaagttttgtaaataactctctaaagcattctaaatcattcttacttgactttatatcagtacttatacacaatgataaaaataaatcctcaatagctatatttttattataactttgaattttaaaaaagtaagttgtgtaactttctttacacacttaattgataataatataaaagttataaaatttaagtaattctacatgttacaaatatttacacttaattaatttgttacattatatattcaatctatattttacattatttaataaatgacataacattatttttgttgcaattaattattttaaattttgtttttgatattacaaattatttaaagtttttttgaaaatttattataaaataattggaatataatttcgggaaaaaataatactaattattagttcattatatatataagtaaattttgggaaaaataataaacttcgcaacgaaataacaaagaaatgaaacaaaacaatttactcagtttggtaaaactaccaaaatcacaaagagagatatattttatttattacttcaaaattacatatactatttatctcaatctctctacctaaatcacaatacacttttcgcttgtttctcactctcaccacataataaactcacacatttcttttttcacaactcactatttttccccacacacaaaacacataattataaaattacaaaatttaagcaccaagacaacttggggagcaacacgttataaaacttccttaagaagactcgtgaaagcttgattaccaagacttttcttttcccacaattagtaattacacaaaaaaaaaaaattataacttaacaaatatagataaataaataatttgagtcactctagccataaaaaagaaattgtgatcaaaataattagtctatttattttactttttcaatggagaaaaaaagaaagaagcatcactgcttgtctagttcatagattgatagtaattaaaaaatttaaatataatatcgagtaatttatagcataattacgtaatttaattcttagatacaaataattatataaatttaattgttgacggtaataatatttaaattatatttttaaaactttcataaatacgtgatcattaaatttcaaattattatccactcgtcattttttattgtatatttaaataaaatttaatgatctgcactaattagtaactatcacctggctaacgattaggtactacgaaaattctaaaaatataatttaatattattattatcaccaaaaattaaacttaaataattatctacaacggaaaattaaacttaaacatttatccccacaaattactatataatatataacaagtcaatacaaacaaaccaaatactaaatattatattataattattgttagtgtgtataatattacgtacacaaacaaacacgtactataatatatacatttatatattataaacccaaaacttgggtttgctcttattattattagattaattcaattaaacaaatagcctagttttaccacttccacccctttgacggttcagatccatattaagtatttttcaaaccttcaacggtcaatattcaatattacccaaattataataatattaactcatcaattataagaattctctacattgatctcttcaaggtcttccctttgaaaataaataaacaccgtgtacgtgtgaagaaaattaagcacacaaaatataacatatatatatatagaaacacaatgatatatatatatatactaatcctcatatttgaactcattacaaaattttatatactatctttcttcttcttaaaaggattgtagttctagagcgagtaatcgaaaagattctgaagcattctcgaatttaggtattagttggtttgaatattatatttcaagtagtgtaaaaatggttttgggttggagattaaggagaaaaagcaacaagaagaagagcctcaaggcaatgaaggttgagattccaaaccattttctttgtccaatctcatttgatttgatgaaagatccggttacattatcaactggcataacctacgatcgagaaaacatcgaaaagtggctcgaggaagggaatttcacttgtcctgtcaccaatcagattctccataactttgatttgattcccaaccattccattcgcaagatgatccaagaatggggtttggagaatcaaaagcacggtttccaacgcattcccacgcctcgaattccaatcacgccaatcgaggtaaccaatattctttctttcatagaatcttcatctaggcagctagacacatccagctgcctagaagccctaaagaaaataaagcaatggggtacagaaagccaccatcgcaacaaacgttgtatggtggctaatggcgcggccgaagtactctcggctgcgttcgagagcttcgcagccgaaccatttgaagaaaatagtattgtttgcgaagaaatattgtcgaatttggcttggatgtttccaattggaaaaattgctcgaaatcacttaaaatcagaagcttctttacgttgcatgattcagtttctcacacgtgtggagacgaatatctcaacaaaggagaattcaatcaaaacattagaagagctaatcattttttatgatgttgaagatgatcaaaaccaaacctacacattattagaatttctatcaaaaatagagggagtaaatgagatactaatggagttcatccaaaaaaaagtttcaaacaaaattaccaaatctaccctcatgataatctaccaaatggtttcaacaactccttcattggaaattaccatattgtccttccttgaaatgggcttgatttcttcactcttggaaatccttgtagattctcatgatgatcaagagaataacaaggttataataagtgaaagagcattgggtattatggatagtgttttaagttactaccaaggtagagtaaaagcctatgaaaatgacctaactataccaattttggttaagaaacttttgagggtttcaaatttggcaactgaattttcagtctcatcaatttggaaactttgtatgaatggagtagtggaacaagagaaagaagagttgagatcagttgttcttgttgagactcttcaagttggtgggtttcaaaaattgttgttgattattcaagttggttgtggttatgagactaaggaaaaagcaactgaggttttgaaacttttgaatccttatagacctcaattggaatgtattgagtctgttgattacaaaagtctccaaaggtcattttgagataaaattaagttagttttttttttggagttctagctagttggaaataatctaatataatatattcttttcttcttttatgtagattttgttttaattaattaaattttgaaatacatgagtatatattggcaaaaattatagagttactttgtaatataagttttattttgttgtgagatactaaatagtaaaatattaaaatattgaatcatatataagattatgagatactccatttatcgttaaattaatttaaagattgcacttcataattctctacacatttaaatgaattttgagatttatatatttaaacttacaattcataattagaattacatatcgactatactcacaatgtcatgtgaatacttaagatatatttctagaacattatctacgtgttattttcttaattggtatactttaattaatttttaaataacaaaataataatttaataacttggaccaatcagagactgtcacgtgaccatggacttggcacttagcagtcaagttctacggaagtttcaaaaatataacttatgcattattaccgtaaaaatttaaacttaagtatttatttgtaaccgggagttaacttaaatattaatgacgtaaatcagtcttattttattaaagaattatcaataaaatgaatgagaattaggagttattttttatttagaaattaaaattgtttcaaaacttcaccaatttttgtataaattttgcgctccattcttctactttgttgggccgtcacattttaactctcatattaatatgatattattcgtcctaaatttttacaattttatttttatgcacttttctaaaaaggtaagagtactcttaaaagaatagtatttttataaaatcataaagacttgggttatgtttatgttgagcttttttcctttaaaaataacttttgtaaaataataataaaaatattgaagaaagtaataaaagggaaaaagagtatattattgttgaaagtgggatttgaacccacgccctttcggaccagaaccttaatctggcgccttagaccaactcggccattccaactcatttgttttatgtactcaatttattatatttatatctttataatataactttcatataatatgtattaactacgtgacaaaactcattaagtgcaacatcaccattgattgtttcactttgtttagtatattttgtcctttttttattttttttatttttataaagacaacatttatagattcaaaatgtaaaattagaagtagcggtcattacataaaatgtttcgcagtgctagttcaagtaaattaaaataattgtgaatatatattcatttagctacattatgagtaacaaagttaccaatttttttaatactaaaaaaaatacaattagatagcaaattagaaatcttacaataataagtacactggttctcaatttctcatctaaaaatgattccattaagagctttgatcatagtttagtatattttgtcaaaaattgtatgttccactctataaaagaaatcctatcaatgaaaatgatgtggaattttcagtaaattttcgtttctaccaaaaatgatatgtatattttcggtatttggagaatatgggtgtccaaattttttataaatatgtttttggatatccgaatagttataattttaatttttttatatcatggtgtatattgtattcattttagataacgtataaagttttaaaatttttaaaataatttacattatgaaaagtatagttcaaataatttattaaattataagaatttatttttgacgtgttaagttatttttgatattgttatataaataattaagattaaaattatttaaatattgaaattacgaatgtggtgcattgatatacttattttgaagagcacactataaaatttttctataaaaatattgtaaaataaaatattgtaggttattagatctttctcatctctataatctaggtcctacctttaaatttcctttgataaccatatgaaaatattaggagatggtagagaatctattagcatgatattatttccatatgagcaagtaattaattaacaattgaactattttgattggacttttgaggtgttttgtgtggttgggttgggccatagagatggtcaagccttagaatttgatccaaattgtttagtcttttgggtctttatttgatgggtctccaaacttgactcatgaccaagtcttttgtctattggccttggttaagtactttttcttaaaaagtcaataattatttatttttaagattttttttttcaaagagaatagttaaaaggtagcaatagtcctaaacactactataggagcattggggatagttttaaaattgatttttttcccatgaagtatgacctttgttgagttttgtcccctaaactttattttattgtgaaaattcttttctaaattcagttacattctacttattttctcaaaataatattacttatgtggcatgagttataagtatagatacagtacaataatgtatacatgtgtagggtgtgcaactaaagtctcgcattgactaaaaataagaaagatcataagtatataaggatagacactatcttcatcgatatgaggatttttaggaaggtatccaagataaaactttgagggcttaggtccaaaacggacaatatcaaattaaaagtagagatggatggtgtctaacgacctataacaagtggtattagagttaggttccaaagttagtcatgcattgaaagaaagtacactaatgggtagagagtaaacggatggaaaatcatttaaggggagacttgttaagtgtgcaactaaagtcccacatgtgtatataaaggatgaacactatcttcattagtatgaacaatccatcattaaatttctatttatgtatttattttattgtttgaattcttgagcttggtgaaattaacgatatattattagtgttattttaacaaattacttagagaaatgagcaaaaagtaattgatactgatacatacaatgatttttttatagttgagtaaaattttttgtaacatataaaagtttagagagcaaaattcttatttattcttttaaatataatttgttagctgtgagatcaaatgattgtgaggtggaggagagagagtcaatttttatgagataattatgatactattgctaattctaaataacaccaatttttttttttacaaaaagaaaaaaaaatataagtggctcaaaaccaattatacataaagtcgttttagcaacatcagttgttgccactgttaaatattttataatacaatgtattatattgaatattattattagatactgataatgttccagcacaattatgattgatgtaaaattttacgaatgattaataattttatataattattattaaattaaaatatgtggaagttatacttaattatacacgatatcttgtggtaccacttggccacgtttgtacatgtattttttttattatattagtataatataatatcaagtcttacatttttagtttaatatgtgaaaaattattaattacttgtaagatgttatcttatagtaacattcgattagtgtctagtaacacttttcaaatattgtgttataatatatgatataagtgattgtatagatttttatatttaaaagtaaccaaataagatgaaaaggagagctattgatatttctattttagaattataatcacattattggtcttttttatctttttcaatttcttttttctttttctttccttttttgttaaactataaaagtgttttagacccacataaaattatcccctaaaataatgtctcttttgaaattgtaaatgatcattggtttaaaacttttgtaacaaacacatattttttactatatataaatatcttatcctattaataatataatatatgaaaagtttattctaatatatattttaataattaatcaatgaattatgaagcaatgtaaaccaatcaaaatttgttgggggctgagacacaagagcctttgtttaaagtttttataataataagggtaaatactattttagattttatgtcttataaaaattattaattaaaatttttattttattgaatagtaaaatagactttatattatttaaaatagtaaaaatagaatt

SEQ ID NO: 184672 - DNA, 4266 bp, Cannabis indica
gttagtaactaaaaaaattaaaaaaaaaaaaaaaaaaaaagtaacttttaattttaattttactttctatttttgtttttgttaataatttcttcgaacctatttaagtagcaataataacacaatgaacattagaaattcatatgtaatcatcataagaatttcaaatattctttcttagttggtcaccaactttttaattatttgaattactaacactaatcatgaatttttggctttcctatctaaataaacccaattgaaatgtaaaaactttttaaagaatattgttaatcaatcaaaaaaaactattactatgctcaattattagtctttgttacttttcacatattataaaaaactttacctaaataaaataaaataaattaatcaagttttcttctttttggttttaagcaaaaatggtatataatattccaatagtttaaaatatcaaacaaaaatattaaatttatttttatttgatattctatttcattattctagaatttatatataaaaagggcatatacataatatatataacattattttgatctacattcataaaaagaaactcacaaaaatcaaaagctattgcaacaccaattagtaatatgacattagtagtagtaaaccaaatcaccattatagttgagtgaaatagtgtatatatatatataaattataacaaatataaccttaaaaatatcacaataatccaattattgccactaaaccctgttaaattatgggtttaacagacagaattaagtcttttttttttgttcataaatataagtaagactagaaatgtgtgtagtttttactctcaacaacaataccaccattattgatggcctcttcttcatttttgttcctctctctctatcttcctgcaaaacattggcccagataagatcaaacccgaaaacataaaaatcagtttccaaaactcggtgaaagaaaaacataaaggcggtttttaattttaccgaattcaatgagtgtgttgaacacacttagatgcactaatactagcacttctcaataagcatttaggactattcttaggcttgctacatccatttcgaataactggtccatatttgtatgcagattcgggtttttctcgtggagggctctgaatagctgctcggccaagtgaacctgtagagtttttcttatgatcattttgctcggaatcatcatctatgtggacacaaatccgttccctgaagacaaaaacacaaggtttagaagacactgaagaaattatcagagcatagaatatcttcaatagtatagttacctaggtagggaagaagcatgcttcctttcgagtggactagtgcttctttcaccttcgctgtagtgctcctcgagatgggcaaattgtcgcttgaattgatcgattccactgagttgacataatgttgtagtatattagttgtttaaaccgttcccaaacgagtaattcaaatggttaaacacgtgatttgttcccgtaaaaactctaaagttaagttcttcttgacacttgaaaaagaataatctcattttctttacgattctttgtgaaacgatactcgacaaaaaagatgacgactcataacataaatatgctgaaatgacaatcttccaatcattttgggtaactccaagaatcttttaaatttatatgaaaacatctttaagatcaatgttaatgattggaaagaaaaaagacagaattctcaaccttggatacatgaagccgctatcgtctgaaccttggaggtactcctgcaacatcttcggatgatactctaaaatctgttatgattcaaatgtttaaggatcagagaacagtaaacaaaggattgcataagagttaaacaactaagagccatagttataacaaaatgccatgagttgtacctctctatatattagctctcttacgtcgtcctttattaatttcgtcctctcaaaatcaaattcaagcttcgagatgggttgtctagatggttcattttccaagttcgccaatccaaaaaaatagggatctgccaaggcctgtaaatgaaagaatctcctttatcaaaaaatatgtttttacatgcttttcggggaataaagctatgccaaacaactattttgataaaggcttatctgttcagcagaagggcgatctttaggatcaaatgccagtagacgttgaagtaaacgaagagccaaaggatccgccttagggaatttctgtgacaaaggaatcggttgctttttcctcatcgaattcagatatctctttgccttctcattccgaatctacaaaaagttgtgatggattcacttgtgagatatgtaagagaactaacaaaaaggaaatatcaacagaaaaaactaatttacccttgcaattgattcctcagaaggggtgccagtcaaatcggtaattagatccaattgattcacaacattttttccaggaaacaatggcttgcccgtcagcatttctgcaaatatacatcctatgctccaaatatctatagcatgagtatactgcaaaagcacaattgacaagaaaaatctcaaaagtccactcatcaccgcaataatggcaacacaaaagaatggaaatgcttataccttggagaagaatgagccacaaagttcaggggcacgataccatcgagttgcaacataatccttagaaaaatgaataagtcagcaaacccaagtatttaaaatatgcagcactaatgtgagtttgaaagtactagcaaaaccgcaaacaagaaaagttctcatataaggacccatacagtccaaaaaacagtagatggggcatcattaaatgctgcccgggcaagtccaaagtcacagattttcagtttgcagtctgcattagctagtatatttttcggtttcaaatcacgatgaaacacatttgctgcaacaaaacaataaagaatgacagttagagcaatccacaaactatgctatgataaagcacacgaaacaaaggcgatattctaaccggtatgtatgaacttcagagctcgaagtagctgataaaggaaaaattgatgatgctcaggagtgagatcatcatttgccttaatgacatggtgaagatcagactccatcaactcaaacacaacatagatatctttgaactcccttctacatggaggcagcataatgtgtttgatttcgactatatcggggtggtgcagcaatctaaggagctttatttctcttaaaatgcgagtagcatccgagacatgctcaaagacatccttgattttcttaatagctactttctctccagtatgagtatcaattgcagaagcaacaacaccatagctacctttgccaaccatttcttggatttcatattgacttgcttccccatattctgtgaaaaattctttgtcaagcattgtctgaattaaatgaaactctgattagtaaactctttagtgaaaaactatataggatgtaagagcaacaaatcactaacttaaacataaaagtgttccatatatactctgtgtttggttttgtgaacataatttcagatttgattttatgtacttgggatttagattgattgaaaaccaaccaaaagaacattaaatttaaactcaatacataaaactaagcacaaaattataatgggatatatccccaaaagggctatgaatagatataaaattagaacaggaaaacatgtgttcaagcagataattctaaaagtcaaaatagattacataatcaataaggagtaattaaaatcaaaactttcacaatagatcaacacatgaaataaattcaatgagaagaagaagaagaagaagaagaagaagaaaatatttaactggttttgtttgttcttttccttttcttttttgaaggaaaagaatcacaaaaaagcctccttgcttggaatgccaccactcttcagatgacaaaccaaattatatgaatcaatcaaatacaaccacaaccatatatttatatatctctatatgtaataatttatatatatacacacacaccaataatttgaatctgtcaaaaatgagttctttttatgaatgagtgatcatccttacaaagaaatgacaagattaaaaaaaaaaacaaatcaaagtcaatacattatatatatataagagagagagagaagaataattccaaaaatgaaaactttgaacagaagaatatataataaagaaaaggggtttgtgtatgtggtaatggagttaagaaaaggac

SEQ ID NO: 184673 - DNA, 3116 bp, Cannabis indica
agatattcagaaacagcaataaacatgaagaaaacacatacccaaattaacatcacccaagcaccaagcattcagcctgcaaactaatatgatactacaaaagctattctgttacaggtttcctttataatagatactaaagatgttctactagatttcagggggctgttgaagtatgtttgacataaccatctcagttcacattttcaaaaccagtggtgagaatggtggccaagagtaagcagggacatttatattgatgattaaatcaattctttcagctttaccaaccttcatctatcattgtttcaggctcctatacatgttgtagttaacaagatacaaaggtaaataaaataattttttgtggaatgagcaagatatcatcaaatccgatcaccatgtggcatgggataacattttattttcgaaatccaaaggatctttgtgcattagaaatctagttaaacttcatgtataagtgtttgggaaaatcttcacagacgattgcccttagatacatggtcttgattctaataaatgagattctggatttacattaagaaccaccttttgtagactcagtgtcttccgatgagaagatactgtgaatgagttattttgggtgactctttgatagaagagcattaaggtgttcaatatttatctgggaaggagttgtttctggtggcacttcgaatgaagagttttaaagtgtgagtgtttcttgatatactgagggtccgggagttggcacataggactgttttggtggttctatttttcattttgctgttttacttaaggatttccagactttatggggaactagagttccctgttttgtaaatttttatttgaaattagtagcctatatgaaccaaaaataatgtatgtaaggattacaggaaattcaaaaacacattttgtgcttaacagtcaatgccaacttgaaacaagtatttcagaacagcaataattatttttaaataaaaacaaaccaaaatcattgacagcacacctcaaaagccaatcacacaaggaaggcaaatctttggttatctttgcacccaacttgagctaaagtagaatgccttgagtaaccgattataatgattattttttttttggaaattgcatagcaagacaccatgacacgtgtaaaagaatgaaatgaagaagaactagtgcataatataactgtgggatagaccaactaggtattggagacaagtcagtaaaaccatatgcttttaccatggacgaatgtcacttccattcgctctaagtatgttttcacgcaatgccagacctgtgtataggaacaacagccaagcctgaaaaattgtagactcatatgtcaactcaaatgaaatgggaatcaagtattaaaagaataggaattagcactagcagtaccaccaaaatgttaaaaacaaaagaataatagtatgaggttatatatacctgatatagctgaactgggaatgctggcaagcatccatcccatttccaagatctcaaaataagcaaaataaatgggaatagaagaaagaggagggcagttctatcctgttcaatgagacaaaaatatagccagtgaagtttgtaagtgacaagtatgaacaagtaatcgagaatgagtttgttttcatacatctaaacaatggcatgtatatgcatttttcatgaaagtaaagcataccctatagctgttgtactcctctttgaccttcaactgaatgtccttgcgagatgcacggacattaataggacccaaaaacattctcagaaagcgacctgaaaacaacagtagatttgaaatcaataagtggcttttattttcaaattttcttttaagaaaagaaaaggggtctgaccatgagctttggcaggaagaaaagaagcggcgtctccatcggcgaggagacatctggtccggtgcaaatcttcttcgagctgtaaaacaacacatgcaaatgagaaaccgagaaaaaaaaaggagggattttaaatagtaatcttgcatggatttgaaaaaaaaaaaaaacgaattgccttttcagcgagcttgggatcggaaagagtgagggaaggaagggaagagcgaaggcggcgaagggaagaatcgagggactgagcacggtgtcgaagggattgttcgtcggtggaagtcttggaaaggaaggagacagcggcttcatgcaagtccttggcctcttccactgctttccctatttgttcttctatggatttctcatcccccatctctgcttcacctttcttactttcttcttcttcttcttctattcttattatcaaatcgaaattgaaatttgattgaaactgaattgaattgaatcgaatcgaatcgaattccaattccaaatccaaatccaaatccaattcgagagaggatacgatatgataatggtgatagaacagtaagcaaggaaaggcaaagcagtttgtttagcaaagaaagaagagaagagacctcacaacaacacaacacacagccaaacccaaaaatcctatatttatttatttatttatttatttatttgtaaataataataataatattctaatattctatttctcactaaaactaaaaaataaaataaaattgtatttgtgtgtgtctgtgactgtgagtgagtattgttctattctattctctctatctaaataaagctggtaaagtaataactgactcaactcaagtaataaaggcatccacaatcaaacaatatgtttctttcttctattttcagtaactttttttctctttcttttaccttttctctcatgtaacccgacccgacccaacaaccaaattgaacaatgaacccaccaaacactccaagttctttccaactatttaggtgcaattttgaatttgagattttgatgatgatgatgatgatgatcactcactcactatttattccttttctgtttggtttgtttgactctcataaccattatgataacttactcatatcattatgtctacactctaccaatctttacttgttcttagcccaactctactgtcttaaattaatactattacctactcctcctactcctactcctactaccatatcatc

SEQ ID NO: 184674 - DNA, 6818 bp, Cannabis indica
cttaagttatatttcttgaactttcaaacgtaccaaggagtgactgtcatgtggtcattcacttagacatttaacgtttaggtacatacaaagattctaaaaaaatatatgtaatcgcaagttaaacttaagagtaatttgtaacataaatacttaagtttaactctgagttacaaataaatacttaagtttaatttttgacagtaataatacctgttgtgtagaatttctcccagtatacgtgtcaatccaaaaaggggtcaagtggcagcagaatccgtgtacaggacatattgccttaattactctcgaaactcattatttccaaggagtaataacatggtagtcatctccgggaggatccctttgctccacgaataactttcgccccttccgctccacgagtgaagtacatacgaagaatggaaccagagcactaataagagatggcatgtcactcaaggatcaagacactctacatacatttgatgcaacatactttactttgccaagcgtgtttaagggtttaagctcattattttttgatttcacgaacctccacacatcaatcggcggctgcataagtgagttgtcaaatcataaacaagggataaatcacatcccacaaaactcctatagacaacctaaaatccatcataagataggtaattatgcccaaagttagggttgagaaattgtaccaagtatggtatagacaaacacgacaatagaagccttttgaccaccatcacaagtctataaatacctcagtgatatacataaatggggaccgactgaaattttttataataaatactctcattaatacagtgacttgtagactaagactcattaatgctccaactacgtaaaatattatttttttttctaacattcattaattacttcatacaattaattactggttgccaaaaatctcgatcaacaatacttgaattatatttttagaactccgtaagtacctaactgttaattgtcaaatcattattcacttattattttcttattagtatatttaatctaatttaaaaaaaataaaaaattaataactgaaccaataaaaaattatcacgtgataatttactaaacacttaaaatttaaaaatcgaaaaattaaatttaactatttatggtaaattactttaaatttaattatttatgtgagaaattattcaaataacaattaaaaaaaaatgaaaaatgattgttgtgacagtactttttttttttttttttttttttagttttagaagaaaaagattgtgaccagttttgtcttttaaaacactctaaaagtataagtgagtggctaagttgctcagccgcctcaccttctttctctctcctaaaaccctcattccctactttctctctcctaaaacctccgcccaaaaatggcggctttcaccacccaccaccaccctcatcaccaatcccacctattaggccgattatccactctcagacctaagcccagacccgccccatgtcgggtccgaatggccctccaagaaaccggtccatctctcgccgtcgttggcgtcaccggagccgtcggccaagagttcctctccgtattatccgatcgagatttcccctaccgatcaatcaaaatgctcgcttccaaacgctccgcgggacagaacatctcattccaggacaaaaactacgtcgttgaggagctcactgccgatagcttcaatggcgttgatatagccttgttcagtgccggaggttcgatcagtaaggagttcggtcctttagctgttgaacgtggctccattgtcgtggacaatagctctgcttttcggatggatgatggtgtgccgctagtgatcccggaagttaatccggatgccatgaaagggattaaggttgggaatggaaagggtgctttgattgcaaaccctaattgctcaaccattatttgcttgatggctgccactcctctacatcgacattccaaggttaatcactgcaatttttgctatttttttatttttttattttattttatttattttctttgatgtaatatcgaattgtattattatctgtattcaggtacttcgtatggtggttagtacatatcaagctgctagtggtgctggagctgccgccatgagagagcttgagcaacaaactcatgaggtatagcataattggttaagcttatgcttttgtttagaactagaagtaaaagttatagttaaagattttttttttgttcaatgaaaagttattttcaaagaatttggattttaattataaaagatcatgaatttttatgattttaatccggaaaatagcttcttaaaattcgttttgggtgaagctacaaatcttagattctcctaaaagtacttttaaattagaaaagaactgtttttttttttaaattcaaacacttccaaaatgacttttttaatccttgaagctaaaaaagagtctaaaagaatttagctaaacggggccaatttgattctgttcccaaatattattgattttgaatcccattctgttatttttattgatattccctgcaatcgtttattatcttcttaaaaatgattttgtttgtgttttctgatcttaataaggtcttggctggaaaggaacctacttgtgacatattccagagacaggtctgtattcctttttcaaaaatgtataagaaagagaaagattgttcctttgattcgtggaaaattttgctgaatcaagtttctgtactttcacgttttgcagtatgcgtttaatttgttttcgcacaattcgtctgttcttccaaatgggtacaatgaagaggaaatgaaattagtcaaggagacaaggaaaatttgggtaactaacttaacttcaattcaattgtgtggtaatgtacatttgcttggtttcttataattttttttaccttttttcttttcatttttgttttagaatgatccaaatattaaggtgactgctacatgtattcgagttcctgtgatgagagctcatgcagagagtgtgaattttcagtttgagactcctcttgatgaggtaatgctattctactgccttaatctattagtttacgtcattatcgaatgctgatagtttggtagagacccttcatgcatatttttccattattagaacaaattgagggttattgtttataaatataggtaactgaacaaaatgcaatttcagtttctttacgaaatagtatgaagtttgtgtcaagtaaataaatgtctttgcgggaatagatgccatggaccattatgtgatttttttgtcttgatttaggctttcatagacatttttattattaatattatggtttaatatgctactgctagaaaccatcaatgtacatgtacctttcgaaacattcaaagggattgggggggagttgtatctagttgcagttctctcctggatttttagggtgtgcgtgagcatacttgatttgacataaatagatttaattcgaaattatgaaggataggaattcttttgcttgctattgggtctccgaataaggaatgatcaagctctttgaattgttagacatgtggattgcgtccacaatgtctgaggttttgtctttttaagattctcccgggtatttacatagcaattactatagtatcttggtctcctaatattgtagggctgggtggggattctacaaaaaaaatctcttcttgattcatatgcattgttggctacgaatgattgagctctaaatattagaattggtagtatataaaaaattaatttcgaaggatgtgaaagcttataggttcaaattttgttgattctatgcagaaagctattggtgctttgaatttaatattaggttttattttgcttcagtttttattaaattgcaaatgtatggtaatacatataattcacatgattcagactggttgtatattgtagcaatgttttatgctttggaaacatttcagagtggacttatttatttctctttgctatttatatatggatttaggaaacagcaagggacatcctgaagaacgcacctggggttgtggttattgatgacagagcatcaaataacttccctacaccactagaggtatcaaataaagatgatgttgcggttggcagaattcgtcgcgatctgtctcaggatgggaattatgggtaaggagtaatgacttatctatacagtttggtagagaggaaaagaaaatggcaggaatgaacatatgagagaaaaatttggaggatagaaagaaaagtatttctctaaagttcattttctttttcagaatttatcttatctctactctatcaaacataaccacattgaatgtttgtaagaaccttcatacttataattatgtacttgtatacaggttggacatctttgtttgcggtgatcaaatacgcaagggagctgcacttaatgctgttcaaattgctgagttgctgttataatcaaagctagctagctagacataatcgggaagtttcataatctagtttcgttcatgagatgagttaaagctttcggtcttgtttaacatgtcttttcttcaaatgcatcccagaaggtcaaactagacaaatttgagtactatttataaactacaaggcttccttattcaatgttgcctgatgttgttcatttcactcgagtcttagcattatgttctctcatcttgggatgaattttgttgcataattagttttgtaatttagactttagaggaacaaatgatgctacggaaacttttcgatcaagtatttgtttcattaattgtgtaatgctctttcaaaatgcatccaaagtataaaaaaattacgaaacagtattcaacttatgattttaaaataactgtcaagttttaattgcaatgggttataaaaattctttgtctgcaatgctctaatttgtacaaaactttatgtcaaatatatagagttttacttattgatcaggaaagttctagttaatccaaaagctaagatattgtttttaggtttgaatctgacaaattaaagctaaaatgataaatcactgaacaacgaatttacaagtttctttctccataagaaacatattccaattgagtagtgcttggatctctaagaatcgagtaaggaaatcttcactataaaatcattcagggtacatttaccaattctaatttacaaatcaacaacataaactaaaatgattttatacaagagttaccgatacacttgattacaatcaagtaccaagatcaaagtccccttacacttgagaagacaagatctttttgctttcaacaagctgaattctctctagcagatcagtcaatctgcaacaaaaacaacaaagaaaaatacagaaaagtttttagccctaacggagcaaaaaccactagaagattctatcaaagatgaagagttaattagaaaaagcaagatcaacttatttaacacacaactaacataaataatttgctgtgcttacgtaatctaaaatggatgaactcacagattttacaacaaaccaaattagataagattgaagaattacaaatgaccataatatgacataccacaccaacaaacttgagttgtattacttacatataacacaccaaatatacatatgcttacaatcataaacacaaaacttataaaagttcttaacttattcaagacacacatatgagcttagtacactaagaagccctcaaatttcttcatccaaatcaaattcactgatgaactggctcagcatttatggtaaattcagagtgcttctgagactagctttatcccttttgatcacaacaagtttgtcaaaaacacaccaagcaaagctcaagaaatggtctctagtcatatcatcctcattgcaggagccccataagctaggatgataagtgacaaagtaccaagctgaagcttttgcagacaagtcatcgccaacattatccgaatcacttgctgtattcttgttgaaccagctccttgcttcttttataagcgcttcacagcatagttagctgattccaagtcccttttcttgttaaagtgtcttgatttcgaaagcacattcccacttagtatctctgcttcagttttgataccataatactccattaggcttcccaacttgtagtcatactgagttttgagattcagggcatcgtctacataacgcttgaagccatctacttccatgtcggggtcataacactgtctcgccacttctctggtgaaggcttttatcgagttagagtgttcttctgcctctttcacctgtcgaaatagcttcccaattacacgtttggatttgtacattttcttgtctggtttttccatgaagtccggatatgatttgaccctcagatggcctggaagtttagctggcacaccagttttttgaaagtccacagcggttgagaatagctttgctaactcaatgcattttttgctcttggcctttcttgattctttatcagcaaaaacagtatgtgcatttgaaatgattcccaagttgtaattgataatgtaatctacaaaatgctcttgaacttcctgcaacacagttataaattatgcactgtcagttatgtcattagacataacagaaattctcaagatatttaaggactaatctttcctttcattacattatccattgtatttcatataagtaaagggctaatcttttgtgagaaagaaaagattgctctaaggaaataccaaactgtttctaaaaagtttgtaactttgtaatttcatctttgatatcattaaaacttggatcaata
